United States Patent Application Publication US 2018/0126003 A1 - sequence listing, part 23

SEQ ID NO: 37954 - DNA, 5687 bp, Artificial Sequence
  derived and/or modified sequence
cggatcagagatagcagagcgccgagttggggccacgaaggcgtgaggggagtcgtcgtccctcctgcacgaaagcgtctaagccttggcgacgccgccctgggggacccacgtcaggcctgggatagggaccgctgtccccgggtccctaccaatgtcgcccgtcgctcccggcccagctctacccgcagagtctgatggcagcggccactctgaggacgccaactcagggcactgtgacctttgaagatgtggccgtacacttctcctgggaggaatggggtctccttgatgaggctcaaagatgcctgtaccgtgatgtgatgctggagaacttggctcttttaacctctctagatgttcatcatcagaagcagcaccttggagaaaaacatttcagaagcaatgtgggcagagccttgtttgtgaagacctgcacattccatgtgtcaggggagccttccacctgcagagaagttgggaaggacttcctggccaagttgggatttctccatcaacaggctgctcacactggggagcaatcaaatagcaaaagcgacggtggggccatcagtcacagaggaaaaactcattacaactgtggagaacacacaaaagcattcagcggtaaacacacacttgttcagcagcagagaaccctcactacagaaagatgttacatatgcagtgaatgtgggaaatcctttagcaaaagctacagtctcaatgaccattggagacttcacactggagaaaagccttatgaatgtcgagagtgtgggaagtcctttaggcaaagctctagtctcattcagcaccggagagttcacactgcagtacgacctcatgaatgtgatgaatgtggaaaattatttagcaacaagtctaacctcattaaacatcggagagttcacactggggaaaggccatatgagtgcagtgaatgtgggaaatcctttagccaaaggtctgcactccttcaacatcggggagttcacactggggagaggccttatgagtgcagtgaatgtgggaagttttttacatatcattccagtctcataaaacaccagaaagttcacagtggatccaggccttatgagtgcagcgaatgtgggaagtcatttagccaaaactctagcctcattgaacaccatagggttcacactggagaaaggccttataagtgcagcgaatgtgggaaatcctttagccaaaggtctgcactccttcaacatcggggagttcacactggggagaggccttatgagtgcagtgaatgtgggaagttctttccctacagctccagtctccgaaaacaccagagagttcacactggatcaagaccctatgagtgcagtgaatgtgggaaatcctttactcaaaattccggcctcattaagcacaggagggttcacactggggagaagccttatgagtgcacggaatgtgggaaatcctttagccataactccagccttattaaacatcagagaattcatagtcgataaaagccttatgagtggcaaatgtggaaaatctgttagcaccctggagaaagtccttgagtacacagtgaatgtcagaaagcttcagctgaaggccatatctcattgagtgccacacagttcacaagggaaagacacttttgatatgtagggatgtccagttgatataacagctctgaaggagatcccttatgagggtggcatcagcctgaattgaacatcctatatctgaacatctgcataaattccaggtatgtgtgaactgcattgcaccttttgccctgcccagggcccatgtcagatttatgtctctgctgatactatagtggaagccattttacctctactgcctggcaggtgaccaccagtgtgcaccactcacccatcccagtgtattcaggccatggacctgacccagtttggcccagaggactctgctggtgacctgaaaagagggactacatatttcaggatattgttggtctcacatgactcttgatagagtttgccagccttcaaatcaccaactgtgggaaccaactgcctcttattgccttggtttgtacaataacaaaggccttattaatcttgggggttctatatgtatgggttggtttgaaaacagttgggttctgctaacatgaaggggtgaataactttttttggagatcccaaacattgtgtagctcaacagggacagggacagggacagtaggatggcagaatatagctctctctctagtttgagcctagttttcattgctattcaaggcctctgagaaaaaactacagggtattgtcctaatttatatcctggatgccatagaggtcagcctgaggaggcagcagttacttgacatcctttgatgtttctgaaagcaacatgaaattgttctcttgttcacaaggaatactgcatcgtgttcagtgccagtgggggaaatctgttccccaggtcctgtatgccttgatatcctgaattccacagggtagcaccacaggtggtaagattatagtaggaattataattgttatagaagtactggattgatagagagtggaaaactgcaataacactgcaataaatagaatgtgccccttttacagaggtttccatgatgttcgttattatggctcttaaggatgagcaggtacagaaatcctcaggacctacagaattgtgtatcttgtgtagctgaggtcattgtcagaaattttatggaatcctgtagcctctgggattttcacctcaaggtcattgctatgcaggcaggaaaacaaggatagagaagggaggtctaggccattgatacagcctttgtgatccagccaacatttctgttgagtcaggtggaaatggccttcactgttcacttgtatttgtgatcactgaggcaaaatcctctcccaggacatgaggagagagatggtggaatcaacatagggttgtcaaacctgattttccaaaaacaataggaaattcagacttttattttgaaccatattttgttaggttggtgcaaaagtaactgtggttttgaaccatgatttatttttatttttatttttttttgagtcagagtcttgctctgttgcccagtctggagggcaatggcactatctcagctcattgcaacctccgcctcccaggttcaagcgattcttctgcctcagcctcccaggtagctgggattacaggcacccgccaccacgcccatctgagttttgcatttttagtagacatggggtttcaccatgttggccaggctggtcttgaactcctgacttcatgtgatccacccaccttggcctcccaaagtgctgggatttacaggcatgagccactgcgcccagccaagctttttcaccattccaatttccttcaaatgctgaacagccgtggaatggttgacattgagttcttaggcaacttctcatgtagttgtaagaggatcagcttctaatattgctctcaattggtcattgtcaacttccagtggctggccactacttctcttcaaggctcttgtctcctttgcaaaacttcttgaaccaccactgcactgtacattcgttagcagttcctgggccaaatgtgtttatatcgtgagttgtctctgctgctttacgacccattgggaactcaagtaagaaaatctcagccgggtgcggtggctcacgcctgtaatcccagcactttgggaggctgaagtaggtggatcacaaggtcaggagttagagaccagcctgaccaacatattgaaacctcatctctactaaaaatacaaaaattagccgggcgtggtggcatgtgcctgtagtcccagctacttgggaggctgaggcaggagaatcacttgaacccgggaggcagaagtcacagtgagccaagatcacgccactgcactccagcctggacgacagacaaaacaagactccgtctcaaaaaaaagaggccagatgcggtggcttacacctgtaatcccagcactttgggaggccgaggtgggtggatcacaggtcacgagttcgagaccagcctggccaacatggtgaaaccccgtctctactaaaaatacaaaaattagctgggcatagtggcatgcacctgtaatcccagctactggggagcctgaggcacgagaattgtttgaaccccgggaggtggaggttgcagtgagccaagatcatgtcactgcactccagcctgggcaacagagcaagactctatctcaaaaaaatcgctgaaatttgagttttgtctaacatttccatagtctaaaataaacataaacagcaagtagtaagtcagcaaaaaaacataaagcgagaaatgcctattaaaatgatgtataaccacatttatttaagaatgttttccaatataaaatggcaaaatccaacatgcaaaaacggcaattacttttgcactaacctgataataattttaataagaataaatggtacatatttaaactatataatttgatcagctttgatattcatattaacctgtaattgctcccaccatgccaattttgaaactgccaacatgttactgaatgtagaattgggaagagttgctgatagcatcctaatatattctgtttctaccatactgatacagtggccacgaataacctcaagaatgtagaaaataaaatgtagtgaaatgattaggaagaagttgtttcttcacaatcatgacaatgaacgtgtcattccacaagttacctcattgtcctttaataattatctgcctataggcaactattgatttactttccattataatacattagttttcatttgctagaattttatatgattgaaaccataatgtatttactcttttttaatccctgggtatagtcacgtatttattttgagattcatcattatacctctatgagtagtttcttttttttgtattgctgagaagtatgatgttctgtggatataccagtattcgtttattcattcattcatttgttatggatattttgagtagttttttaaagtagtttgaggtataatggaacttaaagtgcttatatttaaaatgcatattttgatattttcatacatgcttacaccctggaacgcagtttccttctgtctttttagttcattctcaacatataaaattaattttcattgtgtaaaattactggtacaatgacatattttgtctcctgttacagctgtgttcaattacaaaaaaagatggaaaagactgttatgaagccagatgaacctttctccagtcttccttcactatttttttttccttcaccatttatcatttcatagtcatttatgtttcatcggtcctcatgtgtactagtgcgttattttacttatactcccggatatcatattatttaatgcatagcctcttcagaatgcaattttaaaatgtaaaggctcttttataaccccccaaaaaatcacacaaatatattttaaaatgtaaatattttatcgcttctgttttctcagttgtctaaaacaatgtgtttcttaaggaagatcatttttattcaggatccaaatgtatatttaatagctttcagtagttgtatctcataagtctgtaacctacaggttccatttacctttgttttcttatttcttgaagttgctgagtcattttttaattagaatttgctgtattct

SEQ ID NO: 37955 - protein, 271 aa, Artificial Sequence
  derived and/or modified sequence
MASKDAQNQRRGLPGFLPGAPDPDQSLPASSNPGNQAWQLSLPLPSSFLPTVSLPPGLEYLSQLDLIIIHQQVELLGMILGTETSNKYEIKNSLGQRIYFAVEESICFNRTFCSTLRSCTLRITDNSGREVITVNRPLRCNSCWCPCYLQELEIQAPPGTIVGYVTQKWDPFLPKFTIQNANKEDILKIVGPCVTCGCFGDVDFEVKTINEKLTIGKISKYWSGFVNDVFTNADNFGIHVPADLDVTVKAAMIGACFLFDFMFFEHSLAGL

SEQ ID NO: 37956 - DNA, 816 bp, Artificial Sequence
  derived and/or modified sequence
atggccagcaaggacgcccagaaccagagaagaggcctgcccggcttcctgcccggcgcccccgaccccgaccagagcctgcccgccagcagcaaccccggcaaccaggcctggcagctgagcctgcccctgcccagcagcttcctgcccaccgtgagcctgccccccggcctggagtacctgagccagctggacctgatcatcatccaccagcaggtggagctgctgggcatgatcctgggcaccgagaccagcaacaagtacgagatcaagaacagcctgggccagagaatctacttcgccgtggaggagagcatctgcttcaacagaaccttctgcagcaccctgagaagctgcaccctgagaatcaccgacaacagcggcagagaggtgatcaccgtgaacagacccctgagatgcaacagctgctggtgcccctgctacctgcaggagctggagatccaggccccccccggcaccatcgtgggctacgtgacccagaagtgggaccccttcctgcccaagttcaccatccagaacgccaacaaggaggacatcctgaagatcgtgggcccctgcgtgacctgcggctgcttcggcgacgtggacttcgaggtgaagaccatcaacgagaagctgaccatcggcaagatcagcaagtactggagcggcttcgtgaacgacgtgttcaccaacgccgacaacttcggcatccacgtgcccgccgacctggacgtgaccgtgaaggccgccatgatcggcgcctgcttcctgttcgacttcatgttcttcgagcacagcctggccggcctgtag

SEQ ID NO: 37957 - DNA, 816 bp, Artificial Sequence
  derived and/or modified sequence
atggcttctaaggatgcacagaaccagaggagagggcttcccggattcctgccgggggcccccgaccctgatcagagcttacctgcctccagtaacccaggtaaccaggcatggcagctgtcgttacctctcccatcatcattcctccctaccgtgtcattgccgcctggtctggagtacctctctcagttggacttgataattattcaccagcaggtcgagctgttgggcatgattctcggaacggaaacctctaataagtatgaaataaagaatagtttgggccaaaggatctatttcgcagtcgaggaaagcatctgctttaatcgcacattctgttctaccttgaggagctgtaccttgcgaattaccgacaactccggtagggaggttatcaccgtgaacagaccactgcgatgtaatagttgttggtgcccatgttaccttcaggagctcgagatccaggcacctccaggcaccatcgtgggatacgtgacgcagaagtgggaccccttccttccaaagtttaccattcagaatgccaacaaggaggacatcctgaagattgtgggcccgtgcgtcacctgtggctgtttcggtgatgtcgacttcgaagtaaaaactatcaatgagaaactaacaataggtaaaatctctaaatactggtccggcttcgtcaatgacgtctttacgaacgcagataactttgggatacacgtccctgctgacctagatgttaccgtgaaggctgccatgattggcgcctgcttcctgtttgactttatgttcttcgagcacagccttgccggactgtag

SEQ ID NO: 37958 - DNA, 816 bp, Artificial Sequence
  derived and/or modified sequence
atggctagcaaagacgcacaaaaccagcgacggggattgcccgggtttctgcccggcgccccagaccccgatcaatccctgcccgcttcgagcaatcccgggaaccaggcttggcagctgtcactacctctgccctcgtccttcctccctactgtgagtctgcccccaggtctggagtacctctcccagctagacttgattatcattcaccagcaggtagaattgctaggtatgattttgggaacggagacatcaaataagtatgagattaagaactcccttgggcagagaatatactttgcggtggaagaatcgatttgcttcaatcgcaccttttgctctaccctgcgctcctgtacgctgaggatcactgacaactcgggtagggaagttatcactgttaaccgccctctcagatgcaatagctgctggtgtccttgctacttgcaagagttggagattcaggcacctccaggcactatcgttggatacgtaacccaaaagtgggacccctttctgccaaaatttacgattcagaacgctaataaggaggacatcctgaagatcgtcgggccttgcgttacctgtggttgcttcggggacgtggactttgaggtgaaaacaattaatgagaagctaacaataggtaagatcagcaagtattggtctgggttcgtcaacgacgtatttaccaatgccgataattttgggatccacgtgccagcggacctcgacgtcacggtgaaagctgcgatgatcggcgcctgcttcctcttcgacttcatgttttttgaacacagtcttgccggtttgtag

SEQ ID NO: 37959 - DNA, 816 bp, Artificial Sequence
  derived and/or modified sequence
atggccagcaaggatgcccagaaccagaggcggggcctgcccggcttcctgcccggggccccagaccctgaccagagcctgcctgccagcagcaaccctggcaaccaggcctggcagctgagcctgcccctgcccagcagcttcctgcccaccgtgtccctgcccccaggcctggagtacctgagccagctggacctgatcatcatccaccagcaggtggagctgctgggcatgatcctgggcacagagaccagcaacaagtatgagatcaagaacagcctgggccagaggatctactttgctgtggaggagagcatctgcttcaacagaaccttctgcagcaccctgcggagctgcaccctgcgcatcacagacaacagcggccgggaggtgatcaccgtgaaccggcccctgcgctgcaacagctgctggtgcccctgctacctgcaggagctggagatccaggcccctcctggcaccatcgtgggctacgtgacccagaagtgggaccccttcctgcccaagttcaccatccagaatgccaacaaggaggacatcctgaagatcgtgggcccctgtgtgacctgtggctgctttggagatgtggactttgaggtgaagaccatcaatgagaagctgaccatcggcaagatcagcaagtactggagcggctttgtgaatgatgtgttcaccaatgctgacaactttggcatccacgtgcctgctgacctggatgtgacagtgaaggccgccatgattggagcctgcttcctgtttgacttcatgttctttgagcacagcctggccggcctgtag

SEQ ID NO: 37960 - DNA, 816 bp, Artificial Sequence
  derived and/or modified sequence
atggccagcaaggacgcccagaaccagcggcggggcctgcccggcttcttgcccggagctcctgatcccgaccaaagtcttccggcatcctccaatcccggcaaccaggcatggcagctgagcctgccactccctagcagcttcctgccgaccgttagcctcccacccgggcttgagtacctttcacaactggacctgattatcatccaccaacaggtcgagctgttagggatgattcttggcacagagacatccaacaaatatgagattaagaactcccttgggcagcggatatatttcgcagtggaggagagcatctgctttaaccgtactttctgcagtaccctcaggagctgtaccctgaggataactgataatagcggacgggaagtgatcaccgttaaccgacctttaagatgcaactcttgctggtgcccctgctacttgcaggagttagagattcaagcgcctcccggcaccattgtaggatacgtaacccaaaagtgggacccattccttcccaagttcacgattcagaatgcaaataaggaagatattttaaaaattgttggcccctgcgtgacgtgcggatgttttggggacgtggatttcgaagtgaaaactataaacgagaagctgactatcggcaagatcagcaaatactggagcggattcgtaaatgacgtgtttactaatgccgataacttcggaatccatgtcccagccgatctggatgtgacagtcaaagccgccatgattggtgcttgttttctgtttgatttcatgttctttgaacactccttagcagggttgtag

SEQ ID NO: 37961 - DNA, 816 bp, Artificial Sequence
  derived and/or modified sequence
atggccagcaaggacgcccagaaccagcggcggggcctgcccggcttcttgccaggcgcccctgatccagaccagtccctccccgccagctctaatcccggcaaccaagcctggcagctgtcgttgccactgcctagcagtttcttgccaactgtgtccctgccaccaggcctggaatacctttctcaacttgatcttatcattattcatcagcaggttgaactactcggtatgattctgggtactgagactagcaacaagtatgagattaaaaatagtctggggcagagaatctactttgctgttgaggaatccatatgcttcaacaggaccttctgctccactctcaggtcgtgcacgctgcgaatcaccgataatagtggccgggaggtcattaccgtgaataggcctctgagatgtaatagctgctggtgtccatgctacttgcaggaattagaaatccaggccccacccgggaccattgtgggctacgtcactcagaagtgggaccccttcctgcctaaatttaccatacagaacgctaataaagaggatatcttgaagatcgtgggtccgtgcgtcacttgcggatgcttcggcgatgttgatttcgaggtgaagacaataaatgaaaagttgaccattggcaaaattagtaaatactggagcggcttcgttaatgacgtttttacaaacgccgataacttcgggatccacgtacctgcggacttggatgtgaccgtcaaggcagccatgattggggcatgcttcctcttcgattttatgttctttgagcactccctggccggtctgtag

SEQ ID NO: 37962 - DNA, 1969 bp, Artificial Sequence
  derived and/or modified sequence
ctttgtcaaataaggaaaactcaaacttttggcagtctgcaaactgtgaggttgactttataatttttcatcacaaggtatacctcctgaagcctcttaactattttcagaaaaagacagtgttgctgataatgcaatatatcctgcatgttcaacctttgtgaatcataccatgtagggcaattgacttggtgagcaaaatctccatggtcacctgggtagctgcatttagaaataggagctgtccagtcaaggttacagcacttgttttctttccttagaattcaatgcagttaaatatcatctgtaaattttgattagctttgcaaggctattgaaggtttgtatattccaatgcctctgattaatcaaattcaattaaaaatgaaaataaagatttatttatataatagtagggaatatatcctcttcttatttattttgagttgaagagatggagataaatccaatagaaaaataacaataataatgttcaaacattttcaacatgtaaagaattgtatttagaactatcaaaaatttatacaataggatgttttatcacagaatctggaaaggagacttctagaaattgagaaatacaggatatttctgatataagactgaatgcaaatgtgtatattctaagaaatacaaaaacaacttggtaaaaaaaaaaaagacacttaaaatgagtgctgtgtgctttcctttctggtttttattatttttaaattgttccttcagccaccaaagttatatgatggtttctgaacagcgtttacttttgtgacagtttcatctcactctgttgtccaaactgataaagtccagaagtctagaaacagcaagggactcccttcctctgttatatgtaagctgacaagaggcagacaaacacgttctgaagttttgtgcatgctgcgttttctctccttgctgcaacaagaaaagcctttgttttccaacctggcaacctttgaagaagtgactcagacatcttcatggcctctaaagatgcccagaaccaaagaagaggtctgcctggttttcttcctggagctccagacccagaccaaagccttcctgcctcttccaatccagggaaccaagcatggcagctgagtctccctctgccaagcagtttcctgccaacagtcagtctccctcctggtctagaatatttaagccagttagacctgataattatacaccagcaggtggagctgcttggaatgatacttggtactgagacctccaacaaatatgagattaaaaacagcttgggacaaagaatttactttgcagtggaggaaagcatctgcttcaatcgtactttctgttccactctgcgatcttgcaccctgaggatcacagataactcaggtcgagaggtcattacagtgaacaggcccttgagatgtaacagctgctggtgcccttgctacctacaagagttagaaatccaagcccctcctggtactatagttggttacgttacgcagaagtgggacccctttctgcctaaattcacaatccaaaatgcaaacaaagaagatattttgaaaattgttggtccttgtgtgacatgtggctgttttggcgatgtggattttgaggtgaaaaccattaatgaaaagcttacaattgggaagatttcaaagtactggtcaggatttgtaaatgatgtcttcacaaatgctgacaatttcggaattcatgttcctgcagatctagatgtaacagtcaaagcagcaatgatcggtgcctgttttctctttgattttatgttctttgaacattcactggctggattataataaccaagataatgaaaacaataaaatatgcagaacatatttcaaaatcccttgggctctggatttcatttctgaatggtttgaatgtttgcttttttgttaaaaaaaaatgttaattattatatttattaaaacagtttaatgaggca

SEQ ID NO: 37963 - DNA, 1058 bp, Artificial Sequence
  derived and/or modified sequence
ctttgaagaagtgactcagacatcttcatggcctctaaagatgcccagaaccaaagaagaggtctgcctggttttcttcctggagctccagacccagaccaaagccttcctgcctcttccaatccagggaaccaagcatggcagctgagtctccctctgccaagcagtttcctgccaacagtcagtctccctcctggtctagaatatttaagccagttagacctgataattatacaccagcaggtggagctgcttggaatgatacttggtactgagacctccaacaaatatgagattaaaaacagcttgggacaaagaatttactttgcagtggaggaaagcatctgcttcaatcgtactttctgttccactctgcgatcttgcaccctgaggatcacagataactcaggtcgagaggtcattacagtgaacaggcccttgagatgtaacagctgctggtgcccttgctacctacaagagttagaaatccaagcccctcctggtactatagttggttacgttacgcagaagtgggacccctttctgcctaaattcacaatccaaaatgcaaacaaagaagatattttgaaaattgttggtccttgtgtgacatgtggctgttttggcgatgtggattttgaggtgaaaaccattaatgaaaagcttacaattgggaagatttcaaagtactggtcaggatttgtaaatgatgtcttcacaaatgctgacaatttcggaattcatgttcctgcagatctagatgtaacagtcaaagcagcaatgatcggtgcctgttttctctttgattttatgttctttgaacattcactggctggattataataaccaagataatgaaaacaataaaatatgcagaacatatttcaaattatttagagtatttcaaagcacttccacacatatgaatggcctgcactggacctcacaagaaaacagagggtttcaactgtgcataacatcagagatgaccaggtgcaacctccatatattgaagacttagaaaatgagaaatataaaaattaaattactttgtttta

SEQ ID NO: 37964 - DNA, 816 bp, Artificial Sequence
  derived and/or modified sequence
atggcttccaaggatgcacagaaccaacgtaggggactgcctgggtttctcccaggagctcccgaccctgatcaatctctgccagccagttctaaccccggaaatcaggcgtggcagttaagcctgccattgccttcttctttcttgccaactgtctccctcccaccgggactggagtacctgagccagttggatctgattatcatccaccagcaagtcgagctgctcgggatgattctcgggactgaaaccagcaacaagtacgaaatcaagaactcactgggccagaggatctactttgcagtggaagagagtatttgcttcaacagaactttctgcagtaccctgcgcagctgcacattacgaatcactgacaatagcggcagagaggttataacagtgaatcggcctctgcgttgcaatagctgttggtgcccctgctatctccaggaactggaaattcaggctcccccaggtaccatcgtagggtatgtgacccagaagtgggatcccttcctccctaagtttacaatacaaaatgcaaataaagaggatattctgaaaattgtgggtccatgcgttacatgtggctgctttggcgacgtcgacttcgaggtgaaaacaatcaatgagaaacttacaataggcaagatcagcaaatattggagtggattcgtgaacgatgtcttcacaaatgcagataatttcgggatccacgtccccgctgacctggacgttacagttaaggcggctatgataggagcttgtttccttttcgactttatgtttttcgagcacagcctggcaggcttgtag

SEQ ID NO: 37965 - DNA, 816 bp, Artificial Sequence
  derived and/or modified sequence
atggcttccaaggatgcgcagaaccagagaagggggttgcccggatttctgcctggagcgcctgatcctgatcaaagcctgcctgcatctagtaatccgggaaatcaagcatggcagctgtcgctaccgctaccctcgtctttcttacccactgtgtccttaccaccaggcctcgagtacctctctcagctggatctcatcatcatacaccagcaggtggagctgctaggaatgatccttggtaccgaaactagtaataaatacgagattaaaaactctctggggcagcggatttactttgcggtcgaggagagtatttgcttcaacagaacgttttgcagtaccctccgcagctgtaccttgcggattacagacaattctggtcgggaggtgatcacagttaaccggcctctgagatgtaactcttgctggtgtccttgttacctgcaagaactagagattcaggctccccctgggacaatcgtgggctacgtgacgcagaagtgggaccccttcctgccaaaattcacgattcagaacgccaataaagaagatattctgaaaattgtgggcccatgtgtaacatgtggctgtttcggagatgttgacttcgaagtgaaaactataaatgagaaattaactataggcaagattagcaaatactggtctgggtttgtgaacgacgtgttcacaaacgctgacaacttcggtattcatgtccccgctgatttagatgtgactgtgaaggcagctatgatcggcgcatgttttcttttcgactttatgtttttcgagcacagccttgccggactgtag

SEQ ID NO: 37966 - protein, 509 aa, Artificial Sequence
  derived and/or modified sequence
MSMGAPRSLLLALAAGLAVARPPNIVLIFADDLGYGDLGCYGHPSSTTPNLDQLAAGGLRFTDFYVPVSLCTPSRAALLTGRLPVRMGMYPGVLVPSSRGGLPLEEVTVAEVLAARGYLTGMAGKWHLGVGPEGAFLPPHQGFHRFLGIPYSHDQGPCQNLTCFPPATPCDGGCDQGLVPIPLLANLSVEAQPPWLPGLEARYMAFAHDLMADAQRQDRPFFLYYASHHTHYPQFSGQSFAERSGRGPFGDSLMELDAAVGTLMTAIGDLGLLEETLVIFTADNGPETMRMSRGGCSGLLRCGKGTTYEGGVREPALAFWPGHIAPGVTHELASSLDLLPTLAALAGAPLPNVTLDGFDLSPLLLGTGKSPRQSLFFYPSYPDEVRGVFAVRTGKYKAHFFTQGSAHSDTTADPACHASSSLTAHEPPLLYDLSKDPGENYNLLGGVAGATPEVLQALKQLQLLKAQLDAAVTFGPSQVARGEDPALQICCHPGCTPRPACCHCPDPHA

SEQ ID NO: 37967 - protein, 423 aa, Artificial Sequence
  derived and/or modified sequence
MGMYPGVLVPSSRGGLPLEEVTVAEVLAARGYLTGMAGKWHLGVGPEGAFLPPHQGFHRFLGIPYSHDQGPCQNLTCFPPATPCDGGCDQGLVPIPLLANLSVEAQPPWLPGLEARYMAFAHDLMADAQRQDRPFFLYYASHHTHYPQFSGQSFAERSGRGPFGDSLMELDAAVGTLMTAIGDLGLLEETLVIFTADNGPETMRMSRGGCSGLLRCGKGTTYEGGVREPALAFWPGHIAPGVTHELASSLDLLPTLAALAGAPLPNVTLDGFDLSPLLLGTGKSPRQSLFFYPSYPDEVRGVFAVRTGKYKAHFFTQGSAHSDTTADPACHASSSLTAHEPPLLYDLSKDPGENYNLLGGVAGATPEVLQALKQLQLLKAQLDAAVTFGPSQVARGEDPALQICCHPGCTPRPACCHCPDPHA

SEQ ID NO: 37968 - protein, 507 aa, Artificial Sequence
  derived and/or modified sequence
MGAPRSLLLALAAGLAVARPPNIVLIFADDLGYGDLGCYGHPSSTTPNLDQLAAGGLRFTDFYVPVSLCTPSRAALLTGRLPVRMGMYPGVLVPSSRGGLPLEEVTVAEVLAARGYLTGMAGKWHLGVGPEGAFLPPHQGFHRFLGIPYSHDQGPCQNLTCFPPATPCDGGCDQGLVPIPLLANLSVEAQPPWLPGLEARYMAFAHDLMADAQRQDRPFFLYYASHHTHYPQFSGQSFAERSGRGPFGDSLMELDAAVGTLMTAIGDLGLLEETLVIFTADNGPETMRMSRGGCSGLLRCGKGTTYEGGVREPALAFWPGHIAPGVTHELASSLDLLPTLAALAGAPLPNVTLDGFDLSPLLLGTGKSPRQSLFFYPSYPDEVRGVFAVRTGKYKAHFFTQGSAHSDTTADPACHASSSLTAHEPPLLYDLSKDPGENYNLLGGVAGATPEVLQALKQLQLLKAQLDAAVTFGPSQVARGEDPALQICCHPGCTPRPACCHCPDPHA

SEQ ID NO: 37969 - DNA, 1530 bp, Artificial Sequence
  derived and/or modified sequence
atgtctatgggggcccccaggagcttgctgctggccctggccgccggcttggcagtggccaggccacccaacatcgttctgatttttgccgacgacctcggttatggcgacctaggctgttacggccacccctctagcactacgccaaacctggaccagctcgccgccgggggcttgagattcacagatttctacgtcccagtctccctttgtacaccctcccgggctgcattattgactgggagattgcctgtcagaatgggtatgtaccccggagttcttgtgccctcctcacgcggcggtcttccgctcgaggaggttactgtggctgaggtgctcgccgcgaggggatatctgaccggcatggctgggaaatggcacctgggggtggggccagagggcgccttcctacccccacaccaaggctttcatcggttcctaggcattccatacagtcacgatcaggggccttgccagaatctgacctgcttcccccctgccacgccatgcgacggtggatgcgatcaaggactggttcctatccccctgcttgccaacctgtctgtggaagcccaaccaccctggctgccaggcctggaggctcgctacatggcatttgctcacgacttgatggccgatgcccaaagacaggatcgtcctttcttcctctactatgccagtcatcacactcattatccccagtttagcgggcaatctttcgctgaacgtagcggccggggcccttttggggactcgttgatggaactggacgctgcagtcggaactttgatgaccgccatcggagatctgggcttgctcgaagagacgctggtaatcttcaccgcagacaatgggccggagacaatgcggatgtctcggggcggctgctccggtctcctgaggtgtggcaagggcacaacctacgaaggtggcgtccgcgagccagctcttgcgttctggcccgggcacatcgccccaggcgtcactcacgaactggcctcttcactagatctgttacccaccctggcagcccttgcgggggctccactgcctaatgtaacacttgatgggtttgacctatctcccctcctgcttgggactggcaagtctccccgacagtccctgttcttttacccatcctacccagatgaggtcagaggcgtgttcgctgtccgaaccgggaagtataaggcgcacttcttcacacaaggcagtgcccattccgacacgacagccgaccctgcgtgccatgcttccagcagcctgaccgctcacgagcctcccctgctctacgacctctcaaaggaccccggtgagaattacaacttactgggaggtgtggccggggcgaccccggaagtgctccaggccctcaagcagctgcagcttctgaaggcgcaattagacgcggctgtgacttttggcccaagccaggtggctagaggagaggatcccgctctacagatctgctgtcaccccgggtgcaccccaagacctgcgtgttgccactgtcctgacccccatgcctag

SEQ ID NO: 37970 - DNA, 1530 bp, Artificial Sequence
  derived and/or modified sequence
atgagcatgggagctccaaggtcattgctgctggctctggctgctggtctggctgtcgctcggccgcccaacatagtgttgatatttgctgatgatctggggtacggggatctgggctgttatgggcatcctagctccacaacacccaacctcgatcagctggctgctggcgggttgcgattcaccgacttttatgtgccggtaagcctgtgcactccgtcacgcgcagctctgctgactgggaggttgcccgtgcggatgggtatgtaccctggagtgctcgttccctcctctcgtggcggacttcctctggaagaggtaaccgtggccgaggtactggcagcaagaggctacctcaccggtatggctggcaagtggcatctcggggttgggcctgagggcgcattcctgcctcctcaccagggcttccacaggtttctcggtatcccgtattctcacgaccaaggcccttgtcagaatctgacatgttttcccccagcaaccccatgcgatggcggttgtgaccaaggcctagttccaattcctttgctagccaacttgtcagtagaagcccagccgccatggttgccagggctggaagccaggtatatggccttcgcacacgaccttatggcagacgcccagcggcaagaccggccgttctttctgtattacgccagccaccacacacactatccacagttttctggccaatcattcgctgaacggagcggccggggtccatttggagatagtcttatggaactggatgcagctgtaggaaccctaatgaccgctatcggggaccttggactgctggaagagactctggtgatttttacggccgataatgggccagagacgatgaggatgagcagaggggggtgctctggtctcctgcgatgtgggaagggtacaacctacgagggtggagtgcgcgaacccgccttggctttctggcccggccacattgcgccaggagttactcacgaactcgcgtcctctctagatctgctccccaccctggcagcactagccggcgccccattgccaaacgtgacattggatggatttgatctgtcccctctgctcttgggcaccggaaaaagccctcgccagagcctctttttctacccttcatatcctgatgaggtgcgtggtgtcttcgctgtgagaacgggcaagtataaggcacacttttttacccagggctccgcccactctgacaccacagccgatcccgcctgccacgccagctcctcccttaccgcacatgagccacctctgctgtatgatctcagtaaggacccaggtgagaattacaacctgttggggggcgttgccggcgctacccctgaagtcttgcaggcattgaaacagttacagctcctgaaggcgcagctggatgctgctgtgaccttcggcccatcacaggtcgctcgcggtgaggacccagccttgcagatctgttgtcaccctggatgtacaccgcggcctgcatgttgccattgtcctgatccccatgcgtag

SEQ ID NO: 37971 - DNA, 1530 bp, Artificial Sequence
  derived and/or modified sequence
atgagcatgggcgctccacggtcacttctcctggcactggccgccggcttagccgtcgcacgcccaccgaatatcgtcctgatcttcgctgatgacctgggttacggtgatcttggctgttatggacatcctagttcgacaacccctaacttggatcagcttgccgctgggggtttgcgcttcaccgatttctacgtgcccgtaagcctgtgcacccctagcagggccgcactcctaactggtagactgcctgttaggatgggtatgtaccccggcgtcctcgttccctctagtagaggcgggcttccccttgaagaggtgacagtcgccgaggtgctggcagctcgggggtacctgactggcatggctggaaaatggcacctgggggtaggccctgagggcgcctttcttccaccccatcaaggctttcaccgatttctgggcattccatatagccacgaccagggaccttgccagaacctcacctgctttccccctgccacgccatgtgatggcggctgtgaccagggcctcgtgccaatacccctcctggcaaatctgagtgtggaggcccaacctccttggctcccaggcttggaggccagatacatggccttcgctcatgaccttatggcagacgcccagagacaagatagaccattcttcttgtactatgcctcccatcacacgcattacccccagttttccgggcagtcgtttgcagaacggtcaggccgtgggccttttggggattctttgatggaactggatgctgcggtggggactctgatgaccgcaattggcgacctcggcctgttagaggaaaccctggtcatctttaccgctgacaatggtccggagaccatgcgcatgtcacgaggtggctgttctggactgctgcggtgtggaaaagggaccacatatgaaggaggagtgagagaaccagcattagccttttggcctggtcacatcgctcccggcgtgactcacgagctcgcatctagcctcgatcttttgccaactttggccgcactggcaggggccccgttgcctaacgtgaccttggacggtttcgacctgagtccattactcctggggacaggtaagtcccctcggcagagcttgtttttttatccatcatatccagacgaagtcaggggcgtatttgccgtgcgcactggtaaatataaggctcacttcttcacacagggaagcgctcactctgacactaccgctgacccagcatgccacgcctccagcagtctgaccgcccatgagccacctctgctatatgacctgtcaaaagacccgggcgaaaattacaatcttctggggggggtggccggcgctacgccagaggtgcttcaggctctcaagcagctgcagctgttaaaggcccagctggacgccgccgtaactttcggcccaagccaggtggcaaggggtgaggatcctgccttacagatatgctgccacccaggctgtacaccccgccccgcctgctgccattgccccgatcctcatgcatag

SEQ ID NO: 37972 - DNA, 1524 bp, Artificial Sequence
  derived and/or modified sequence
atgggggctcctcgatctctgttgctggctctggccgccggtctcgctgttgcccggccaccgaatatcgtccttatcttcgctgacgacctcgggtacggggacctgggctgttacggccatccaagtagcactacccctaacctagaccagttagctgcgggtggactacggttcacagatttttacgtgccggtgtccctgtgcactccatctagagctgccctgctaacaggaagactaccggttcgcatgggtatgtaccccggagtgctggtgccaagcagcaggggtggtttgccactggaggaagttactgtggcagaggttttggctgccagaggatacctgactggtatggccggcaaatggcatctgggtgtgggccccgagggagcattcctgccgccacatcaaggttttcatcggttcctggggattccttattcccacgaccaaggcccgtgtcaaaatttaacctgttttccacccgcgaccccctgtgatggggggtgtgatcagggactcgtgccaatccctctgctggccaacctatccgtggaagctcaacccccttggctccccggtctggaagctcgctacatggcgttcgcccatgatttgatggctgacgcgcagcgccaggaccgccccttctttctatactacgccagccaccatactcattacccacagtttagcggacagtcctttgcagaacgctccggaagaggacccttcggggattctctcatggagcttgacgctgcggttggaactctgatgacggccataggcgatctaggacttctcgaagaaaccttggttatctttaccgctgacaatgggccagagactatgcgcatgtccaggggtggctgcagcggtctactgagatgtgggaagggaacaacctacgagggtggcgtgcgggaaccagctcttgccttttggcccggacacatcgctcccggagtcactcacgaactggcttcatctctagatctacttcccaccctcgccgccctggccggggctccattgcccaacgtaaccctggatgggtttgatctgtctcctcttctgttaggtaccggaaaatctccccgacaatccctgtttttttacccatcttatcccgacgaagtgagaggggttttcgccgtcagaacagggaagtataaggcgcacttcttcacacagggaagcgcccattccgacaccaccgccgacccagcttgtcatgcatcgtcctcattgactgcacacgaacccccgctcctctatgacctaagcaaagatcccggagagaactacaacctgcttggcggcgtcgctggggccacccctgaggtgctgcaggctctgaagcagctccagctgctgaaggctcagctcgacgccgctgtgactttcggcccaagccaggtggctcgaggtgaggacccagcgctgcaaatctgctgccaccctggctgcacacctcgccccgcctgttgtcattgcccagacccgcacgcctag

SEQ ID NO: 37973 - DNA, 1524 bp, Artificial Sequence
  derived and/or modified sequence
atgggcgcccctcgttcactactcctggctctggccgctggactggcagtggcaaggccaccaaacatcgtgttaatatttgccgatgatctggggtatggggacctggggtgttatggccatcccagttctactactccaaatctggatcagctggcggccggcggtctgaggttcaccgacttctatgtgcccgtgagcctgtgtaccccttctagggccgcattgctcaccgggcgcctgcccgtacggatgggaatgtacccaggcgtgctggtcccctcctcccgcggagggctgcctctggaagaagtgaccgtggctgaggtgctggcggcacgcgggtatcttacagggatggcaggcaaatggcacttaggtgtcggacccgagggcgcgttcctaccaccccaccagggattccatagattcctgggaataccttacagccacgatcagggcccatgccagaatctaacctgctttcccccagccactccatgtgatggtggctgcgatcaaggcttggtacctattcctctgttggccaacctctcggtggaggctcagcctccatggctgcccgggcttgaggcacgctatatggcttttgctcacgatttgatggcagacgcccaaaggcaagatcgccctttcttcctgtactatgcaagtcatcacacacactatccccagttctcgggccagtctttcgcggagcgcagtgggcgggggccattcggagattctctcatggagctggatgctgctgttggcacactgatgaccgccataggcgacctgggcctgctcgaggaaacacttgttatcttcactgctgacaacgggcctgagactatgaggatgtcccgcggaggctgttcaggactgctgaggtgcggcaagggcactacctacgaggggggcgttagagagcctgcactggctttttggcctggacatattgctcctggcgtcacccacgagctggcctcctccctcgacctcctccctacattggcagctttggccggagcccctttgcctaacgttactcttgacgggttcgatttaagtcccctgttgctgggcacaggcaaatcaccacggcaaagtctgttcttctatccttcatatcctgatgaggtccgaggcgtgttcgccgtcagaacagggaagtacaaggcacacttttttacgcagggtagtgctcactctgatactaccgcagatccggcatgccatgctagctcctccctgactgcacacgagccacctttattatacgatttaagtaaagatcccggcgagaattacaatctgctaggtggtgtggctggcgctactcctgaggttctgcaggccctgaaacagttgcagctcctaaaagcccagctagacgccgccgtaacattcggccctagtcaggtggccaggggggaggaccctgccctgcagatatgctgtcatccaggctgcacgccaagacccgcgtgctgccactgtcctgaccctcatgcatag

SEQ ID NO: 37974 - DNA, 1530 bp, Artificial Sequence
  derived and/or modified sequence
atgagcatgggggcgcctcgcagtctcctcttggcactcgctgcgggtctggccgtagcacgacctcccaatattgtgcttatttttgcagacgatctggggtatggcgatcttgggtgttatggccatccctcctctacaactcctaatctcgaccagttggccgccgggggactccgctttaccgacttttacgtgcccgtttcactttgcacacccagtcgtgctgcactcctgactggccggctgcctgttcggatgggcatgtaccccggcgtcctggttccgagtagtcgaggaggactgccgctggaagaggtcacagttgctgaagtactggccgctaggggataccttactgggatggcgggtaagtggcatctgggcgtggggcccgagggagccttcctccccccacatcagggattccatcgcttccttggaatcccgtactctcacgaccagggaccatgtcagaaccttacatgctttccaccagctaccccctgtgacggaggatgcgatcaggggctggtccctattcctctgcttgccaacctgagcgtggaggcgcaacctccctggttgccaggcctggaggcgcggtacatggcatttgctcatgaccttatggcagacgcccagagacaggatcggcctttcttcctgtattatgcatctcaccacacgcattacccacaatttagcggccaatccttcgccgaacgaagcggccgaggaccgtttggcgacagtttaatggagcttgacgctgctgtgggcactctcatgacagcaataggggacttaggattgctggaggagacactcgttattttcaccgcagacaatggcccggagacaatgcgaatgtcccggggcggatgcagcggactcctgcgatgtggaaagggtacaacttatgaaggtggagtacgcgaacctgccttagctttctggcctggacacatcgctccaggagtgacacatgaactcgcctcatctctggacctgctgcctactctcgcggccttggccggcgcccctttgccaaatgtgaccctggatggctttgaccttagtcccctgctgctgggcactggcaagtcgcccagacagagtttattcttctacccctcctatcctgatgaggtgagaggcgtgtttgccgttcggacgggaaaatacaaagcccacttcttcactcaaggttctgcacatagcgacactaccgccgaccctgcatgccatgccagcagctctctgactgcgcacgaaccccctctgctgtacgatctgtcaaaagatcctggcgagaactataatttattgggaggcgtcgctggagctactccagaagtgttacaggcgctgaagcagctgcagctgctcaaggctcagttggacgccgcagtcacattcgggccatctcaggtggcgcgcggcgaggatccagccctgcagatatgctgccatcccgggtgcactcctaggcctgcctgttgccactgtccggatccccacgcctag

SEQ ID NO: 37975 - DNA, 1530 bp, Artificial Sequence
  derived and/or modified sequence
atgtccatgggcgcccccaggagcctgctgctggccctggccgccggcctggccgtggcccggccccccaacatcgtgctgatctttgctgatgacctgggctatggagacctgggctgctacggccaccccagcagcaccacccccaacctggaccagctggccgccggcggcctgcgcttcacagacttctacgtgcctgtgtccctgtgcacccccagccgggccgccctgctgaccggccgcctgcctgtgaggatgggcatgtacccaggagtgctggtgcccagcagccggggcggcctgcccctggaggaggtgacagtggccgaggtgctggccgcccggggctacctgaccggcatggccggcaagtggcacctgggcgtgggccctgagggcgccttcctgcccccccaccagggcttccaccgcttcctgggcatcccctacagccatgaccagggcccctgccagaacctgacctgcttccccccagccaccccctgtgatggcggctgtgaccagggcctggtgcccatccccctgctggccaacctgtctgtggaggcccagcccccctggctgcccggcctggaggcccgctacatggcctttgcccatgacctgatggctgatgcccagaggcaggaccggcccttcttcctgtactatgccagccaccacacccactacccccagttcagcggccagagctttgctgagaggagcggccggggcccctttggagacagcctgatggagctggatgctgctgtgggcaccctgatgacagccatcggggacctgggcctgctggaggagaccctggtgatcttcaccgctgacaatggacctgagaccatgaggatgagccggggcggctgcagcggcctgctgcgctgtgggaagggcaccacctatgagggcggcgtgcgggagcccgccctggccttctggccaggccacatcgcccctggggtgacccatgagctggccagcagcctggacctgctgcccaccctggccgccctggccggggcccccctgcccaacgtgaccctggatggctttgacctgagccccctgctgctgggcaccgggaagagcccccggcagagcctcttcttctaccccagctacccagatgaggtgcggggcgtgtttgctgtgaggacaggcaagtacaaggcccacttcttcacccagggcagcgcccacagcgacaccacagctgaccctgcctgccacgccagcagcagcctgacagcccacgagccccccctgctgtatgacctgagcaaggaccctggagagaactacaacctgctgggcggcgtggccggggccaccccagaggtgctgcaggccctgaagcagctgcagctgctgaaggcccagctggatgctgctgtgaccttcggccccagccaggtggcccggggagaagatcctgccctgcagatctgctgccaccctggctgcacccccaggcctgcctgctgccactgcccagacccccacgcctag

SEQ ID NO: 37976 - DNA, 1524 bp, Artificial Sequence
  derived and/or modified sequence
atgggcgcccccaggagcctgctgctggccctggccgccggcctggccgtggcccggccccccaacatcgtgctgatctttgctgatgacctgggctatggagacctgggctgctacggccaccccagcagcaccacccccaacctggaccagctggccgccggcggcctgcgcttcacagacttctacgtgcctgtgtccctgtgcacccccagccgggccgccctgctgaccggccgcctgcctgtgaggatgggcatgtacccaggagtgctggtgcccagcagccggggcggcctgcccctggaggaggtgacagtggccgaggtgctggccgcccggggctacctgaccggcatggccggcaagtggcacctgggcgtgggccctgagggcgccttcctgcccccccaccagggcttccaccgcttcctgggcatcccctacagccatgaccagggcccctgccagaacctgacctgcttccccccagccaccccctgtgatggcggctgtgaccagggcctggtgcccatccccctgctggccaacctgtctgtggaggcccagcccccctggctgcccggcctggaggcccgctacatggcctttgcccatgacctgatggctgatgcccagaggcaggaccggcccttcttcctgtactatgccagccaccacacccactacccccagttcagcggccagagctttgctgagaggagcggccggggcccctttggagacagcctgatggagctggatgctgctgtgggcaccctgatgacagccatcggggacctgggcctgctggaggagaccctggtgatcttcaccgctgacaatggacctgagaccatgaggatgagccggggcggctgcagcggcctgctgcgctgtgggaagggcaccacctatgagggcggcgtgcgggagcccgccctggccttctggccaggccacatcgcccctggggtgacccatgagctggccagcagcctggacctgctgcccaccctggccgccctggccggggcccccctgcccaacgtgaccctggatggctttgacctgagccccctgctgctgggcaccgggaagagcccccggcagagcctcttcttctaccccagctacccagatgaggtgcggggcgtgtttgctgtgaggacaggcaagtacaaggcccacttcttcacccagggcagcgcccacagcgacaccacagctgaccctgcctgccacgccagcagcagcctgacagcccacgagccccccctgctgtatgacctgagcaaggaccctggagagaactacaacctgctgggcggcgtggccggggccaccccagaggtgctgcaggccctgaagcagctgcagctgctgaaggcccagctggatgctgctgtgaccttcggccccagccaggtggcccggggagaagatcctgccctgcagatctgctgccaccctggctgcacccccaggcctgcctgctgccactgcccagacccccacgcctag

SEQ ID NO: 37977 - DNA, 1530 bp, Artificial Sequence
  derived and/or modified sequence
atgagcatgggcgccccccggagcctgctgctggccctggccgccggactcgcagttgcacgccctcctaacattgtcttgatcttcgcggatgatctgggctacggtgatctgggctgttatggacacccaagtagtaccacacccaacttggaccagctcgccgcaggcggcctgcgatttaccgatttctatgttcccgtgtcactgtgcaccccctcacgagcagctctgttgacaggcaggctgcctgtcagaatgggaatgtatccaggcgtgttagtcccatcttctcgggggggactgcctcttgaggaagtgaccgtggcagaggttctcgccgcccgcgggtacctgactggcatggcgggtaaatggcacctgggcgtgggcccggaaggcgcttttctaccaccccaccagggattccaccgatttctcggaattccctattctcacgatcaggggccatgccagaatctgacctgttttccgccagccaccccatgcgatggagggtgtgaccaggggctcgttcccattccactgcttgcgaatctgtcagtggaggcgcaaccaccctggctccccggactggaggcgcgttacatggcttttgcacatgacctgatggcagatgcccaacgacaagaccggccattcttcctgtactatgccagtcatcacacacactatccacaattctcgggccagagtttcgcagagagatcgggacgtgggccttttggtgacagcctgatggaattagacgctgccgtgggaaccctgatgacagccatcggcgatcttggtctgctggaagagacgctagtgatcttcactgccgacaacggcccagagacaatgcgcatgagtaggggcggatgcagtggactgctgagatgcggcaaaggcaccacttacgaggggggtgtgcgagagcccgccctcgccttctggccggggcacatagcccccggagtcacccacgagttggcttcaagcctggacctgcttccaaccctggctgccttggctggggctccgttgcctaacgttacgctcgacgggtttgatctctctcctttgctgctggggacaggcaagtctcctaggcaaagtctgttcttttacccgtcataccctgacgaggtgcggggagtgtttgccgtgcgaaccggcaaatacaaggcccattttttcacgcagggatcagctcacagtgatacaacggccgatcccgcctgtcacgccagttcatcactgacagctcacgagccgccactgctgtacgacctttccaaagaccccggcgagaactacaacctgctgggaggagtggcaggagccacacccgaagtgctgcaggccctgaaacagctgcagctgctgaaggcacagcttgatgctgcagtgaccttcggcccatcccaggttgcgagaggggaggatcccgcgctccaaatttgctgccaccccggctgcacaccgcgccctgcttgctgccactgccccgatcctcatgcatag

SEQ ID NO: 37978 - DNA, 1530 bp, Artificial Sequence
  derived and/or modified sequence
atgagcatgggcgccccccggagcctgctgctggccctggccgccggcctggccgtggcacggccgcccaatatcgtacttatatttgctgacgacttgggatatggagacctgggctgctacggtcatcccagtagtaccacccctaacttggaccagctggccgctgggggactgagattcactgacttctacgtcccagtcagtctgtgcacgcctagcagggccgccctcctcacgggtcggctgccggtgaggatgggaatgtaccctggggtgctggtgcccagttccagggggggcctcccgttagaagaagtgacggtggctgaggtactcgcagctagaggctatctcaccggcatggctggcaagtggcacctcggcgtgggacctgaaggtgcctttctgccccctcatcaggggtttcataggtttctcgggatcccatactcccacgaccagggcccatgccagaatctaacctgtttccctccggcaaccccctgcgatggcgggtgcgatcaggggctggttcctatacccttgctggcaaacctgagcgtcgaggcccaacctccttggttgcccggtcttgaggcccgttatatggctttcgcacatgatctgatggctgacgctcagcgacaagatcgcccgttctttttatactacgccagtcatcacacccactacccacagttcagcggacagagtttcgccgaaaggtcaggccgcggacccttcggagactccttgatggagctggatgcggcagttggcacgctcatgacagccatcggtgatctcggtcttctggaggagactctcgtcatcttcacggccgataacggcccagaaacgatgcgtatgtccagggggggatgcagcgggctgctgcgctgcggcaaggggaccacctatgaaggcggagttcgtgagccagctcttgctttttggcccggacatatcgcgcccggcgtgacccacgaactggctagctcactggacctcctgccgacactggctgcattagcaggggctcccctcccaaatgtcacccttgatggctttgacctgagccctttgctgctggggaccgggaaatcaccccgccaaagcctgttcttttacccgtcgtatcccgatgaagtgcgcggagtcttcgccgtgaggaccgggaaatacaaggctcatttttttacacagggatctgcacatagcgacacaaccgccgatcccgcttgccatgccagttcatccctcactgctcacgagccccccctcctgtacgatttgagtaaggatcctggggagaattataacctgctaggaggggttgcaggggccacaccagaggttttgcaggcattgaagcagctgcaactgctcaaggcccaactggacgctgccgttacatttggacctagccaagtcgctagaggtgaagacccagctctgcagatttgctgccatccaggatgcaccccaagacccgcctgctgccattgtccagacccacatgcatag

SEQ ID NO: 37979 - DNA, 1530 bp, Artificial Sequence
  derived and/or modified sequence
atgagcatgggcgccccccggagcctgctgctggccctggccgccggcctggcagtcgctagaccccctaatatcgtgctaattttcgccgacgatttgggctatggagaccttggttgctacggccaccccagctctacgacgcccaatctggatcagctggccgccggtggcctgagatttactgacttctatgttcctgtgtccctatgcacacccagcagggccgccctgctaactggccgtctgcctgttcgcatgggcatgtacccaggcgtactggtaccgtcgtccagaggaggacttccgctggaggaagtgacagttgcggaggtgctggcagcgcgcggctatctgacaggaatggccggaaaatggcatcttggcgtggggcctgagggcgctttcctgccaccgcaccagggcttccacagattcctaggcatcccttatagccacgaccaggggccttgccagaacctgacctgcttcccacctgctacaccatgcgacggtggttgtgaccaagggttagtcccaatccccttgctggccaacctttcggtggaagcccagccgccatggctccctggactggaggcgcgatacatggcgttcgcccacgacctaatggcagatgcgcagagacaagatcggccttttttcttatattatgctagccatcatacccactacccccagttcagcgggcagtcattcgccgagcgaagtggacgaggcccatttggagatagcctgatggaactggatgcagctgttgggaccctaatgactgccatcggcgacctgggccttcttgaagagacgctggtcattttcacagctgacaatgggccagagacgatgagaatgtctagaggcgggtgtagcggactcctgcgctgtggaaagggaaccacctatgaagggggcgtgcgcgaaccagctcttgcgttctggcccggccatattgcgcctggtgtcactcacgagctggcaagcagcctagacctgttgcctaccctggcagccctggccggagcccccctgcctaacgtcacactggatgggttcgatctgtcacctttgctgctcggcaccggcaaatcgccaagacaatccttattcttctacccttcttacccggatgaagtgcgtggggtgtttgctgtgagaaccgggaagtataaggcacattttttcacacaaggtagtgctcacagcgacacgactgctgatcccgcctgccacgcctctagcagcttgaccgcccatgagcctcccctgctatacgatctcagcaaagatccgggcgagaattataacctcttggggggcgtggcaggcgctactccagaagtgttacaggcattgaagcaactgcagctcctgaaagcccagttggatgcagcggtcaccttcggtccatcccaggtcgcgcggggcgaggaccctgctcttcaaatctgctgccaccccggatgtaccccaaggccagcctgctgtcactgcccagaccctcatgcttag

SEQ ID NO: 37980 - DNA, 1524 bp, Artificial Sequence
  derived and/or modified sequence
atgggcgccccccggagcctgctgctggccctggccgccggcctggccgtcgctagaccaccaaacattgtgctgattttcgcggacgacctggggtatggcgacctgggatgttacggccatccttcctcaacaactcctaatctcgatcagcttgcagcaggcggtctgaggttcactgacttttacgttccggtgtcactctgcacaccatctcgggctgcgttgctgacgggccggctcccggtcagaatgggcatgtatccaggtgtactggtgccctcaagccgcggagggctcccactggaggaggtcacagtcgctgaagttctggcggcacgaggttacctaaccggcatggccggcaaatggcatctcggagtgggtcccgaaggagcctttctacctccccatcaaggtttccaccgattcctgggtatcccttatagccacgaccaggggccatgccagaatctcacctgttttccaccggccacgccatgcgatggtggatgtgaccagggtctcgttcccattcccctcctggctaacctaagtgtggaagcacagcccccctggctgccaggtttagaggccagatacatggcctttgctcacgacctaatggccgatgctcagcgacaggaccggcctttttttctgtattacgcttcccatcacacccattatccccaattctcaggccagtcctttgctgagcggtctggcagaggacccttcggagactccctgatggagctcgacgccgccgtaggcactctgatgacagctatcggggaccttggactgctcgaggagacattggttatctttaccgctgataatgggcccgagaccatgcgaatgtcgaggggaggctgcagcggcctgctacgctgcggtaaaggcactacgtacgaggggggggtacgcgagccggccctggcgttttggccaggccatatcgctcctggtgtgacccacgagttagcttccagcttggatctccttcccactctcgcagccctggctggggctcccctgcctaacgttactttggatgggttcgacctgtctccccttctattaggaactggcaagtccccacggcagtcccttttcttttatcctagttaccctgacgaggttcgaggggtttttgcagtccgcacgggcaaatataaggcccacttctttacacagggaagcgcccatagcgatacaactgccgaccccgcctgtcatgcgagctcctctctcacggcccacgaacctccattgctctatgatctgtccaaggacccaggggagaactataatctcttgggcggcgtcgccggcgcaacacctgaggtcctacaagccttgaagcagcttcagcttctcaaggctcagctggacgcagcagtgacttttgggcccagccaggttgcaagaggcgaggacccagctctccagatctgttgccatccgggttgtaccccaagaccagcctgctgtcattgtccagacccgcacgcatag

SEQ ID NO: 37981 - DNA, 1524 bp, Artificial Sequence
  derived and/or modified sequence
atgggcgccccccggagcctgctgctggccctggccgccggcctggctgtagcacgacccccgaatatcgtgctgatattcgcagacgatttaggctatggtgatctggggtgctatggccacccaagctcaaccacccccaacctggatcaacttgccgcaggaggcctgaggtttacagatttctacgtgcctgtgagtctgtgtacccctagccgcgccgccttactgactggaaggctaccagtcagaatggggatgtatccaggggtgctggtgccctcttctcggggaggcctgcccctcgaggaggtaacagtggcagaagttctggccgcacgcggatacctcaccggcatggcagggaaatggcatctgggggtaggcccggagggcgccttcctgccaccacaccagggcttccaccgatttctgggcattccttacagtcacgatcaaggcccctgccagaatctcacgtgtttccccccagccaccccctgcgatggggggtgcgaccagggcctggtgccaatcccacttcttgctaatcttagtgtcgaagctcagcccccatggctgcccggtcttgaggcccgctacatggcctttgcacatgatttaatggccgacgctcagcgtcaggacaggccctttttcctgtattacgcctctcaccacacccattaccctcaattcagtggtcaatcgttcgcagagagatccggtcgaggtcccttcggagactcgctgatggagctggacgcagcggtgggtacactcatgacagccatcggggacttgggtctgctagaggagacactggtcatatttactgctgataatgggccagaaacaatgcgtatgtccagaggaggctgctcaggcctcctgaggtgcgggaaagggaccacgtatgaaggcggggtacgggaaccagcactggctttttggccagggcacatagctccaggggtgacccacgagttagcctcctccctggacctgctgcctaccctagctgcacttgctggggcccctttgcctaatgttactttagacggcttcgatttgagtccactactgctggggacgggaaagtctccccgccaaagccttttcttttatccctcttaccctgacgaggtcagaggcgttttcgccgtgaggaccgggaagtacaaggcgcacttcttcacccagggttccgcccactctgataccaccgccgaccctgcttgtcatgcttccagttctctgaccgcacacgagcctcctctgctgtacgacctttcgaaggaccctggggaaaattacaatctgctggggggcgttgcgggtgccacccccgaggtgctacaagcgctcaagcagctgcaactgctgaaagcccaacttgatgctgcagtcaccttcggcccctcccaggtcgctcgaggtgaagatcctgctctgcagatatgctgccacccaggatgcacacctcgtccagcctgctgccattgtcccgaccctcatgcatag

SEQ ID NO: 37982 - DNA, 1530 bp, Artificial Sequence
  derived and/or modified sequence
atgagcatgggcgccccccggagcctgctgctggccctggccgccggacttgctgttgcgcggccacccaacatagtccttatctttgccgacgacctcgggtatggggatctgggatgttacggccaccctagcagcaccactccaaatctcgatcagctggcagccggcgggctcaggttcacagatttttatgtccccgtgagtctgtgcacgccatcccgggcagcgctgctgaccggccgtctgcccgtgaggatgggtatgtaccccggggttctggtgccttcaagtcgaggaggactgcctcttgaggaggtcacagtggctgaggtactggctgcccgtgggtacctcactggtatggctgggaaatggcacctgggggtgggacctgagggagcatttttacccccccaccaaggcttccacagattcctggggattccatactcccacgaccagggcccgtgccagaatctgacttgtttcccccccgcgactccatgtgacggcggctgcgatcaaggacttgtccctatcccactgctggcaaatctgtctgtggaggcccagcccccttggctccctggactagaggctcgctacatggccttcgcacacgatctcatggccgatgcccagcgccaggacaggcctttttttttgtactacgctagccaccacacacattaccctcagttttcaggacagtcttttgcagagagatcaggcaggggcccatttggagactctttaatggaattggacgccgccgtagggaccctgatgaccgctatcggtgacctcgggctgctcgaggagactctcgtgattttcacagccgataacggcccggagactatgcggatgtctaggggcggctgcagcgggctgctgcgttgtgggaaaggcacaacctacgagggaggtgtgcgggaaccagcccttgccttctggcctgggcacatcgcaccaggggtaacccatgagctcgctagttccctggacctattacctacactggcggctttggctggggcacccctgcccaatgtcacacttgacgggttcgacctgagcccactcttgcttgggaccggtaagagcccacgccagagtctctttttttacccctcctaccctgacgaggtgagaggcgtttttgccgtacggactgggaaatataaggcacacttttttacccaaggttcagcccatagcgataccaccgccgatcccgcatgtcacgcatcctcgtctctcaccgcacatgagccacctctgctttacgacttgtcaaaagaccccggagaaaattataatctactaggcggtgtggccggagctaccccagaagtactgcaggctttgaagcagctgcagctccttaaagctcaattagatgcagcagtcacttttggccctagtcaggtagcacgaggcgaagaccctgcccttcagatctgttgccaccctggatgtacaccccggcctgcgtgttgccattgccccgatccccacgcatag

SEQ ID NO: 37983 - DNA, 1530 bp, Artificial Sequence
  derived and/or modified sequence
atgtcgatgggcgctccgagatcattactcttggcacttgcggcagggctggccgtggctagaccccctaacatcgttctcatcttcgccgatgatttaggatatggcgatctcggctgttacgggcatccatcttccacaactccaaacctcgatcagctggcagcaggaggacttagattcaccgatttttatgtccctgtgagcttgtgtaccccttcgcgtgcagctctgcttaccgggagactccctgtccgaatgggaatgtatcctggcgtgctggtgccaagctcacgcggagggcttcctctcgaagaggtgacggtagcagaggtgttggccgcacgaggatacctaacggggatggccggaaagtggcatctaggtgtggggcctgaaggggcttttctgccgcctcaccaggggttccatagatttctgggtataccttattcccacgatcagggaccctgtcaaaacttaacttgcttcccacctgcaacaccgtgcgatggtggctgcgatcaagggctggtgcctatcccactccttgctaatcttagcgtggaggctcagcctccatggttgccaggattggaggcacgatacatggcattcgcgcatgatttaatggcagatgcccagagacaggacagaccatttttcctctattatgccagtcaccacacacattaccctcagttttctggacaaagtttcgcagagaggtccgggagggggccattcggagactcgttgatggagctcgatgctgcagtcggtacccttatgacagcgatcggcgatctaggccttctggaggagacactggttatcttcactgccgataatggccctgagaccatgcgaatgtctagagggggttgttccgggctgttgagatgcgggaaaggcacaacatatgaaggaggggtcagggaacctgcccttgccttttggcctggccacatcgcccctggggtgacacacgaattagcttccagtctggacctgctccctactcttgctgctcttgctggtgcccctctgcccaacgtcactcttgacggatttgatctcagccccctcctcctaggcacgggaaaatcaccgagacagtccctcttcttttatccatcttatcctgacgaagtccggggtgtgttcgctgtccggaccggaaaatataaggcccatttcttcacgcagggcagcgctcattctgatacgaccgctgatccagcctgtcacgcctcttcgtcactgactgctcacgaacctccactgctttacgacctgtccaaggacccaggcgagaactataacctgctcggaggggtagctggcgctaccccagaggtgttgcaggcattgaagcagcttcagctgctgaaggcacagttggacgccgcagtcactttcggcccttcccaggtggccaggggggaagatcctgcgctacagatctgctgccatccgggatgcaccccacggcctgcttgctgtcactgccccgacccccacgcctag

SEQ ID NO: 37984 - DNA, 1530 bp, Artificial Sequence
  derived and/or modified sequence
atgagcatgggcgctcccagatctctgctgctggccctggcagccggtctggctgttgcccgaccacccaacattgtgttaatattcgccgatgacctggggtatggggacctgggctgctatgggcaccctagttccaccacccccaacctggaccaactcgccgcaggaggcttgcgctttaccgatttttatgtgccagtatctttgtgtacccccagcagagccgcattgttaacgggacgtctcccagttaggatgggaatgtacccgggagtgctcgttccttctagtagaggcggattacctctcgaagaggtcaccgtcgccgaagtcctcgcagccaggggatacctcaccggtatggcgggaaaatggcacctgggggtcggccctgagggagcgttccttcccccacatcaggggtttcataggttcctgggcataccctatagccacgaccaaggaccatgccagaacctgacatgcttccctcctgctaccccctgcgatggcggatgtgatcaagggcttgtccctattcccctgttagctaacttatccgtcgaggcacagcccccttggctccccggtctggaggctcgctatatggcgtttgcccacgatctgatggcagacgcacaacggcaggataggcctttcttcctgtactacgcatcacaccacacccattacccacagtttagcgggcagagtttcgcagaacgttcaggcagaggacctttcggcgatagtttgatggagctggacgctgccgtgggtacactaatgactgccattggcgacctgggattactggaagaaaccctagttatatttaccgctgacaatggaccagaaactatgaggatgtcacggggtggctgtagcggtttgttgagatgtggcaaaggaacaacatacgaaggtggcgtccgcgagcccgctcttgctttctggccgggtcacattgccccaggagttacccatgagctcgcttcttctctggacctcttgcccaccctcgccgcactcgccggagcgccactgcccaacgtcaccctggatgggtttgacctctccccccttctgctgggcactggaaagtcccctaggcagtccttgttcttttatccttcgtacccagatgaagtgcgaggagtgtttgcagtaaggaccggtaagtacaaggcccactttttcacccaggggtctgcccattccgacaccaccgcagaccctgcctgccacgcctcctcatccctgactgctcacgaaccgccactgctatacgatctgagtaaggaccctggcgaaaactataatctacttggcggagttgcaggagctacccccgaggtgctgcaagccctgaaacaactacagttactcaaggcacagctggacgccgctgttactttcggaccaagtcaagtagccaggggtgaggaccccgcactgcagatctgctgccatcccggatgcacccccaggccagcctgttgtcactgcccagatcctcacgcctag

SEQ ID NO: 37985 - DNA, 1530 bp, Artificial Sequence
  derived and/or modified sequence
atgtctatgggagcacctcgcagcctgcttctggccctggccgctgggctggcggtcgctcgccctcctaacattgttctgatttttgccgatgacctaggctacggagacctagggtgctacggccacccaagctcgactacacccaatctggatcaactcgctgccggtggactccggttcactgacttctatgtgccagtgtcactctgtacaccttccagagctgcccttctgacgggtcgattgcccgtgaggatgggaatgtatccaggggtccttgtgccttcctcccgtggcggattaccacttgaggaggtaacagtggcagaggttctggcagcaagagggtacctgaccggcatggcaggcaaatggcatcttggggtgggcccagaaggagcattcctccctccgcaccagggcttccatagattcctggggatcccctactcacacgatcaaggaccatgtcagaatctgacttgttttcccccagccaccccctgtgacggaggatgcgaccagggcctggtaccgatcccgctgctcgcaaatttgtccgtggaagcccaaccaccttggctgcctgggcttgaggcccgatatatggcgtttgcgcacgatctcatggcggatgcacagcggcaggatagacccttctttttgtattatgcatcccaccacacccactacccacaattctcaggtcagtcgtttgccgagaggagtggcagaggcccttttggtgactccttgatggaactcgacgccgcagttggaactctgatgaccgcaataggagacctgggtctcctggaggagactctggtgatctttacagccgataatggccctgagactatgagaatgtctagaggcggatgctcaggcctgttgcgctgtgggaagggcacaacttatgaggggggagtgcgggaaccagccctggccttctggcctggccacattgccccaggagtaactcatgaactcgcttctagcctggatctcctgcccaccctcgcggcactagctggcgcacccctgccaaacgtcactctggacggctttgacctgtccccactactgctaggcacaggaaagagcccgcgacagtccctgtttttttacccaagctatccagatgaggtgaggggagtgttcgcagtcagaacgggaaagtataaggcccacttcttcacccagggatctgcacatagtgatacgactgcagatccagcctgccatgcctccagttcacttaccgcgcacgagcccccattgctgtatgatctctcgaaagacccaggcgagaattataatctcctcggtggcgttgcaggggcaactcccgaagttttgcaggctctcaagcaactccaactcctgaaggctcagctggacgctgcggtgacgttcggtccatctcaggtcgcaaggggggaggaccccgctctccagatctgctgtcatcccggatgcacaccacgaccagcatgctgtcattgccccgacccccacgcctag

SEQ ID NO: 37986 - DNA, 1524 bp, Artificial Sequence
  derived and/or modified sequence
atgggcgctcccaggtctcttctgctggctctcgctgcaggcttggccgtcgccaggcctccgaatattgtgctgattttcgcagacgacctcggatatggagatctgggctgttacgggcatccctcaagcactaccccaaatctcgatcaattggctgctggaggcctgaggttcaccgacttttacgttcctgtgtccttgtgtaccccctcccgggctgccctgctgactggtcgactcccagtacggatgggaatgtaccccggagtcctcgtcccatcaagcagaggaggtctgcccctcgaggaggtaactgtggcagaggtcctcgcagcgaggggctacttgactggcatggccggtaagtggcatcttggggtaggccctgagggcgctttcctaccgcctcatcagggcttccacagattccttgggattccttactctcacgatcaaggcccttgtcagaatctcacatgcttcccccctgctaccccctgcgacggaggttgcgaccagggactggtgccgatccctctgctcgcaaacctgagcgtcgaagcacagcccccttggctacctggtttggaagctcggtacatggctttcgcacacgatttgatggctgatgcccaacgccaggaccgtcccttcttcctctattacgcctcacaccacactcattatccccagttctcagggcagagtttcgccgagaggtccggtcgaggcccttttggcgattcgctcatggaattagacgcagccgtgggtacattaatgaccgccataggcgacctggggctactcgaggagacattggtcatctttactgctgacaacggacccgaaactatgcggatgagccgcggaggctgctctggactcctaagatgcggcaagggaacgacatacgaagggggtgtccgcgagccagccctcgccttctggccaggccacatcgcccctggggtcactcacgaactggcatcatctctggaccttctgcctactctggcagcgcttgcgggtgctcctctgcccaatgtcaccctggatgggtttgacttgtcccccctgctgttaggaaccgggaagtctcctcgccaaagtctctttttctatccatcctacccagacgaagttaggggcgtgttcgccgtgcggactgggaagtataaagcccacttcttcacccagggctccgcacactccgacacaacagctgacccggcatgtcacgcctcctcaagtttaacagctcatgaacctcccctgctgtacgacttgtccaaagatcctggtgaaaattacaatttgctgggaggcgtggcaggcgctacacctgaagttctgcaagctctgaaacagttgcagctgcttaaggcccagctggacgccgcagttacgtttggcccttcacaggtggctcggggtgaagaccccgcattgcaaatctgttgccatccaggttgtacccccagacccgcatgttgtcattgccccgatccccacgcatag

SEQ ID NO: 37987 - DNA, 1524 bp, Artificial Sequence
  derived and/or modified sequence
atgggtgcaccgcgatccttattgctagccctcgctgctggacttgcagtggcccgtcctcccaatattgttcttatatttgccgatgatctgggctatggcgatctgggctgttatgggcatccttccagtactacccctaaccttgaccagttggcagcaggaggcctgagattcactgatttctacgtgccagtctctctatgcaccccctctagggcagcattattaacaggtaggctccctgttcggatgggcatgtatcctggagttctggttccctcatccaggggaggactgccactcgaagaggtgactgtggctgaggtacttgccgctcgcggatacctaacgggcatggcaggaaaatggcaccttggcgttggtcctgaaggtgctttcttgcctccacaccagggctttcacagattccttgggattccatattcgcacgatcagggaccgtgtcaaaatctcacatgttttcctccagctactccttgcgacggagggtgcgaccaagggctggtgcccattccactcctcgctaatctctcagtggaggcccaaccaccctggctgccgggactggaggccaggtacatggcttttgctcacgacctgatggccgatgcacagcggcaggaccgaccatttttcctctactacgcttcccaccacactcattatcctcaattttctggccaatccttcgctgagcgaagtggaaggggaccctttggggattcgcttatggaactcgacgctgcagtgggcacactgatgactgctattggggatttgggtttactggaagagactctcgtgatcttcactgcagacaatggtcccgagaccatgcggatgtcacgcggtgggtgttctggcctccttcggtgtggcaaagggactacatacgagggcggagtgagggagcctgcattggctttctggccagggcatatcgcacccggagtcactcacgaacttgctagctctttggatctgttgcccacgctcgcagcccttgctggagccccactgccaaatgttaccctggacgggtttgatctgagcccacttctacttggcacaggcaagtcccccaggcaaagtctgtttttctacccgtcttaccccgacgaggtcaggggggtgttcgccgtgcgcaccggcaaatataaggcccacttctttacccaagggtcagcccactctgacactacagctgatccagcgtgccacgcaagcagttcgttaacagcacacgagccacccttattgtacgatttgtccaaagacccgggagagaactacaacctgctaggcggtgtggccggagctaccccagaggtgctccaggccctcaagcagttgcagctgctcaaggcccaactggacgccgctgtaaccttcggcccatcccaagtagccagaggcgaagatcccgctctccagatatgttgccatccgggttgtaccccccgacccgcttgttgccactgtccagatccccacgcctag

SEQ ID NO: 37988 - DNA, 1530 bp, Artificial Sequence
  derived and/or modified sequence
atgtctatgggggcaccgagatcactgctactggccctagccgctggactggccgtagccaggcctcctaatattgttctgatcttcgccgacgacctgggttatggagacctgggttgttacgggcacccgagctccacaacccccaatttggatcagctggcagccggagggctccggtttaccgatttctatgtgcccgtgtctctctgcacaccgtcgagagccgctttactgaccggcagattgcccgtgcggatgggtatgtatccaggtgttttggtcccttcctctcggggaggactccctcttgaggaggtcaccgtagcagaagtgctcgccgctaggggttatcttacaggaatggccggaaaatggcacctgggagtcggcccagagggggctttcttgccaccacatcaaggtttccatcggttcctggggattccatactcccatgatcaaggtccctgccagaacctcacttgttttccacccgcaactccatgcgacggtggttgtgatcagggattggtgcctatccctctgctcgctaatttaagtgtcgaagctcagccaccttggttgcccggtctagaagcgagatacatggccttcgcccacgacctcatggccgatgctcaacggcaggatagaccgtttttcctttattatgcatctcatcacacgcactatcctcagtttagcggccagtcattcgctgagcggagcggaagaggcccttttggagacagtctaatggagctggatgctgcagtggggaccctgatgactgctatcggggacctaggactcttggaagagactctcgttatattcacagcggataacggacccgagacaatgcgcatgtcccgtgggggatgctccggtctcctaagatgcggaaagggtactacttatgagggtggcgtgagagaaccggcattggctttctggccaggacatatcgcccctggtgtaacgcatgaactggccagctccctggatctactgccaacattggccgctctcgcaggcgctcctctgcccaacgtcactttggatggatttgatttaagtcctctccttctgggcaccggaaaatcccctcgccagtcgctgtttttctacccttcttaccccgacgaagtccgtggcgtgtttgcagtgaggactggaaagtataaggcgcacttctttacgcagggcagcgcccactctgacaccactgccgatcctgcatgccacgccagcagtagtctgaccgcccatgagccccctctactctacgatttatctaaggaccctggagagaattataacctgctcggaggtgtggctggtgccactcctgaagtcctgcaagcgttgaagcagctccagcttctcaaggcccaactagacgcagccgtgactttcggcccttctcaggttgccagaggggaggaccctgctctacaaatctgctgtcaccctggatgtacaccacgcccagcctgctgccactgcccagacccccacgcctag

SEQ ID NO: 37989 - DNA, 2050 bp, Artificial Sequence
  derived and/or modified sequence
acaggtcacggggcggggccgaggcggaagcgcccgcagcccggtaccggctcctcctgggctccctctagcgccttccccccggcccgactccgctggtcagcgccaagtgacttacgcccccgaccctgagcccggaccgctaggcgaggaggatcagatctccgctcgagaatctgaaggtgccctggtcctggaggagttccgtcccagcccgcggtctcccggtactgtcgggccccggccctctggagcttcaggaggcggccgtcagggtcggggagtatttgggtccggggtctcagggaagggcggcgcctgggtctgcggtatcggaaagagcctgctggagccaagtagccctccctctcttgggacagacccctcggtcccatgtccatgggggcaccgcggtccctcctcctggccctggctgctggcctggccgttgcccgtccgcccaacatcgtgctgatctttgccgacgacctcggctatggggacctgggctgctatgggcaccccagctctaccactcccaacctggaccagctggcggcgggagggctgcggttcacagacttctacgtgcctgtgtctctgtgcacaccctctagggccgccctcctgaccggccggctcccggttcggatgggcatgtaccctggcgtcctggtgcccagctcccgggggggcctgcccctggaggaggtgaccgtggccgaagtcctggctgcccgaggctacctcacaggaatggccggcaagtggcaccttggggtggggcctgagggggccttcctgcccccccatcagggcttccatcgatttctaggcatcccgtactcccacgaccagggcccctgccagaacctgacctgcttcccgccggccactccttgcgacggtggctgtgaccagggcctggtccccatcccactgttggccaacctgtccgtggaggcgcagcccccctggctgcccggactagaggcccgctacatggctttcgcccatgacctcatggccgacgcccagcgccaggatcgccccttcttcctgtactatgcctctcaccacacccactaccctcagttcagtgggcagagctttgcagagcgttcaggccgcgggccatttggggactccctgatggagctggatgcagctgtggggaccctgatgacagccataggggacctggggctgcttgaagagacgctggtcatcttcactgcagacaatggacctgagaccatgcgtatgtcccgaggcggctgctccggtctcttgcggtgtggaaagggaacgacctacgagggcggtgtccgagagcctgccttggccttctggccaggtcatatcgctcccggcgtgacccacgagctggccagctccctggacctgctgcctaccctggcagccctggctggggccccactgcccaatgtcaccttggatggctttgacctcagccccctgctgctgggcacaggcaagagccctcggcagtctctcttcttctacccgtcctacccagacgaggtccgtggggtttttgctgtgcggactggaaagtacaaggctcacttcttcacccagggctctgcccacagtgataccactgcagaccctgcctgccacgcctccagctctctgactgctcatgagcccccgctgctctatgacctgtccaaggaccctggtgagaactacaacctgctggggggtgtggccggggccaccccagaggtgctgcaagccctgaaacagcttcagctgctcaaggcccagttagacgcagctgtgaccttcggccccagccaggtggcccggggcgaggaccccgccctgcagatctgctgtcatcctggctgcaccccccgcccagcttgctgccattgcccagatccccatgcctgagggcccctcggctggcctgggcatgtgatggctcctcactgggagcctgtgggggaggctcaggtgtctggagggggtttgtgcctgataacgtaataacaccagtggagacttgcagatgtgacaa

SEQ ID NO: 37990 - DNA, 1895 bp, Artificial Sequence
  derived and/or modified sequence
aggtcacggggcggggccgaggcggaagcgcccgcagcccggtaccggctcctcctgggctccctctagcgccttccccccggcccgactccgctggtcagcgccaagtgacttacgcccccgaccctgagcccggaccgctaggcgaggaggatcagatctccgctcgagaatctgaaggtgccctggtcctggaggagttccgtcccagcccgcggtctcccgacccctcggtcccatgtccatgggggcaccgcggtccctcctcctggccctggctgctggcctggccgttgcccgtccgcccaacatcgtgctgatctttgccgacgacctcggctatggggacctgggctgctatgggcaccccagctctaccactcccaacctggaccagctggcggcgggagggctgcggttcacagacttctacgtgcctgtgtctctgtgcacaccctctagggccgccctcctgaccggccggctcccggttcggatgggcatgtaccctggcgtcctggtgcccagctcccgggggggcctgcccctggaggaggtgaccgtggccgaagtcctggctgcccgaggctacctcacaggaatggccggcaagtggcaccttggggtggggcctgagggggccttcctgcccccccatcagggcttccatcgatttctaggcatcccgtactcccacgaccagggcccctgccagaacctgacctgcttcccgccggccactccttgcgacggtggctgtgaccagggcctggtccccatcccactgttggccaacctgtccgtggaggcgcagcccccctggctgcccggactagaggcccgctacatggctttcgcccatgacctcatggccgacgcccagcgccaggatcgccccttcttcctgtactatgcctctcaccacacccactaccctcagttcagtgggcagagctttgcagagcgttcaggccgcgggccatttggggactccctgatggagctggatgcagctgtggggaccctgatgacagccataggggacctggggctgcttgaagagacgctggtcatcttcactgcagacaatggacctgagaccatgcgtatgtcccgaggcggctgctccggtctcttgcggtgtggaaagggaacgacctacgagggcggtgtccgagagcctgccttggccttctggccaggtcatatcgctcccggcgtgacccacgagctggccagctccctggacctgctgcctaccctggcagccctggctggggccccactgcccaatgtcaccttggatggctttgacctcagccccctgctgctgggcacaggcaagagccctcggcagtctctcttcttctacccgtcctacccagacgaggtccgtggggtttttgctgtgcggactggaaagtacaaggctcacttcttcacccagggctctgcccacagtgataccactgcagaccctgcctgccacgcctccagctctctgactgctcatgagcccccgctgctctatgacctgtccaaggaccctggtgagaactacaacctgctggggggtgtggccggggccaccccagaggtgctgcaagccctgaaacagcttcagctgctcaaggcccagttagacgcagctgtgaccttcggccccagccaggtggcccggggcgaggaccccgccctgcagatctgctgtcatcctggctgcaccccccgcccagcttgctgccattgcccagatccccatgcctgagggcccctcggctggcctgggcatgtgatggctcctcactgggagcctgtgggggaggctcaggtgtctggagggggtttgtgcctgataacgtaataacaccagtggagacttgcagatgtgacaa

SEQ ID NO: 37991 - DNA, 1824 bp, Artificial Sequence
  derived and/or modified sequence
cggggccgaggcggaagcgcccgcagcccggtaccggctcctcctgggctccctctagcgccttccccccggcccgactccgctggtcagcgccaagtgacttacgcccccgaccctgagcccggaccgctaggcgaggaggatcagatctccgctcgagaatctgaagacccctcggtcccatgtccatgggggcaccgcggtccctcctcctggccctggctgctggcctggccgttgcccgtccgcccaacatcgtgctgatctttgccgacgacctcggctatggggacctgggctgctatgggcaccccagctctaccactcccaacctggaccagctggcggcgggagggctgcggttcacagacttctacgtgcctgtgtctctgtgcacaccctctagggccgccctcctgaccggccggctcccggttcggatgggcatgtaccctggcgtcctggtgcccagctcccgggggggcctgcccctggaggaggtgaccgtggccgaagtcctggctgcccgaggctacctcacaggaatggccggcaagtggcaccttggggtggggcctgagggggccttcctgcccccccatcagggcttccatcgatttctaggcatcccgtactcccacgaccagggcccctgccagaacctgacctgcttcccgccggccactccttgcgacggtggctgtgaccagggcctggtccccatcccactgttggccaacctgtccgtggaggcgcagcccccctggctgcccggactagaggcccgctacatggctttcgcccatgacctcatggccgacgcccagcgccaggatcgccccttcttcctgtactatgcctctcaccacacccactaccctcagttcagtgggcagagctttgcagagcgttcaggccgcgggccatttggggactccctgatggagctggatgcagctgtggggaccctgatgacagccataggggacctggggctgcttgaagagacgctggtcatcttcactgcagacaatggacctgagaccatgcgtatgtcccgaggcggctgctccggtctcttgcggtgtggaaagggaacgacctacgagggcggtgtccgagagcctgccttggccttctggccaggtcatatcgctcccggcgtgacccacgagctggccagctccctggacctgctgcctaccctggcagccctggctggggccccactgcccaatgtcaccttggatggctttgacctcagccccctgctgctgggcacaggcaagagccctcggcagtctctcttcttctacccgtcctacccagacgaggtccgtggggtttttgctgtgcggactggaaagtacaaggctcacttcttcacccagggctctgcccacagtgataccactgcagaccctgcctgccacgcctccagctctctgactgctcatgagcccccgctgctctatgacctgtccaaggaccctggtgagaactacaacctgctggggggtgtggccggggccaccccagaggtgctgcaagccctgaaacagcttcagctgctcaaggcccagttagacgcagctgtgaccttcggccccagccaggtggcccggggcgaggaccccgccctgcagatctgctgtcatcctggctgcaccccccgcccagcttgctgccattgcccagatccccatgcctgagggcccctcggctggcctgggcatgtgatggctcctcactgggagcctgtgggggaggctcaggtgtctggagggggtttgtgcctgataacgtaataacaccagtggagac

SEQ ID NO: 37992 - DNA, 1918 bp, Artificial Sequence
  derived and/or modified sequence
gccgaggcggaagcgcccgcagcccggtaccggctcctcctgggctccctctagcgccttccccccggcccgactccgctggtcagcgccaagtgacttacgcccccgaccctgagcccggaccgctaggcgaggaggatcagatctccgctcgagaatctgaaggtgccctggtcctggaggagttccgtcccagcccgcggtctcccggtactgtcgggccccggccctctggagcttcaggaggcggccgtcaggacccctcggtcccatgtccatgggggcaccgcggtccctcctcctggccctggctgctggcctggccgttgcccgtccgcccaacatcgtgctgatctttgccgacgacctcggctatggggacctgggctgctatgggcaccccagctctaccactcccaacctggaccagctggcggcgggagggctgcggttcacagacttctacgtgcctgtgtctctgtgcacaccctctagggccgccctcctgaccggccggctcccggttcggatgggcatgtaccctggcgtcctggtgcccagctcccgggggggcctgcccctggaggaggtgaccgtggccgaagtcctggctgcccgaggctacctcacaggaatggccggcaagtggcaccttggggtggggcctgagggggccttcctgcccccccatcagggcttccatcgatttctaggcatcccgtactcccacgaccagggcccctgccagaacctgacctgcttcccgccggccactccttgcgacggtggctgtgaccagggcctggtccccatcccactgttggccaacctgtccgtggaggcgcagcccccctggctgcccggactagaggcccgctacatggctttcgcccatgacctcatggccgacgcccagcgccaggatcgccccttcttcctgtactatgcctctcaccacacccactaccctcagttcagtgggcagagctttgcagagcgttcaggccgcgggccatttggggactccctgatggagctggatgcagctgtggggaccctgatgacagccataggggacctggggctgcttgaagagacgctggtcatcttcactgcagacaatggacctgagaccatgcgtatgtcccgaggcggctgctccggtctcttgcggtgtggaaagggaacgacctacgagggcggtgtccgagagcctgccttggccttctggccaggtcatatcgctcccggcgtgacccacgagctggccagctccctggacctgctgcctaccctggcagccctggctggggccccactgcccaatgtcaccttggatggctttgacctcagccccctgctgctgggcacaggcaagagccctcggcagtctctcttcttctacccgtcctacccagacgaggtccgtggggtttttgctgtgcggactggaaagtacaaggctcacttcttcacccagggctctgcccacagtgataccactgcagaccctgcctgccacgcctccagctctctgactgctcatgagcccccgctgctctatgacctgtccaaggaccctggtgagaactacaacctgctggggggtgtggccggggccaccccagaggtgctgcaagccctgaaacagcttcagctgctcaaggcccagttagacgcagctgtgaccttcggccccagccaggtggcccggggcgaggaccccgccctgcagatctgctgtcatcctggctgcaccccccgcccagcttgctgccattgcccagatccccatgcctgagggcccctcggctggcctgggcatgtgatggctcctcactgggagcctgtgggggaggctcaggtgtctggagggggtttgtgcctgataacgtaataacaccagtggagacttgca

SEQ ID NO: 37993 - DNA, 1650 bp, Artificial Sequence
  derived and/or modified sequence
cacaggtcacggggcggggccgaggcggaagcgcccgcagcccggtaccggctcctcctgggctccctctagcgccttccccccggcccgactccgctggtcagcgccaagtgacttacgcccccgaccctgagcccggaccgctaggcgaggaggatcagatctccgctcgagaatctgaaggtgccctggtcctggaggagttccgtcccagcccgcggtctcccgggccgccctcctgaccggccggctcccggttcggatgggcatgtaccctggcgtcctggtgcccagctcccgggggggcctgcccctggaggaggtgaccgtggccgaagtcctggctgcccgaggctacctcacaggaatggccggcaagtggcaccttggggtggggcctgagggggccttcctgcccccccatcagggcttccatcgatttctaggcatcccgtactcccacgaccagggcccctgccagaacctgacctgcttcccgccggccactccttgcgacggtggctgtgaccagggcctggtccccatcccactgttggccaacctgtccgtggaggcgcagcccccctggctgcccggactagaggcccgctacatggctttcgcccatgacctcatggccgacgcccagcgccaggatcgccccttcttcctgtactatgcctctcaccacacccactaccctcagttcagtgggcagagctttgcagagcgttcaggccgcgggccatttggggactccctgatggagctggatgcagctgtggggaccctgatgacagccataggggacctggggctgcttgaagagacgctggtcatcttcactgcagacaatggacctgagaccatgcgtatgtcccgaggcggctgctccggtctcttgcggtgtggaaagggaacgacctacgagggcggtgtccgagagcctgccttggccttctggccaggtcatatcgctcccggcgtgacccacgagctggccagctccctggacctgctgcctaccctggcagccctggctggggccccactgcccaatgtcaccttggatggctttgacctcagccccctgctgctgggcacaggcaagagccctcggcagtctctcttcttctacccgtcctacccagacgaggtccgtggggtttttgctgtgcggactggaaagtacaaggctcacttcttcacccagggctctgcccacagtgataccactgcagaccctgcctgccacgcctccagctctctgactgctcatgagcccccgctgctctatgacctgtccaaggaccctggtgagaactacaacctgctggggggtgtggccggggccaccccagaggtgctgcaagccctgaaacagcttcagctgctcaaggcccagttagacgcagctgtgaccttcggccccagccaggtggcccggggcgaggaccccgccctgcagatctgctgtcatcctggctgcaccccccgcccagcttgctgccattgcccagatccccatgcctgagggcccctcggctggcctgggcatgtgatggctcctcactgggagcctgtgggggaggctcaggtgtctggagggggtttgtgcctgataacgtaataacaccagtggagacttgc

SEQ ID NO: 37994 - DNA, 2053 bp, Artificial Sequence
  derived and/or modified sequence
aagggtcacaggtcacggggcggggccgaggcggaagcgcccgcagcccggtaccggctcctcctgggctccctctagcgccttccccccggcccgactccgctggtcagcgccaagtgacttacgcccccgaccctgagcccggaccgctaggcgaggaggatcagatctccgctcgagaatctgaaggtgccctggtcctggaggagttccgtcccagcccgcggtctcccggtactgtcgggccccggccctctggagcttcaggaggcggccgtcagggtcggggagtatttgggtccggggtctcagggaagggcggcgcctgggtctgcggtatcggaaagagcctgctggagccaagtagccctccctctcttgggacagacccctcggtcccatgtccatgggggcaccgcggtccctcctcctggccctggctgctggcctggccgttgcccgtccgcccaacatcgtgctgatctttgccgacgacctcggctatggggacctgggctgctatgggcaccccagctctaccactcccaacctggaccagctggcggcgggagggctgcggttcacagacttctacgtgcctgtgtctctgtgcacaccctctagggccgccctcctgaccggccggctcccggttcggatgggcatgtaccctggcgtcctggtgcccagctcccgggggggcctgcccctggaggaggtgaccgtggccgaagtcctggctgcccgaggctacctcacaggaatggccggcaagtggcaccttggggtggggcctgagggggccttcctgcccccccatcagggcttccatcgatttctaggcatcccgtactcccacgaccagggcccctgccagaacctgacctgcttcccgccggccactccttgcgacggtggctgtgaccagggcctggtccccatcccactgttggccaacctgtccgtggaggcgcagcccccctggctgcccggactagaggcccgctacatggctttcgcccatgacctcatggccgacgcccagcgccaggatcgccccttcttcctgtactatgcctctcaccacacccactaccctcagttcagtgggcagagctttgcagagcgttcaggccgcgggccatttggggactccctgatggagctggatgcagctgtggggaccctgatgacagccataggggacctggggctgcttgaagagacgctggtcatcttcactgcagacaatggacctgagaccatgcgtatgtcccgaggcggctgctccggtctcttgcggtgtggaaagggaacgacctacgagggcggtgtccgagagcctgccttggccttctggccaggtcatatcgctcccggcgtgacccacgagctggccagctccctggacctgctgcctaccctggcagccctggctggggccccactgcccaatgtcaccttggatggctttgacctcagccccctgctgctgggcacaggcaagagccctcggcagtctctcttcttctacccgtcctacccagacgaggtccgtggggtttttgctgtgcggactggaaagtacaaggctcacttcttcacccagggctctgcccacagtgataccactgcagaccctgcctgccacgcctccagctctctgactgctcatgagcccccgctgctctatgacctgtccaaggaccctggtgagaactacaacctgctggggggtgtggccggggccaccccagaggtgctgcaagccctgaaacagcttcagctgctcaaggcccagttagacgcagctgtgaccttcggccccagccaggtggcccggggcgaggaccccgccctgcagatctgctgtcatcctggctgcaccccccgcccagcttgctgccattgcccagatccccatgcctgagggcccctcggctggcctgggcatgtgatggctcctcactgggagcctgtgggggaggctcaggtgtctggagggggtttgtgcctgataacgtaataacaccagtggagacttgcagatgtg

SEQ ID NO: 37995 - DNA, 1948 bp, Artificial Sequence
  derived and/or modified sequence
aagggtcacaggtcacggggcggggccgaggcggaagcgcccgcagcccggtaccggctcctcctgggctccctctagcgccttccccccggcccgactccgctggtcagcgccaagtgacttacgcccccgaccctgagcccggaccgctaggcgaggaggatcagatctccgctcgagaatctgaaggtgccctggtcctggaggagttccgtcccagcccgcggtctcccggtactgtcgggccccggccctctggagcttcaggaggcggccgtcaggacccctcggtcccatgtccatgggggcaccgcggtccctcctcctggccctggctgctggcctggccgttgcccgtccgcccaacatcgtgctgatctttgccgacgacctcggctatggggacctgggctgctatgggcaccccagctctaccactcccaacctggaccagctggcggcgggagggctgcggttcacagacttctacgtgcctgtgtctctgtgcacaccctctagggccgccctcctgaccggccggctcccggttcggatgggcatgtaccctggcgtcctggtgcccagctcccgggggggcctgcccctggaggaggtgaccgtggccgaagtcctggctgcccgaggctacctcacaggaatggccggcaagtggcaccttggggtggggcctgagggggccttcctgcccccccatcagggcttccatcgatttctaggcatcccgtactcccacgaccagggcccctgccagaacctgacctgcttcccgccggccactccttgcgacggtggctgtgaccagggcctggtccccatcccactgttggccaacctgtccgtggaggcgcagcccccctggctgcccggactagaggcccgctacatggctttcgcccatgacctcatggccgacgcccagcgccaggatcgccccttcttcctgtactatgcctctcaccacacccactaccctcagttcagtgggcagagctttgcagagcgttcaggccgcgggccatttggggactccctgatggagctggatgcagctgtggggaccctgatgacagccataggggacctggggctgcttgaagagacgctggtcatcttcactgcagacaatggacctgagaccatgcgtatgtcccgaggcggctgctccggtctcttgcggtgtggaaagggaacgacctacgagggcggtgtccgagagcctgccttggccttctggccaggtcatatcgctcccggcgtgacccacgagctggccagctccctggacctgctgcctaccctggcagccctggctggggccccactgcccaatgtcaccttggatggctttgacctcagccccctgctgctgggcacaggcaagagccctcggcagtctctcttcttctacccgtcctacccagacgaggtccgtggggtttttgctgtgcggactggaaagtacaaggctcacttcttcacccagggctctgcccacagtgataccactgcagaccctgcctgccacgcctccagctctctgactgctcatgagcccccgctgctctatgacctgtccaaggaccctggtgagaactacaacctgctggggggtgtggccggggccaccccagaggtgctgcaagccctgaaacagcttcagctgctcaaggcccagttagacgcagctgtgaccttcggccccagccaggtggcccggggcgaggaccccgccctgcagatctgctgtcatcctggctgcaccccccgcccagcttgctgccattgcccagatccccatgcctgagggcccctcggctggcctgggcatgtgatggctcctcactgggagcctgtgggggaggctcaggtgtctggagggggtttgtgcctgataacgtaataacaccagtggagacttgcagatgtg

SEQ ID NO: 37996 - DNA, 1530 bp, Artificial Sequence
  derived and/or modified sequence
atgagcatgggcgcccccagaagcctgctgctggccctggccgccggcctggccgtggccagaccccccaacatcgtgctgatcttcgccgacgacctgggctacggcgacctgggctgctacggccaccccagcagcaccacccccaacctggaccagctggccgccggcggcctgagattcaccgacttctacgtgcccgtgagcctgtgcacccccagcagagccgccctgctgaccggcagactgcccgtgagaatgggcatgtaccccggcgtgctggtgcccagcagcagaggcggcctgcccctggaggaggtgaccgtggccgaggtgctggccgccagaggctacctgaccggcatggccggcaagtggcacctgggcgtgggccccgagggcgccttcctgcccccccaccagggcttccacagattcctgggcatcccctacagccacgaccagggcccctgccagaacctgacctgcttcccccccgccaccccctgcgacggcggctgcgaccagggcctggtgcccatccccctgctggccaacctgagcgtggaggcccagcccccctggctgcccggcctggaggccagatacatggccttcgcccacgacctgatggccgacgcccagagacaggacagacccttcttcctgtactacgccagccaccacacccactacccccagttcagcggccagagcttcgccgagagaagcggcagaggccccttcggcgacagcctgatggagctggacgccgccgtgggcaccctgatgaccgccatcggcgacctgggcctgctggaggagaccctggtgatcttcaccgccgacaacggccccgagaccatgagaatgagcagaggcggctgcagcggcctgctgagatgcggcaagggcaccacctacgagggcggcgtgagagagcccgccctggccttctggcccggccacatcgcccccggcgtgacccacgagctggccagcagcctggacctgctgcccaccctggccgccctggccggcgcccccctgcccaacgtgaccctggacggcttcgacctgagccccctgctgctgggcaccggcaagagccccagacagagcctgttcttctaccccagctaccccgacgaggtgagaggcgtgttcgccgtgagaaccggcaagtacaaggcccacttcttcacccagggcagcgcccacagcgacaccaccgccgaccccgcctgccacgccagcagcagcctgaccgcccacgagccccccctgctgtacgacctgagcaaggaccccggcgagaactacaacctgctgggcggcgtggccggcgccacccccgaggtgctgcaggccctgaagcagctgcagctgctgaaggcccagctggacgccgccgtgaccttcggccccagccaggtggccagaggcgaggaccccgccctgcagatctgctgccaccccggctgcacccccagacccgcctgctgccactgccccgacccccacgcctag

SEQ ID NO: 37997 - DNA, 1524 bp, Artificial Sequence
  derived and/or modified sequence
atgggcgcccccagaagcctgctgctggccctggccgccggcctggccgtggccagaccccccaacatcgtgctgatcttcgccgacgacctgggctacggcgacctgggctgctacggccaccccagcagcaccacccccaacctggaccagctggccgccggcggcctgagattcaccgacttctacgtgcccgtgagcctgtgcacccccagcagagccgccctgctgaccggcagactgcccgtgagaatgggcatgtaccccggcgtgctggtgcccagcagcagaggcggcctgcccctggaggaggtgaccgtggccgaggtgctggccgccagaggctacctgaccggcatggccggcaagtggcacctgggcgtgggccccgagggcgccttcctgcccccccaccagggcttccacagattcctgggcatcccctacagccacgaccagggcccctgccagaacctgacctgcttcccccccgccaccccctgcgacggcggctgcgaccagggcctggtgcccatccccctgctggccaacctgagcgtggaggcccagcccccctggctgcccggcctggaggccagatacatggccttcgcccacgacctgatggccgacgcccagagacaggacagacccttcttcctgtactacgccagccaccacacccactacccccagttcagcggccagagcttcgccgagagaagcggcagaggccccttcggcgacagcctgatggagctggacgccgccgtgggcaccctgatgaccgccatcggcgacctgggcctgctggaggagaccctggtgatcttcaccgccgacaacggccccgagaccatgagaatgagcagaggcggctgcagcggcctgctgagatgcggcaagggcaccacctacgagggcggcgtgagagagcccgccctggccttctggcccggccacatcgcccccggcgtgacccacgagctggccagcagcctggacctgctgcccaccctggccgccctggccggcgcccccctgcccaacgtgaccctggacggcttcgacctgagccccctgctgctgggcaccggcaagagccccagacagagcctgttcttctaccccagctaccccgacgaggtgagaggcgtgttcgccgtgagaaccggcaagtacaaggcccacttcttcacccagggcagcgcccacagcgacaccaccgccgaccccgcctgccacgccagcagcagcctgaccgcccacgagccccccctgctgtacgacctgagcaaggaccccggcgagaactacaacctgctgggcggcgtggccggcgccacccccgaggtgctgcaggccctgaagcagctgcagctgctgaaggcccagctggacgccgccgtgaccttcggccccagccaggtggccagaggcgaggaccccgccctgcagatctgctgccaccccggctgcacccccagacccgcctgctgccactgccccgacccccacgcctag

SEQ ID NO: 37998 - protein, 107 aa, Artificial Sequence
  derived and/or modified sequence
MQRLPAATRATLILSLAFASLHSACSAEASSSNSSSLTAHHPDPGTLEQCLNVDFCPQAARCCRTGVDEYGWIAAAVGWSLWFLTLILLCVDKLMKLTPDEPKDLQA

SEQ ID NO: 37999 - DNA, 324 bp, Artificial Sequence
  derived and/or modified sequence
atgcagagactgcccgccgccaccagagccaccctgatcctgagcctggccttcgccagcctgcacagcgcctgcagcgccgaggccagcagcagcaacagcagcagcctgaccgcccaccaccccgaccccggcaccctggagcagtgcctgaacgtggacttctgcccccaggccgccagatgctgcagaaccggcgtggacgagtacggctggatcgccgccgccgtgggctggagcctgtggttcctgaccctgatcctgctgtgcgtggacaagctgatgaagctgacccccgacgagcccaaggacctgcaggcctag

SEQ ID NO: 38000 - DNA, 324 bp, Artificial Sequence
  derived and/or modified sequence
atgcaacggttgccagcagccacacgcgctactctaatactgagcctggcatttgcctccctccatagcgcatgttcagctgaagcctcatcctcaaactcatcatctctgactgcccaccaccccgaccctgggactttggagcaatgcttaaacgttgatttttgtccacaggccgcaagatgctgcaggactggggtggatgagtatggttggattgctgctgctgtggggtggtccctgtggtttttgaccttgatacttctgtgcgtggacaaactcatgaagctgaccccagatgaacctaaggaccttcaggcatag

SEQ ID NO: 38001 - DNA, 324 bp, Artificial Sequence
  derived and/or modified sequence
atgcagaggctgcctgctgccacccgggccaccctcatcctgagcctggcctttgccagcctgcacagcgcctgcagcgctgaggccagcagcagcaacagcagcagcctgacagcccaccacccagaccccggcaccctggagcagtgcctgaatgtggacttctgcccccaggccgcccgctgctgcaggactggagtggatgaatatggctggattgctgctgctgtgggctggagcctgtggttcctgaccctcatcctgctgtgtgtggacaagctgatgaagctgaccccagatgagcccaaggacctgcaggcctag

SEQ ID NO: 38002 - DNA, 324 bp, Artificial Sequence
  derived and/or modified sequence
atgcagcggctgcccgccgccacccgggccaccctgatcctgagcttagccttcgcatcgctacactctgcctgcagtgccgaggcctcgtccagtaactcctcaagtttaaccgcgcaccatccggaccccggaacgctggagcagtgtctgaacgttgacttctgccctcaagcagccaggtgctgtcgtacaggagtagacgaatacggatggatcgccgccgcggtgggatggagtctctggttcctcacactaatacttctgtgcgttgacaagctgatgaaactcacacccgatgaacccaaggatctgcaggcttag

SEQ ID NO: 38003 - DNA, 324 bp, Artificial Sequence
  derived and/or modified sequence
atgcaacgtttacctgcagctacccgcgctactttgatactctccttggcttttgctagtctgcacagcgcatgctccgccgaggcctcatcatcaaactcttcttccctgacagctcatcatcctgatccgggaacattagagcagtgcttgaatgtagacttttgtcctcaggcagcaagatgctgtaggacaggggtggatgaatatggttggatcgctgctgcagttgggtggagcctgtggtttctcacgctcatattgctctgcgttgacaagttgatgaagctgactccagatgagcctaaggacctgcaggcctag

SEQ ID NO: 38004 - protein, 177 aa, Artificial Sequence
  derived and/or modified sequence
MSRKGPRAEVCADCSAPDPGWASISRGVLVCDECCSVHRSLGRHISIVKHLRHSAWPPTLLQMVHTLASNGANSIWEHSLLDPAQVQSGRRKANPQDKVHPIKSEFIRAKYQMLAFVHKLPCRDDDGVTAKDDLTGHRSWATPDINPHPNRATGTSALSAATLPGSQVPWCPPLSSP

SEQ ID NO: 38005 - protein, 770 aa, Artificial Sequence
  derived and/or modified sequence
MSRKGPRAEVCADCSAPDPGWASISRGVLVCDECCSVHRSLGRHISIVKHLRHSAWPPTLLQMVHTLASNGANSIWEHSLLDPAQVQSGRRKANPQDKVHPIKSEFIRAKYQMLAFVHKLPCRDDDGVTAKDLSKQLHSSVRTGNLETCLRLLSLGAQANFFHPEKGTTPLHVAAKAGQTLQAELLVVYGADPGSPDVNGRTPIDYARQAGHHELAERLVECQYELTDRLAFYLCGRKPDHKNGHYIIPQMADRSRQKCMSQSLDLSELAKAAKKKLQALSNRLFEELAMDVYDEVDRRENDAVWLATQNHSTLVTERSAVPFLPVNPEYSATRNQGRQKLARFNAREFATLIIDILSEAKRRQQGKSLSSPTDNLELSLRSQSDLDDQHDYDSVASDEDTDQEPLRSTGATRSNRARSMDSSDLSDGAVTLQEYLELKKALATSEAKVQQLMKVNSSLSDELRRLQREIHKLQAENLQLRQPPGPVPTPPLPSERAEHTPMAPGGSTHRRDRQAFSMYEPGSALKPFGGPPGDELTTRLQPFHSTELEDDAIYSVHVPAGLYRIRKGVSASAVPFTPSSPLLSCSQEGSRHTSKLSRHGSGADSDYENTQSGDPLLGLEGKRFLELGKEEDFHPELESLDGDLDPGLPSTEDVILKTEQVTKNIQELLRAAQEFKHDSFVPCSEKIHLAVTEMASLFPKRPALEPVRSSLRLLNASAYRLQSECRKTVPPEPGAPVDFQLLTQQVIQCAYDIAKAAKQLVTITTREKKQ

SEQ ID NO: 38006 - DNA, 3711 bp, Artificial Sequence
  derived and/or modified sequence
gcacggcgggttccgggccagccccggggcggacggttggccgggcgcgcggagcctcgccggggcctcgccggagccgggccgggcagcaggggccgccgccgccgcccgggcccgccgcccgcgccccccacgctggcccagagggctgcggccgcgtcgccgctgaggatgtcccgaaaggggccgcgagcggaggtgtgtgcggactgcagcgccccggaccctggctgggcatccatcagcaggggtgtgctggtgtgtgacgagtgctgcagcgtgcaccggagcctgggacgccacatctccattgtcaagcaccttcgccacagcgcctggcctcccacgctgctgcagatggtgcacacgcttgccagcaacggggccaactccatctgggagcactccctgctggaccccgcacaagtgcagagcggccggcgtaaagccaacccccaagacaaagtccaccccatcaagtcagagttcatcagggccaagtaccagatgctggcatttgtgcacaagcttccctgccgggacgatgatggagtcaccgccaaagacctcagcaagcaactacactcgagcgtgcggacaggcaacctggagacatgtctgcgcctgctctccctgggtgcccaggccaacttcttccacccagagaagggcaccacacctctgcacgtggctgccaaggcaggacagacactgcaggccgagctgcttgtagtgtatggggctgaccctggctcccctgatgttaatggccgcacacccattgactatgccaggcaggcggggcaccatgagctggcggaaaggctggttgagtgccaatatgagctcactgaccggctggccttctacctctgtggacgcaagccggatcacaagaatgggcattacatcatcccacagatggctgacagatctcggcaaaagtgcatgtctcagagccttgacttatccgaattggccaaagctgctaagaagaagctgcaggcgctcagcaaccggctttttgaggaactcgccatggacgtgtatgacgaggtggatcgaagagaaaatgatgcagtgtggctggctacccaaaaccacagcactctggtgacagagcgcagtgccgtgcccttcctgcctgttaacccggaatactcagccacgcggaatcaggggcgacaaaagctggcccgctttaatgcccgagagtttgccaccttgatcatcgacattctcagtgaggccaagcggagacagcagggcaagagcctgagcagccccacagacaacctcgagctgtctctgcggagccagagtgacctcgacgaccaacacgactacgacagcgtggcctctgacgaggacacagaccaggagcccctgcgcagcaccggcgccactcggagcaaccgggcccggagcatggactcctcggacttgtctgacggggctgtgacgctgcaggagtacctggagctgaagaaggccctggctacatcggaggcaaaggtgcagcagctcatgaaggtcaacagtagcctgagcgacgagctccggaggctgcagcgagagatccacaagctgcaggcggagaacctgcagctccggcagcctccagggccggtgcccacacctccactccccagtgaacgggcggaacacacacccatggcgccaggcgggagcacacaccgcagggatcgccaggccttttccatgtatgaacctggctctgccctgaagccctttgggggcccccctggggacgagctcactacgcggctgcagcctttccacagcactgagctagaggacgacgccatctattcagtgcacgtccctgctggcctttaccggatccggaaaggggtgtctgcctcagctgtgcccttcactccctcctccccgctgctgtcctgctcccaggagggaagccgccacacgagcaagctttcccgccacggcagtggagccgacagtgactatgagaacacgcaaagtggggacccactgctggggctggaagggaagaggtttctagagctgggcaaagaggaagacttccacccagagctggaaagcctggatggagacctagatcctgggcttcccagcacagaggatgtcatcttgaagacagagcaggtcaccaagaacattcaggaactgttgcgggcagcccaggagttcaagcatgacagcttcgtgccctgctcagagaagatccatttggctgtgaccgagatggcctccctcttcccaaagaggccagccctggagccagtgcggagctcactgcggctgctcaacgccagcgcctaccggctgcagagtgagtgccggaagacagtgcccccagagcccggcgccccagtggacttccagctgctgactcagcaggtgatccagtgcgcctatgacatcgccaaggctgccaagcagctggtcaccatcaccacccgagagaagaagcagtgacctctctccccacaccctcacctgcaccctaggacctcactggccataggagctgggccactccagacattaatccccaccccaacagagccactggcacaagtgcccttagtgctgccacactccctggcagccaggtgccctggtgcccacccctgtcgagcccctaaggatggggaggtgggggggcaggagcttctgtcccccacattccatgcacctcccctctgtatatagcatctcccccctcctagtgagcaggggcctgcaaggcatcactcccagcccctcgccttctagggcaccctcagcaaaggggcaggtggggacactccaagtggggcagctctccgtacatgcgccccacccccatgagccagttcagccctactgggggctgagcgggggcatcccctcctttgtacatagtctccatggatgtccctgccctgtagccaccagccccttgctgctctccctttaatgccatatggcccctgcctagggcacaggccccaacctgtgtgctggggtccccagcagcaaacactggaaagtctgttttttttttttctttcttcttccccaccccttaattttaactttgtggtaactgagtgcccccgcgtgcctgcgtgttgagtgtgtgggcggcagtgccgttccggaggcctggtccatctggagttttgaggggtgaggggaccagagcagtgggaccagcatggggatcagcttcccttccccacctggagccagggactgtccgggtagccagttttggtcctgccagctgcctccctgatccctccccactctcgccccttctctatgaacttaaatcaaaaaccacttccctccatctcctcctgctcctgcgtggagggggaatgtgtgctggctagggtggaggactgagcacctgagcctggggctggctccccggggtccccgactcagctggtggctgtggagctgagtcccctccccgtaacctctgcaaggccagcacccaccatcactacctgcacctgctgtggtcccaccctctggaggcctgggaacctggctgcagcctgggaaggctggagaggcagacggtgggacccaccagctctctccccatcccgcttcttccctgggggccaggccctacctgtgtggtggtgggtgggctgtcaagacgtgtcatgtacatttgtatcaaaaataaagaagtgaccatga

SEQ ID NO: 38007 - DNA, 2313 bp, Artificial Sequence
  derived and/or modified sequence
atgagccgcaagggccctcgggcagaagtgtgtgccgattgttccgctcccgaccccggatgggcatctatatcaagaggtgtgctggtctgtgatgaatgctgtagcgtgcaccgttcgctggggcgacacattagcattgtgaaacatctgcgccactcagcatggccacctactcttctgcagatggtgcacaccttagcctcaaacggggctaatagcatttgggaacattcactgctcgacccggcgcaagtccagagtggaagaaggaaagccaatccgcaggataaagtgcatccaataaagagcgaatttatccgcgcaaagtatcagatgttagcattcgtgcacaagttaccatgcagggacgatgacggggttacagcaaaagacttgtcaaagcagcttcatagctctgtgcgtaccggtaacctggagacctgtctgcgactgctgtctctgggagctcaggcaaatttttttcacccggagaagggaacgactcctctccatgtcgcggccaaagcaggtcaaacattgcaagcggagttgctggtggtctacggtgctgaccccggcagccctgatgtgaacggacgcacgcctattgactatgcgagacaagccggtcatcatgagttggccgaacggctggttgagtgccagtacgagttaacagatcggctggccttttacctctgtggccgcaagccagaccacaagaacgggcattacatcattccccaaatggctgatcggtctagacaaaagtgcatgagtcaatctctggacctctccgagctcgccaaggccgctaaaaagaaactgcaagccctctcaaatcggctgttcgaggagctggccatggatgtgtatgacgaagttgaccggcgagaaaacgacgcagtctggctggctactcagaaccacagtacgctcgtcaccgaacgctcagccgtccctttccttcctgtaaatcctgaatactccgctaccagaaaccagggcaggcagaaactcgcacggttcaacgctcgcgaattcgccacattgattattgacatccttagtgaagctaagcgacgtcaacaggggaaaagtctcagcagtccaaccgacaatctggagctgagtttgaggtcacagtccgatctggacgatcaacacgattatgattctgtcgcctccgacgaggacacagaccaagaacccctccgatcaaccggggccactagatccaatcgggctagatccatggactcatccgatctgagtgacggagcggtgacacttcaggaatacctggagctcaaaaaggcgctcgccacctcggaagccaaggttcaacagctgatgaaggtgaacagctctcttagcgacgagttacggcgcttgcagagggaaattcacaaacttcaggccgaaaacttgcagctaaggcaaccccccggcccagtgcctacgccacctctaccttcagaaagagccgaacacactccgatggccccaggcgggtcaacacaccgcagagatcgacaggccttttctatgtatgagccaggatcagccctcaagccatttgggggacctccaggcgatgaactgacgacgaggctccagccattccatagtacagaattggaggacgacgcaatatactcagtccacgttccagccgggctgtatcgtattcgcaaaggcgtctctgcatccgcagttccgttcactccgtccagcccactgctgtcttgttcgcaggaggggtcccggcacactagcaagttgtctagacacggaagtggtgcagacagcgattatgaaaacacccagtcaggagaccccttattgggactggaaggcaagcgtttcctcgagcttggcaaagaagaggatttccaccccgagttagagtccttggacggcgaccttgatccaggtctaccatctaccgaagatgttattctgaagaccgaacaggtcacaaagaacatacaggagctccttagagccgcacaggaattcaagcatgactctttcgtgccttgctccgagaaaatccacctggccgtgactgagatggcaagcctgtttcctaagagacccgccctggaacccgtccggagctctctacgtcttttgaacgcaagtgcctatcgattgcagtctgagtgcaggaagaccgtccctccagagcctggcgcacctgtcgacttccagctgctaacacagcaggtgattcagtgcgcatatgacatcgccaaggctgctaaacagctggttactattactactagggagaaaaagcagtag

SEQ ID NO: 38008 - DNA, 2313 bp, Artificial Sequence
  derived and/or modified sequence
atgagcaggaagggccccagggctgaggtgtgtgccgactgcagcgccccagaccccggctgggccagcatcagcagaggagtgctggtgtgtgatgagtgctgcagcgtgcacaggagcctgggccgccacatcagcatcgtgaagcacctgcggcacagcgcctggccacccaccctgctgcagatggtgcacaccctggccagcaatggagccaacagcatctgggagcacagcctgctggaccctgcccaggtgcagagcggccgcaggaaggccaacccccaggacaaggtgcaccccatcaagtctgagttcatccgggccaagtaccagatgctggcctttgtgcacaagctgccctgcagagatgatgatggagtgacagccaaggacctgagcaagcagctgcacagctctgtgaggactggaaacctggagacctgcctgcggctgctgagcctgggcgcccaggccaacttcttccaccctgagaagggcaccacccccctgcacgtggccgccaaggccggccagaccctgcaggccgagctgctggtggtgtatggagctgaccccggcagcccagatgtgaatggaagaacacccatcgactatgcccggcaggccggccaccacgagctggccgagcggctggtggagtgccagtatgagctgacagaccggctggccttctacctgtgtggcaggaagccagaccacaagaatggccactacatcatcccccagatggctgacaggagccggcagaagtgcatgagccagagcctggacctgtctgagctggccaaggccgccaagaagaagctgcaggccctgagcaaccggctgtttgaggagctggccatggatgtgtatgatgaggtggaccggcgggagaatgatgctgtgtggctggccacccagaaccacagcaccctggtgacagagaggtctgctgtgcccttcctgcctgtgaaccctgagtacagcgccaccaggaaccagggccggcagaagctggcccgcttcaatgcccgggagtttgccaccctcatcatcgacatcctgtctgaggccaagaggcggcagcagggcaagagcctgagcagccccacagacaacctggagctgagcctgcggagccagagcgacctggatgaccagcacgactatgacagcgtggccagtgatgaggacacagaccaggagcccctgcggagcactggagccaccaggagcaacagagcccgctccatggacagcagtgacctgagtgatggagctgtgaccctgcaggagtacctggagctgaagaaggccctggccaccagcgaggccaaggtgcagcagctgatgaaggtgaacagcagcctgagtgatgagctgcggcggctgcagcgggagatccacaagctgcaggccgagaacctgcagctgcggcagcccccaggccctgtgcccaccccacccctgcccagcgagagagctgagcacacccccatggcccctgggggcagcacccaccggcgggaccggcaggccttctccatgtatgagcccggcagcgccctgaagccctttggaggccccccaggagatgagctgaccacccggctgcagcccttccacagcacagagctggaggatgatgccatctacagcgtgcacgtgcctgctggcctgtaccgcatcagaaaaggagtgtctgccagcgctgtgcccttcacccccagcagccccctgctgagctgcagccaggagggcagccgccacaccagcaagctgagcagacatggcagcggggctgacagcgactatgagaacacccagagcggggaccccctgctgggcctggagggcaagcgcttcctggagctgggcaaggaggaggacttccaccctgagctggagagcctggatggagacctggaccccggcctgcccagcacagaagatgtgatcctgaagacagagcaggtgaccaagaacatccaggagctgctgcgggccgcccaggagttcaagcatgacagctttgtgccctgcagcgagaagatccacctggccgtgacagagatggccagcctcttccccaagaggcctgccctggagcctgtgcgcagcagcctgcggctgctgaatgccagcgcctaccgcctgcagagcgagtgcaggaagacagtgcccccagagcccggggcccctgtggacttccagctgctgacccagcaggtgatccagtgtgcctatgacatcgccaaggccgccaagcagctggtgaccatcaccacccgggagaagaagcagtag

SEQ ID NO: 38009 - DNA, 2313 bp, Artificial Sequence
  derived and/or modified sequence
atgagccggaagggcccccgggccgaggtgtgcgccgactgcagcgcaccggatcccggctgggcgtctataagtaggggcgttctcgtatgcgatgagtgttgttctgtgcaccgatccctgggccgacatatctccatagtgaagcacctgcgccactcggcatggccgcccaccttgctgcagatggtgcatactcttgcctccaacggcgctaactctatttgggagcatagtctactcgatcctgcccaggtccagagtgggcgaagaaaggccaatccccaggataaggtgcaccctataaaaagcgaattcattagggctaaataccagatgttggcattcgttcacaaattaccttgtagagacgatgacggcgtcactgccaaagatctcagcaagcagttacacagcagcgtgcgtacagggaatctcgaaacttgcctgcgcctgctgtcgctgggcgctcaagccaacttctttcatccagagaagggtacgactccacttcatgtggcagctaaagctggccagacactgcaggcggagctcttagttgtttacggggctgatccaggtagtcccgacgtcaatggaaggacaccaatcgactacgcaaggcaggctggccaccacgagttggccgaacggctggtcgagtgtcagtacgagcttaccgaccgcctagcgttctacttatgcggacggaagcccgatcataagaacgggcattacatcatccctcagatggccgatcggtccaggcagaagtgcatgagccagagtctagatctcagcgagttggctaaggctgctaaaaagaaactacaggccctgagcaataggctgttcgaggaacttgcaatggatgtttacgacgaggttgaccggagggaaaacgatgccgtctggctcgccacccagaaccattcaacactagttacggaacgcagcgccgttccctttctgccggtgaacccggagtattccgccacccgaaaccaaggtcggcagaagctggcccggtttaatgcccgcgaatttgctacacttatcatcgacattctctccgaagccaagagaaggcagcagggaaagtctctgagctcaccaactgataatctcgagttatcattgcggtcacagagtgaccttgatgatcaacatgattacgactctgttgcaagcgatgaagatactgatcaggagcccctgcgatcaaccggagcgacccgctccaacagagctcgttcgatggatagctccgatctctccgatggggctgtgacattgcaggaatacctcgaattaaaaaaggcgctcgccacatcagaggctaaggtgcagcagttgatgaaagttaacagttctctgtcagacgagctacggcgactgcaaagagaaatccacaagctgcaggccgagaatctacaactgcggcaaccacccgggccggtccctacaccaccattgccctcggagcgcgctgaacacacaccgatggcgcccgggggttcaacgcaccggagagatagacaagctttctccatgtacgagcccggcagtgccctcaagccgtttggtggcccaccaggcgacgaactgaccactcggctgcaaccgtttcattcaacggagctggaagatgatgccatctacagtgtgcacgtcccggcgggtctgtaccgtataaggaagggagtgtctgcctcagctgtgccgttcacaccctcttctcccctcctcagctgttcccaagaagggagccgacatacatccaaacttagcaggcatggctccggcgcagactcggactatgagaatacccaatccggagatcccctcctgggccttgagggaaagagatttctggaactggggaaagaggaggatttccaccctgaactggaatccctggatggggatctcgacccaggacttccatcgacagaggacgttatcctgaaaacggagcaggtaacaaaaaacatccaggaattgttaagagctgcccaggagtttaaacatgattctttcgtgccttgttcggagaaaatccacctcgcagtcaccgaaatggcctctctgtttcctaagaggccagcactcgagcccgtccggtcgagccttagacttctgaacgcgtcagcatacagactacaaagtgagtgtagaaaaaccgtccctcctgagcctggtgcccctgtagatttccagctcctgacccagcaggtgatccagtgcgcatatgatattgcaaaggcagcgaaacagctggttaccattaccacgagagagaagaaacaatag

SEQ ID NO: 38010 - DNA, 2313 bp, Artificial Sequence
  derived and/or modified sequence
atgagccgaaaaggacctcgcgctgaagtgtgcgccgactgcagcgcacccgacccgggatgggccagtatctcgcggggagtgctcgtgtgcgacgagtgttgttctgtgcaccggagcttgggcagacatatcagcatcgtgaagcatttacgtcatagcgcctggccacccaccctccttcagatggttcatactcttgcctctaatggggctaacagcatctgggagcactccttactggatccagcacaggtgcaaagcggcaggaggaaagcgaacccacaagataaggtacaccccattaaatccgaattcatcagagcgaaatatcagatgctggcgttcgtgcataaactcccttgtcgcgacgatgatggagtgaccgcgaaggacctgtctaaacagttgcactcaagtgtgagaacagggaaccttgagacctgcctcagactgctgagcctcggtgcccaagccaatttcttccatcctgaaaagggcacaacccctctccacgtcgctgccaaggctggccaaacccttcaggctgagctcctcgtcgtgtatggggctgaccccggatctcccgacgtgaacggtcgaacccccattgactacgccagacaagcaggtcaccacgaactggctgaacgcctggtcgagtgtcagtatgaacttacagacaggcttgccttctatctctgtggcagaaagcccgaccataaaaatggccattacataatcccccagatggccgataggagccgccagaaatgcatgtcccaaagcctggatctaagcgaactggcgaaggcagccaaaaaaaaattacaggccctgtccaatagactgtttgaggagcttgctatggatgtgtatgatgaagtcgaccggcgagagaatgatgccgtgtggcttgctacacaaaaccattctaccctggtaacagagaggtcagcggtgccattcctacctgttaaccccgagtatagcgccacccgtaatcaaggtagacagaaattagccagatttaatgcccgagaattcgccactctgattatcgacattctgagcgaagccaaacgtcggcaacagggtaaatctctgtcaagccctacagacaacctcgagctgtctttacgatctcagtctgacctcgatgatcagcacgattatgactctgtggcttcagatgaggataccgatcaggagcctcttcgctccaccggtgccaccagatccaacagagcacggagcatggactctagtgacctgagtgatggagccgtgactttgcaagagtacctggagcttaagaaagcactcgcgacttctgaagccaaggtgcagcagctgatgaaagtgaatagctctttaagcgacgagctccggcgtcttcagcgcgagatccataagctgcaggccgagaacctgcagttgcggcagcctccgggacctgtgcccaccccccctctgcccagtgaaagggccgaacatacccccatggcccctggcggaagcacacaccgcagagaccgccaagctttctccatgtatgagccaggcagcgccctaaagcccttcggcggacctcctggagacgagttgactaccaggctgcagcctttccactccacagagcttgaggatgatgcaatctattctgtccatgtgcctgctggcctgtacaggatcaggaaaggcgtgagcgccagcgctgtacccttcacacccagtagtcccctcctttcctgtagtcaggagggctccagacacacttctaagctgtctcgccatggttctggtgccgacagcgattacgagaatactcagagcggtgacccactccttgggctcgaaggaaaacgcttccttgaattgggcaaggaggaagatttccacccggaactggaatcactggatggcgacctggatccaggactgccaagtacagaggatgtgatcctgaaaaccgaacaagtgaccaagaatatccaggagctgctgcgtgccgcacaagagtttaagcatgactcctttgtcccctgctctgaaaagattcacctcgctgtgactgaaatggcctcactgtttcccaaaagacccgcattggaaccagtgagatccagtttgagactgctgaacgctagcgcctaccggcttcagtcggagtgtcgtaagaccgtgccgccagagccaggcgctcccgtggacttccagctactgacgcagcaggtgatccagtgtgcctacgacatcgctaaggccgctaaacagcttgtgaccattacaaccagggagaagaagcagtag

SEQ ID NO: 38011 - DNA, 2313 bp, Artificial Sequence
  derived and/or modified sequence
atgagcagaaagggccccagagccgaggtgtgcgccgactgcagcgcccccgaccccggctgggccagcatcagcagaggcgtgctggtgtgcgacgagtgctgcagcgtgcacagaagcctgggcagacacatcagcatcgtgaagcacctgagacacagcgcctggccccccaccctgctgcagatggtgcacaccctggccagcaacggcgccaacagcatctgggagcacagcctgctggaccccgcccaggtgcagagcggcagaagaaaggccaacccccaggacaaggtgcaccccatcaagagcgagttcatcagagccaagtaccagatgctggccttcgtgcacaagctgccctgcagagacgacgacggcgtgaccgccaaggacctgagcaagcagctgcacagcagcgtgagaaccggcaacctggagacctgcctgagactgctgagcctgggcgcccaggccaacttcttccaccccgagaagggcaccacccccctgcacgtggccgccaaggccggccagaccctgcaggccgagctgctggtggtgtacggcgccgaccccggcagccccgacgtgaacggcagaacccccatcgactacgccagacaggccggccaccacgagctggccgagagactggtggagtgccagtacgagctgaccgacagactggccttctacctgtgcggcagaaagcccgaccacaagaacggccactacatcatcccccagatggccgacagaagcagacagaagtgcatgagccagagcctggacctgagcgagctggccaaggccgccaagaagaagctgcaggccctgagcaacagactgttcgaggagctggccatggacgtgtacgacgaggtggacagaagagagaacgacgccgtgtggctggccacccagaaccacagcaccctggtgaccgagagaagcgccgtgcccttcctgcccgtgaaccccgagtacagcgccaccagaaaccagggcagacagaagctggccagattcaacgccagagagttcgccaccctgatcatcgacatcctgagcgaggccaagagaagacagcagggcaagagcctgagcagccccaccgacaacctggagctgagcctgagaagccagagcgacctggacgaccagcacgactacgacagcgtggccagcgacgaggacaccgaccaggagcccctgagaagcaccggcgccaccagaagcaacagagccagaagcatggacagcagcgacctgagcgacggcgccgtgaccctgcaggagtacctggagctgaagaaggccctggccaccagcgaggccaaggtgcagcagctgatgaaggtgaacagcagcctgagcgacgagctgagaagactgcagagagagatccacaagctgcaggccgagaacctgcagctgagacagccccccggccccgtgcccaccccccccctgcccagcgagagagccgagcacacccccatggcccccggcggcagcacccacagaagagacagacaggccttcagcatgtacgagcccggcagcgccctgaagcccttcggcggcccccccggcgacgagctgaccaccagactgcagcccttccacagcaccgagctggaggacgacgccatctacagcgtgcacgtgcccgccggcctgtacagaatcagaaagggcgtgagcgccagcgccgtgcccttcacccccagcagccccctgctgagctgcagccaggagggcagcagacacaccagcaagctgagcagacacggcagcggcgccgacagcgactacgagaacacccagagcggcgaccccctgctgggcctggagggcaagagattcctggagctgggcaaggaggaggacttccaccccgagctggagagcctggacggcgacctggaccccggcctgcccagcaccgaggacgtgatcctgaagaccgagcaggtgaccaagaacatccaggagctgctgagagccgcccaggagttcaagcacgacagcttcgtgccctgcagcgagaagatccacctggccgtgaccgagatggccagcctgttccccaagagacccgccctggagcccgtgagaagcagcctgagactgctgaacgccagcgcctacagactgcagagcgagtgcagaaagaccgtgccccccgagcccggcgcccccgtggacttccagctgctgacccagcaggtgatccagtgcgcctacgacatcgccaaggccgccaagcagctggtgaccatcaccaccagagagaagaagcagtag

SEQ ID NO: 38012 - protein, 947 aa, Artificial Sequence
  derived and/or modified sequence
MDDSEVESTASILASVKEQEAQFEKLTRALEEERRHVSAQLERVRVSPQDANPLMANGTLTRRHQNGRFVGDADLERQKFSDLKLNGPQDHSHLLYSTIPRMQEPGQIVETYTEEDPEGAMSVVSVETSDDGTTRRTETTVKKVVKTVTTRTVQPVAMGPDGLPVDASSVSNNYIQTLGRDFRKNGNGGPGPYVGQAGTATLPRNFHYPPDGYSRHYEDGYPGGSDNYGSLSRVTRIEERYRPSMEGYRAPSRQDVYGPQPQVRVGGSSVDLHRFHPEPYGLEDDQRSMGYDDLDYGMMSDYGTARRTGTPSDPRRRLRSYEDMIGEEVPSDQYYWAPLAQHERGSLASLDSLRKGGPPPPNWRQPELPEVIAMLGFRLDAVKSNAAAYLQHLCYRNDKVKTDVRKLKGIPVLVGLLDHPKKEVHLGACGALKNISFGRDQDNKIAIKNCDGVPALVRLLRKARDMDLTEVITGTLWNLSSHDSIKMEIVDHALHALTDEVIIPHSGWEREPNEDCKPRHIEWESVLTNTAGCLRNVSSERSEARRKLRECDGLVDALIFIVQAEIGQKDSDSKLVENCVCLLRNLSYQVHREIPQAERYQEAAPNVANNTGPHAASCFGAKKGKDEWFSRGKKPIEDPANDTVDFPKRTSPARGYELLFQPEVVRIYISLLKESKTPAILEASAGAIQNLCAGRWTYGRYIRSALRQEKALSAIADLLTNEHERVVKAASGALRNLAVDARNKELIGKHAIPNLVKNLPGGQQNSSWNFSEDTVISILNTINEVIAENLEAAKKLRETQGIEKLVLINKSGNRSEKEVRAAALVLQTIWGYKELRKPLEKEGWKKSDFQVNLNNASRSQSSHSYDDSTLPLIDRNQKSDNNYSTPNERGDHNRTLDRSGDLGDMEPLKGTTPLMQDEGQESLEEELDVLVLDDEGGQVSYPSMQKI

SEQ ID NO: 38013 - protein, 938 aa, Artificial Sequence
  derived and/or modified sequence
MDDSEVESTASILASVKEQEAQFEKLTRALEEERRHVSAQLERVRVSPQDANPLMANGTLTRRHQNGRFVGDADLERQKFSDLKLNGPQDHSHLLYSTIPRMQEPGQIVETYTEEDPEGAMSVVSVETSDDGTTRRTETTVKKVVKTVTTRTVQPVAMGPDGLPVDASSVSNNYIQTLGRDFRKNGNGGPGPYVGQAGTATLPRNFHYPPDGYSRHYEDGYPGGSDNYGSLSRVTRIEERYRPSMEGYRAPSRQDVYGPQPQVRVGGSSVDLHRFHPEPYGLEDDQRSMGYDDLDYGMMSDYGTARRTGTPSDPRRRLRSYEDMIGEEVPSDQYYWAPLAQHERGSLASLDSLRKGGPPPPNWRQPELPEVIAMLGFRLDAVKSNAAAYLQHLCYRNDKVKTDVRKLKGIPVLVGLLDHPKKEVHLGACGALKNISFGRDQDNKIAIKNCDGVPALVRLLRKARDMDLTEVITGTLWNLSSHDSIKMEIVDHALHALTDEVIIPHSGWEREPNEDCKPRHIEWESVLTNTAGCLRNVSSERSEARRKLRECDGLVDALIFIVQAEIGQKDSDSKLVENCVCLLRNLSYQVHREIPQAERYQEAAPNVANNTGPHAASCFGAKKGKDEWFSRGKKPIEDPANDTVDFPKRTSPARGYELLFQPEVVRIYISLLKESKTPAILEASAGAIQNLCAGRWTYGRYIRSALRQEKALSAIADLLTNEHERVVKAASGALRNLAVDARNKELIGKHAIPNLVKNLPGGQQNSSWNFSEDTVISILNTINEVIAENLEAAKKLRETQGIEKLVLINKSGNRSEKEVRAAALVLQTIWGYKELRKPLEKEGWKKSDFQVNLNNASRSQSSHSYDDSTLPLIDRNQKSDKKPDREEIQMSNMGSNTKSLDNNYSTPNERGDHNRTLDRSGDLGDMEPLKGTTPLMKI

SEQ ID NO: 38014 - protein, 968 aa, Artificial Sequence
  derived and/or modified sequence
MDDSEVESTASILASVKEQEAQFEKLTRALEEERRHVSAQLERVRVSPQDANPLMANGTLTRRHQNGRFVGDADLERQKFSDLKLNGPQDHSHLLYSTIPRMQEPGQIVETYTEEDPEGAMSVVSVETSDDGTTRRTETTVKKVVKTVTTRTVQPVAMGPDGLPVDASSVSNNYIQTLGRDFRKNGNGGPGPYVGQAGTATLPRNFHYPPDGYSRHYEDGYPGGSDNYGSLSRVTRIEERYRPSMEGYRAPSRQDVYGPQPQVRVGGSSVDLHRFHPEPYGLEDDQRSMGYDDLDYGMMSDYGTARRTGTPSDPRRRLRSYEDMIGEEVPSDQYYWAPLAQHERGSLASLDSLRKGGPPPPNWRQPELPEVIAMLGFRLDAVKSNAAAYLQHLCYRNDKVKTDVRKLKGIPVLVGLLDHPKKEVHLGACGALKNISFGRDQDNKIAIKNCDGVPALVRLLRKARDMDLTEVITGTLWNLSSHDSIKMEIVDHALHALTDEVIIPHSGWEREPNEDCKPRHIEWESVLTNTAGCLRNVSSERSEARRKLRECDGLVDALIFIVQAEIGQKDSDSKLVENCVCLLRNLSYQVHREIPQAERYQEAAPNVANNTGPHAASCFGAKKGKDEWFSRGKKPIEDPANDTVDFPKRTSPARGYELLFQPEVVRIYISLLKESKTPAILEASAGAIQNLCAGRWTYGRYIRSALRQEKALSAIADLLTNEHERVVKAASGALRNLAVDARNKELIGKHAIPNLVKNLPGGQQNSSWNFSEDTVISILNTINEVIAENLEAAKKLRETQGIEKLVLINKSGNRSEKEVRAAALVLQTIWGYKELRKPLEKEGWKKSDFQVNLNNASRSQSSHSYDDSTLPLIDRNQKSDKKPDREEIQMSNMGSNTKSLDNNYSTPNERGDHNRTLDRSGDLGDMEPLKGTTPLMQDEGQESLEEELDVLVLDDEGGQVSYPSMQKI

SEQ ID NO: 38015 - protein, 867 aa, Artificial Sequence
  derived and/or modified sequence
MQEPGQIVETYTEEDPEGAMSVVSVETSDDGTTRRTETTVKKVVKTVTTRTVQPVAMGPDGLPVDASSVSNNYIQTLGRDFRKNGNGGPGPYVGQAGTATLPRNFHYPPDGYSRHYEDGYPGGSDNYGSLSRVTRIEERYRPSMEGYRAPSRQDVYGPQPQVRVGGSSVDLHRFHPEPYGLEDDQRSMGYDDLDYGMMSDYGTARRTGTPSDPRRRLRSYEDMIGEEVPSDQYYWAPLAQHERGSLASLDSLRKGGPPPPNWRQPELPEVIAMLGFRLDAVKSNAAAYLQHLCYRNDKVKTDVRKLKGIPVLVGLLDHPKKEVHLGACGALKNISFGRDQDNKIAIKNCDGVPALVRLLRKARDMDLTEVITGTLWNLSSHDSIKMEIVDHALHALTDEVIIPHSGWEREPNEDCKPRHIEWESVLTNTAGCLRNVSSERSEARRKLRECDGLVDALIFIVQAEIGQKDSDSKLVENCVCLLRNLSYQVHREIPQAERYQEAAPNVANNTGPHAASCFGAKKGKDEWFSRGKKPIEDPANDTVDFPKRTSPARGYELLFQPEVVRIYISLLKESKTPAILEASAGAIQNLCAGRWTYGRYIRSALRQEKALSAIADLLTNEHERVVKAASGALRNLAVDARNKELIGKHAIPNLVKNLPGGQQNSSWNFSEDTVISILNTINEVIAENLEAAKKLRETQGIEKLVLINKSGNRSEKEVRAAALVLQTIWGYKELRKPLEKEGWKKSDFQVNLNNASRSQSSHSYDDSTLPLIDRNQKSDKKPDREEIQMSNMGSNTKSLDNNYSTPNERGDHNRTLDRSGDLGDMEPLKGTTPLMQDEGQESLEEELDVLVLDDEGGQVSYPSMQKI

SEQ ID NO: 38016 - protein, 645 aa, Artificial Sequence
  derived and/or modified sequence
MIGEEVPSDQYYWAPLAQHERGSLASLDSLRKGGPPPPNWRQPELPEVIAMLGFRLDAVKSNAAAYLQHLCYRNDKVKTDVRKLKGIPVLVGLLDHPKKEVHLGACGALKNISFGRDQDNKIAIKNCDGVPALVRLLRKARDMDLTEVITGTLWNLSSHDSIKMEIVDHALHALTDEVIIPHSGWEREPNEDCKPRHIEWESVLTNTAGCLRNVSSERSEARRKLRECDGLVDALIFIVQAEIGQKDSDSKLVENCVCLLRNLSYQVHREIPQAERYQEAAPNVANNTGPHAASCFGAKKGKDEWFSRGKKPIEDPANDTVDFPKRTSPARGYELLFQPEVVRIYISLLKESKTPAILEASAGAIQNLCAGRWTYGRYIRSALRQEKALSAIADLLTNEHERVVKAASGALRNLAVDARNKELIGKHAIPNLVKNLPGGQQNSSWNFSEDTVISILNTINEVIAENLEAAKKLRETQGIEKLVLINKSGNRSEKEVRAAALVLQTIWGYKELRKPLEKEGWKKSDFQVNLNNASRSQSSHSYDDSTLPLIDRNQKSDKKPDREEIQMSNMGSNTKSLDNNYSTPNERGDHNRTLDRSGDLGDMEPLKGTTPLMQDEGQESLEEELDVLVLDDEGGQVSYPSMQKI

SEQ ID NO: 38017 - protein, 914 aa, Artificial Sequence
  derived and/or modified sequence
MANGTLTRRHQNGRFVGDADLERQKFSDLKLNGPQDHSHLLYSTIPRMQEPGQIVETYTEEDPEGAMSVVSVETSDDGTTRRTETTVKKVVKTVTTRTVQPVAMGPDGLPVDASSVSNNYIQTLGRDFRKNGNGGPGPYVGQAGTATLPRNFHYPPDGYSRHYEDGYPGGSDNYGSLSRVTRIEERYRPSMEGYRAPSRQDVYGPQPQVRVGGSSVDLHRFHPEPYGLEDDQRSMGYDDLDYGMMSDYGTARRTGTPSDPRRRLRSYEDMIGEEVPSDQYYWAPLAQHERGSLASLDSLRKGGPPPPNWRQPELPEVIAMLGFRLDAVKSNAAAYLQHLCYRNDKVKTDVRKLKGIPVLVGLLDHPKKEVHLGACGALKNISFGRDQDNKIAIKNCDGVPALVRLLRKARDMDLTEVITGTLWNLSSHDSIKMEIVDHALHALTDEVIIPHSGWEREPNEDCKPRHIEWESVLTNTAGCLRNVSSERSEARRKLRECDGLVDALIFIVQAEIGQKDSDSKLVENCVCLLRNLSYQVHREIPQAERYQEAAPNVANNTGPHAASCFGAKKGKDEWFSRGKKPIEDPANDTVDFPKRTSPARGYELLFQPEVVRIYISLLKESKTPAILEASAGAIQNLCAGRWTYGRYIRSALRQEKALSAIADLLTNEHERVVKAASGALRNLAVDARNKELIGKHAIPNLVKNLPGGQQNSSWNFSEDTVISILNTINEVIAENLEAAKKLRETQGIEKLVLINKSGNRSEKEVRAAALVLQTIWGYKELRKPLEKEGWKKSDFQVNLNNASRSQSSHSYDDSTLPLIDRNQKSDKKPDREEIQMSNMGSNTKSLDNNYSTPNERGDHNRTLDRSGDLGDMEPLKGTTPLMQDEGQESLEEELDVLVLDDEGGQVSYPSMQKI

SEQ ID NO: 38018 - DNA, 2844 bp, Artificial Sequence
  derived and/or modified sequence
atggatgattccgaggttgagagtacagccagcatccttgcgagcgtgaaggaacaggaagcccagttcgaaaaactgactcgcgccctggaggaggaacggcgacatgtgtccgctcaacttgaacgcgtacgcgtctccccccaggacgccaatcccctgatggcgaatggcaccctaaccaggcgccaccagaacggccgctttgtgggggacgccgatctggaacggcagaagttctctgacctcaaattaaacggcccccaggatcactcacatctgctgtacagtactatccctcggatgcaggaacccggacaaattgtggagacctacaccgaggaggatccagaaggcgctatgtctgtcgtgtctgtagaaacgtctgacgacggcacaacacgaagaactgagactacggtaaaaaaggtggttaagacggtgacgactcgaaccgtgcagcctgtggcaatgggccctgacggtctacccgtggatgcaagcagcgtttctaataattacatccagaccctgggcagggactttcgtaaaaatggtaatggcggacctggcccctacgtcggacaggccggtaccgccaccctccctcggaactttcattaccctcccgatgggtactccagacattatgaggacggatatcctggaggcagcgacaactatggttctctgtcacgcgtgacacggatcgaagagcgttaccgcccgtccatggaagggtacagagcgccctctaggcaggacgtgtatggcccacagccccaggtacgtgtaggcggctcttcagtcgaccttcacaggttccatcccgagccttatggcctggaagacgatcaacggtcaatgggatatgacgatcttgactatggcatgatgtctgattacggtaccgctagacggacaggaactccctcagaccccaggcgcaggctaaggagctacgaagacatgattggggaagaggttccttccgatcagtactactgggcacctttggcacagcatgagagaggctcactggcctctctcgacagccttagaaaaggagggccaccccccccaaattggagacagccagaattaccggaggtcatcgctatgcttggattccgactggacgccgtcaagtctaatgctgcagcctacctgcagcacctctgttaccgaaacgacaaggtcaagactgacgtaagaaagctgaaagggattcccgtcctcgtcgggctcctggatcaccctaagaaggaggttcacctcggagcatgtggggccctgaaaaatattagcttcggtcgtgaccaggacaacaaaatcgccatcaagaattgcgatggtgtgcccgcgctggtgagactgttgcgcaaagcccgggacatggatttaacagaggtcattaccggtacactgtggaacttaagctcccatgactctatcaaaatggaaatcgtggatcacgccctacacgcactgacggatgaggtcataatccctcattccgggtgggagcgggagcctaatgaggactgcaaacccaggcacatcgaatgggagtccgtgttaactaacacagccgggtgcctgaggaatgtgtctagcgaacgcagcgaagccagacggaaattaagggagtgtgacggcctggtagatgccctcatttttatcgtccaggcggagatcggacagaaagatagtgactccaagttagtcgagaattgcgtctgtctgcttaggaacctgtcatatcaagtgcatcgggagattccccaggccgaacggtaccaggaggccgcccctaacgtggccaacaatactggaccccacgcagcgtcttgctttggagccaagaagggtaaggacgaatggttctcccgggggaagaaacctattgaggatcccgctaatgatactgtggatttcccaaaacggactagcccagcccgagggtatgagttgcttttccagcctgaagtggtgagaatttatattagtcttctgaaagagtccaagacgccggccattctcgaagcctcggcaggggcgatccagaacttgtgcgcaggcaggtggacctacgggcgatacatccgctcagcgctgcgccaggaaaaagccctgagtgcaattgcagacctgctgacaaacgaacatgaaagagtcgtcaaggcagcctccggggccttgcgcaacctggctgtagacgctagaaacaaagaactgatcgggaaacatgctatccccaaccttgttaaaaacctccccgggggacagcagaatagtagctggaatttttccgaagacaccgtgatcagcattttgaacacaatcaacgaagtcattgccgaaaacctggaagcagccaagaagctcagggagactcagggcattgagaaacttgtgctcattaataaatcaggtaacaggtctgagaaggaggtgagagccgctgcgctcgtgctccaaactatctggggttataaagagctgcgtaaacccctggagaaagagggttggaaaaaatctgactttcaagtgaacctcaataatgcgtcccgatctcagtcctcccatagttatgatgatagtacgctgccattgattgataggaaccagaaatcagacaacaattatagcaccccaaatgaacggggggatcacaatcggacgctcgatagatcaggagacctgggcgacatggaacccttaaaggggacgacccccttgatgcaggacgaagggcaggagtcacttgaagaggaactggacgtgcttgtactagacgatgaaggaggacaggtgtcgtacccaagcatgcagaaaatctag

SEQ ID NO: 38019 - DNA, 2907 bp, Artificial Sequence
  derived and/or modified sequence
atggacgatagtgaggtggagagcacagcctccattctggcctccgtgaaagagcaggaggcacagttcgagaagctcacccgggccttagaagaggagagacggcatgtatctgcgcaattggagcgtgtgagagtctcaccccaagatgctaatccactgatggccaatggcaccctcacgagaaggcatcagaacggacgatttgttggagatgctgatttggaaagacagaagttcagtgacctgaagctgaatggaccccaggaccattcccatcttctctattccactattccacgcatgcaggaaccaggacagattgtagagacttatacagaggaagatccagaaggcgcaatgtcagtggtgagcgtggagacctccgatgacggtacgaccaggcggactgagacaacagttaaaaaagtggtaaaaacagtgacaactcgtactgtgcagccggttgcaatggggccagatggactgccagtggatgcctcgtcagtcagcaataactacattcaaaccctgggcagggatttcagaaagaacggcaatggcggacctggaccgtacgtgggccaggccggcacagcaaccctgccccgtaacttccattacccccccgacggctactctagacactatgaggatgggtaccctggtggttcagacaattacggtagcctgagccgggtaacaaggatagaagagagatatcggcccagtatggaaggatatagagctccaagccgtcaggacgtctatggccctcaaccacaggtgcgcgtgggaggtagcagcgtggaccttcatcgtttccaccccgagccttatggcctggaagatgaccagcgcagtatgggctacgatgatttagattacgggatgatgtctgattatgggactgcccgccgcacagggacaccttccgatcccagaaggcggctgcgcagctacgaggacatgattggtgaggaggtgcccagtgaccaatactactgggcgcccctggcccagcatgagagaggatcactagcctcattagacagtttgagaaaaggaggccccccccccccaaattggcgacaacctgaacttcctgaagtaatcgcgatgttagggttcaggctggacgcagtgaaaagcaatgcggctgcctacctacaacatctctgctatcgtaatgataaagtaaagacagatgttaggaaattgaaggggattcctgtgttggtaggcctgttggaccatcccaaaaaggaggtacacctgggagcatgtggggctctgaagaacatttcttttggcagagaccaagataacaaaatcgccatcaagaactgcgacggtgttccagcgcttgttagactattgcgaaaggcaagggacatggatttaaccgaggtaatcaccggaactctatggaatttaagcagccatgactccatcaagatggagattgtagaccatgccttacatgcgttgactgacgaagttatcatccctcattcgggatgggagcgagaaccaaacgaggactgcaaaccccggcatattgaatgggaaagtgtgctaactaacacagccggatgcctgcggaacgttagcagtgagcgatcggaagcgcgcaggaaattgcgcgagtgcgatgggctggtggacgcgttgatatttatcgtccaggcagagattggccagaaggatagcgactccaaacttgtggagaactgcgtctgcttacttcgtaatctgagctatcaagtgcacagagagatcccccaggccgaaagataccaggaggccgcacccaacgtggctaacaacacaggtccccatgccgcttcttgctttggagctaaaaagggtaaggacgaatggttctcgcgcggcaagaaaccaattgaggaccccgccaacgatacagtggatttcccaaagcgcaccagccctgcccgggggtacgagctgctctttcagccagaggttgtgcgaatctatatatccctcctgaaggaaagtaagactcccgctatactcgaggcatcagctggcgccatccagaatctgtgtgccggtagatggacctacggccgctacatccgatcagccctgcgtcaagaaaaagctctctccgccatcgccgatctgttaaccaacgagcacgaaagggtggtcaaagctgcctcgggggcactccgaaatctcgctgttgacgctagaaacaaggagcttattggaaagcacgccatccccaacctcgttaaaaatttgcctggcggacagcaaaattcctcttggaactttagcgaagacaccgtgatcagcatcctgaacacgatcaatgaagtcatcgccgagaacctagaagctgccaagaagctgcgtgaaactcaggggatagaaaaattagtattgattaataaatccggaaataggagcgaaaaagaagtgcgtgcggcagccttggtcttgcagactatttgggggtataaagaactgcggaaaccgctcgaaaaagagggatggaagaaatctgactttcaagtgaatctgaacaacgcaagccgcagccagtcctcacattcctatgacgactctacattacctctgatcgaccgaaaccagaagtctgataaaaagcccgatcgagaagagatacagatgagtaacatgggaagcaacaccaaatccttggataataactacagtacccccaacgagaggggggaccacaatcgcactctggacaggagcggtgacctgggtgacatggaaccgctcaaggggaccacaccgctcatgcaggacgagggtcaggagtccttggaagaggaactggacgtgttggtgctggacgatgaaggagggcaagttagctacccttcaatgcagaaaatttag

SEQ ID NO: 38020 - DNA, 2844 bp, Artificial Sequence
  derived and/or modified sequence
atggatgacagcgaggtggagagcacagccagcatcctggcctctgtgaaggagcaggaggcccagtttgagaagctgacccgggccctggaggaggagcggcggcacgtgtctgcccagctggagcgggtgcgggtgagcccccaggatgccaaccccctgatggccaacggcaccctgacccggcggcaccagaatggccgctttgtgggagatgctgacctggagcggcagaagttcagtgacctgaagctgaatggcccccaggaccacagccacctgctgtacagcaccatccccaggatgcaggagcccggccagatcgtggagacctacacagaagaagatcctgagggcgccatgtctgtggtgtctgtggagaccagtgatgatggcaccaccaggagaacagagaccaccgtgaagaaggtggtgaagacagtgaccaccaggacagtgcagcctgtggccatgggcccagatggcctgcctgtggatgccagctctgtgagcaacaactacatccagaccctgggccgggacttcaggaagaatggaaatggaggccctggcccctacgtgggccaggccggcacagccaccctgcccaggaacttccactaccccccagatggctacagccgccactatgaagatggctacccaggcggcagtgacaactacggcagcctgagccgggtgaccagaattgaggagcgctaccggcccagcatggagggctaccgggcccccagccggcaggatgtgtatggcccccagccccaggtgcgggtgggcggcagctctgtggacctgcaccgcttccaccctgagccctacggcctggaggatgaccagaggtccatgggctatgatgacctggactatggcatgatgtctgactatggaacagcccggaggacaggcacccccagcgacccccggcggcggctgcggagctatgaggacatgattggagaggaggtgcccagcgaccagtactactgggcccccctggcccagcacgagcggggcagcctggccagcctggacagcctgaggaaaggaggccccccaccacccaactggaggcagcctgagctgcctgaggtgattgccatgctgggcttccggctggatgctgtgaagagcaatgctgctgcctacctgcagcacctgtgctacagaaatgacaaggtgaagacagatgtgaggaagctgaagggcatccctgtgctggtgggcctgctggaccaccccaagaaggaggtgcacctgggcgcctgtggggccctgaagaacatcagctttggccgggaccaggacaacaagatcgccatcaagaactgtgatggagtgcctgccctggtgcggctgctgaggaaggcccgggacatggacctgacagaggtgatcaccggcaccctgtggaacctgagcagccatgacagcatcaagatggagatcgtggaccacgccctgcacgccctgacagatgaagtcatcatcccccacagcggctgggagcgggagcccaatgaagactgcaagcccaggcacatcgagtgggagagcgtgctgaccaacacagctggctgcctgagaaatgtgtcctctgagaggtctgaggcccggaggaagctgcgggagtgtgatggcctggtggatgccctgatcttcatcgtgcaggccgagatcggccagaaggacagcgacagcaagctggtggagaactgtgtgtgcctgctgaggaacctgagctaccaggtgcaccgggagatcccccaggccgagcgctaccaggaggccgcccccaacgtggccaacaacacaggcccccatgctgccagctgctttggagccaagaagggcaaggatgagtggttcagccggggcaagaagcccattgaagatcctgccaatgacacagtggacttccccaagaggaccagccctgcccggggctatgagctgctcttccagcctgaggtggtgcgcatctacatcagcctgctgaaggagagcaagaccccagccatcctggaggccagcgctggggccatccagaacctgtgtgccggccgctggacctacggccgctacatccgcagcgccctgcggcaggagaaggccctgagcgccatcgctgacctgctgaccaatgaacatgagcgggtggtgaaggccgccagcggggccctgaggaacctggccgtggatgccaggaacaaggagctgattggcaagcacgccatccccaacctggtgaagaacctgcccggcggccagcagaacagctcctggaacttcagcgaggacaccgtcatcagcatcctgaacaccatcaatgaggtgattgctgagaacctggaggccgccaagaagctgcgggagacccagggcatcgagaagctggtgctgatcaacaagagcggcaacagaagtgagaaggaggtgcgggccgccgccctggtgctgcagaccatctggggctacaaggagctgaggaagcccctggagaaggagggctggaagaagagtgacttccaggtgaacctgaacaatgccagccgcagccagagcagccacagctatgatgacagcaccctgcccctgattgacaggaaccagaagagtgacaacaactacagcaccccaaatgaaagaggagaccacaacagaaccctggacagaagtggggacctgggggacatggagcccctgaagggcaccacccccctgatgcaggatgagggccaggagagcctggaggaggagctggatgtgctggtgctggatgatgagggcggccaggtgtcctaccccagcatgcagaagatctag

SEQ ID NO: 38021 - DNA, 2907 bp, Artificial Sequence
  derived and/or modified sequence
atggatgacagcgaggtggagagcacagccagcatcctggcctctgtgaaggagcaggaggcccagtttgagaagctgacccgggccctggaggaggagcggcggcacgtgtctgcccagctggagcgggtgcgggtgagcccccaggatgccaaccccctgatggccaacggcaccctgacccggcggcaccagaatggccgctttgtgggagatgctgacctggagcggcagaagttcagtgacctgaagctgaatggcccccaggaccacagccacctgctgtacagcaccatccccaggatgcaggagcccggccagatcgtggagacctacacagaagaagatcctgagggcgccatgtctgtggtgtctgtggagaccagtgatgatggcaccaccaggagaacagagaccaccgtgaagaaggtggtgaagacagtgaccaccaggacagtgcagcctgtggccatgggcccagatggcctgcctgtggatgccagctctgtgagcaacaactacatccagaccctgggccgggacttcaggaagaatggaaatggaggccctggcccctacgtgggccaggccggcacagccaccctgcccaggaacttccactaccccccagatggctacagccgccactatgaagatggctacccaggcggcagtgacaactacggcagcctgagccgggtgaccagaattgaggagcgctaccggcccagcatggagggctaccgggcccccagccggcaggatgtgtatggcccccagccccaggtgcgggtgggcggcagctctgtggacctgcaccgcttccaccctgagccctacggcctggaggatgaccagaggtccatgggctatgatgacctggactatggcatgatgtctgactatggaacagcccggaggacaggcacccccagcgacccccggcggcggctgcggagctatgaggacatgattggagaggaggtgcccagcgaccagtactactgggcccccctggcccagcacgagcggggcagcctggccagcctggacagcctgaggaaaggaggccccccaccacccaactggaggcagcctgagctgcctgaggtgattgccatgctgggcttccggctggatgctgtgaagagcaatgctgctgcctacctgcagcacctgtgctacagaaatgacaaggtgaagacagatgtgaggaagctgaagggcatccctgtgctggtgggcctgctggaccaccccaagaaggaggtgcacctgggcgcctgtggggccctgaagaacatcagctttggccgggaccaggacaacaagatcgccatcaagaactgtgatggagtgcctgccctggtgcggctgctgaggaaggcccgggacatggacctgacagaggtgatcaccggcaccctgtggaacctgagcagccatgacagcatcaagatggagatcgtggaccacgccctgcacgccctgacagatgaagtcatcatcccccacagcggctgggagcgggagcccaatgaagactgcaagcccaggcacatcgagtgggagagcgtgctgaccaacacagctggctgcctgagaaatgtgtcctctgagaggtctgaggcccggaggaagctgcgggagtgtgatggcctggtggatgccctgatcttcatcgtgcaggccgagatcggccagaaggacagcgacagcaagctggtggagaactgtgtgtgcctgctgaggaacctgagctaccaggtgcaccgggagatcccccaggccgagcgctaccaggaggccgcccccaacgtggccaacaacacaggcccccatgctgccagctgctttggagccaagaagggcaaggatgagtggttcagccggggcaagaagcccattgaagatcctgccaatgacacagtggacttccccaagaggaccagccctgcccggggctatgagctgctcttccagcctgaggtggtgcgcatctacatcagcctgctgaaggagagcaagaccccagccatcctggaggccagcgctggggccatccagaacctgtgtgccggccgctggacctacggccgctacatccgcagcgccctgcggcaggagaaggccctgagcgccatcgctgacctgctgaccaatgaacatgagcgggtggtgaaggccgccagcggggccctgaggaacctggccgtggatgccaggaacaaggagctgattggcaagcacgccatccccaacctggtgaagaacctgcccggcggccagcagaacagctcctggaacttcagcgaggacaccgtcatcagcatcctgaacaccatcaatgaggtgattgctgagaacctggaggccgccaagaagctgcgggagacccagggcatcgagaagctggtgctgatcaacaagagcggcaacagaagtgagaaggaggtgcgggccgccgccctggtgctgcagaccatctggggctacaaggagctgaggaagcccctggagaaggagggctggaagaagagtgacttccaggtgaacctgaacaatgccagccgcagccagagcagccacagctatgatgacagcaccctgcccctgattgacaggaaccagaagagtgacaagaagccagaccgggaggagatccagatgagcaacatgggcagcaacaccaagagcctggacaacaactacagcaccccaaatgaaagaggagaccacaacagaaccctggacagaagtggggacctgggggacatggagcccctgaagggcaccacccccctgatgcaggatgagggccaggagagcctggaggaggagctggatgtgctggtgctggatgatgaaggaggccaggtgtcctaccccagcatgcagaagatctag

SEQ ID NO: 38022 - DNA, 2844 bp, Artificial Sequence
  derived and/or modified sequence
atggacgacagcgaggtggagagcaccgccagcatcctggccagcgttaaggaacaagaagctcagttcgaaaagctgaccagggccctcgaggaggagcgcaggcatgtgagtgcccagcttgagcgcgtgcgggtgtctcctcaagatgctaatccgctgatggcaaacggtacactgacacggcgccaccaaaacggcaggttcgtcggcgacgcagatctggagcgccagaagttttctgaccttaaactgaacgggccccaagaccatagtcatctgctgtacagcacaatccccaggatgcaggaaccagggcagatagtggagacgtacacagaggaggaccccgagggagcgatgagtgtggtgtctgttgagacctccgacgatgggactacgcggcgcaccgaaaccaccgtgaagaaagtggtgaagacagttacaactaggacggtccagccagtagctatgggtcctgacggtcttccagtggacgccagtagtgtgagcaataactacatccagacccttggacgtgactttcgcaagaacggtaacgggggaccagggccatatgttggtcaagcgggaaccgctacactgccccgaaatttccactatcctcccgatgggtattcccggcactatgaagatggttaccccggcgggagcgacaactacggttccctgagtagggtgactaggattgaagagcgctatcgaccttcaatggaaggctatcgagcacctagcaggcaggacgtatatggccctcagcctcaagtacgcgttgggggaagctcagtggacctgcatcgcttccaccctgaaccttatggattggaagacgatcagaggagcatgggctacgatgatcttgactatgggatgatgtctgactatgggaccgctagaagaaccggcacaccctcagacccaagacgcagactgaggtcctacgaagacatgatcggagaggaagtgccatctgatcaatactattgggcacccctagcccagcacgagcgcggcagtttggcctcattggacagcctaagaaagggggggcccccgcctcctaactggcggcagcctgagctgccagaagtgattgcgatgctgggttttcgtttggatgccgttaagtctaatgctgcagcatacctgcaacatctgtgttacagaaacgacaaggtgaaaaccgatgtgcgaaagcttaaaggcattccagtcctcgtcggattgcttgaccaccctaaaaaggaggtccacctaggcgcgtgcggcgccttgaagaacatctccttcggtcgcgaccaggataacaagatcgctattaagaactgtgacggagtacccgccctggtgaggctcttgcgaaaagcccgcgacatggatctcactgaggtcatcaccggaactctgtggaatctgagcagtcatgattccatcaagatggagatcgtcgaccatgcgctacacgccctgacagatgaggtgataatccctcactcagggtgggagagagagcccaacgaggattgcaagcccagacacattgagtgggaatccgtacttactaacaccgctggatgtctgcggaatgtatcttccgaaaggagtgaggcgcggagaaagttaagagaatgcgatggactggtggatgcactgatttttattgtgcaggccgagataggacaaaaagacagcgactccaaacttgtcgaaaattgcgtttgcctgttgagaaacttgtcttaccaggtgcatcgcgaaattccgcaggctgagcgctatcaagaggcagcaccgaacgtcgccaataatacagggcctcacgctgcttcctgcttcggcgcaaaaaagggcaaggacgaatggttttctagaggcaagaagcccattgaggaccctgccaacgatactgtagatttcccaaaacgcacctcccctgctaggggctatgagctcttattccaacctgaagtagtgcggatttatatcagtctcctgaaggaatctaagaccccggccatcttagaggcatctgcgggagctatccagaatctgtgtgcaggacgttggacatacggacggtatattaggagtgcactccggcaggagaaagctctaagtgcaatcgcagatctactcaccaatgagcacgaacgcgtcgtcaaagctgcgagcggggccctcaggaatttggcagtggatgcaagaaataaggagctcattggcaaacatgcaattcctaacctcgtgaaaaaccttcctggcggccaacagaacagctcctggaactttagcgaagatacagttatcagcatacttaacaccattaatgaagttatagctgagaatctcgaagcggccaaaaaattgagagaaacacagggaattgaaaagttagtgctaatcaacaagtccggtaaccgcagcgagaaagaggtccgcgcagcagcactggtgctacagactatatgggggtacaaagaactccggaagcctctggaaaaagagggatggaaaaagagcgatttccaggtcaacctgaacaatgcatcgagatctcagtcttctcactcgtacgacgactccactctgcctttgattgataggaaccaaaagtctgacaacaactactccaccccaaatgagcgcggggaccacaaccggactttggatagatcaggggacctgggcgacatggagcctcttaaaggaactactcctctgatgcaggacgagggccaggaatctctggaagaggaactggatgtgcttgtactcgacgatgaaggaggacaggtctcctacccgtcaatgcagaagatctag

SEQ ID NO: 38023 - DNA, 2907 bp, Artificial Sequence
  derived and/or modified sequence
atggacgacagcgaggtggagagcaccgccagcatcctggccagcgtgaaggagcaggaagctcagtttgaaaagctcacccgcgctctggaggaggagaggcggcacgtgagcgcccagttggagcgcgtccgagtgtccccgcaggacgctaacccccttatggccaacggcacgctgacacgtaggcatcagaatggacgattcgtcggtgatgctgacctggaaagacagaagttttctgatctcaaactaaatgggcctcaagaccattcccacctgctctattctacaattcctaggatgcaggagccgggccaaatcgtcgagacatataccgaggaagacccagagggggctatgtctgtcgtctctgtggaaacgtccgacgacggtacaacccgcaggacagaaacaaccgtgaagaaggtggtaaagactgtgactacccgtaccgttcagccagtggcaatgggtcctgacggccttcccgtcgatgcctcgtccgttagtaacaattatattcagacgttgggacgggactttcgcaaaaacggcaatggcggccccggaccctatgtagggcaggcaggcacagccacgcttccgcgaaatttccattatccccccgacggatatagtcggcactatgaggatggatatccgggagggtcagacaactacggaagtctgtctcgggtaacaaggatcgaggaacggtatagaccctccatggaaggttacagagctccttcccgccaagacgtttatggcccccaaccgcaggttcgtgtcgggggctcttcagtggacctgcatcgttttcatcctgaaccctacggccttgaggacgatcagagatctatgggatacgatgatctggactacgggatgatgtccgactacggcaccgcccgccgcaccgggacgccctcagacccacggcgccggctccgatcttacgaagatatgattggtgaagaggttccaagtgaccagtattactgggccccactcgcccaacatgagcggggtagcctggcgagtctcgactctcttcgcaaaggaggaccccctcccccaaattggcgccaacccgaactgccagaagtgattgctatgctcggtttccggctggacgccgtgaagagtaacgcagcggcgtacctccagcatctgtgctacaggaatgacaaggtgaaaacagacgtgcgcaaactgaagggcatccccgtcttggtgggactcctggatcaccctaagaaagaggtgcatctcggtgcctgcggagcgcttaaaaacatttcctttggaagggatcaggacaataagatagctattaagaattgtgacggcgtgcccgccctggtacgcctgctaagaaaggcccgagacatggacctcacagaagtgataaccgggacattatggaacctttctagccacgacagcatcaagatggaaatcgtagaccacgcactgcatgctcttaccgatgaggtaattatcccccactccgggtgggaacgcgagcccaatgaggattgtaaaccccgtcacatcgaatgggagagcgtgcttacgaatacagcaggttgcctccgcaacgtttcaagcgagcggtctgaagcccgacgaaaattaagggagtgtgacggtctggtcgatgctctaatattcatcgtgcaggctgaaattgggcagaaggattcggattccaagctggtagagaattgtgtttgtcttctgaggaatctgagttatcaagtccatcgggaaattccccaggccgaacgataccaagaggccgctccaaatgtagcgaataataccggcccacacgccgcttcatgcttcggggctaaaaagggaaaggatgaatggttctctcggggcaagaagccaatcgaggacccagctaatgacacagtggactttccaaagaggacatcaccagctcgtgggtatgaacttctgttccaacctgaggttgtgcgaatttacataagcctgctgaaggagtcaaagactcccgccatcctggaagcctctgcgggggccattcagaacctttgcgccggacggtggacatatggtcgctatatccgttctgccctgcgccaggagaaggccctgagcgctattgcagacttgctaaccaacgagcatgaacgggtggtcaaggcagcatctggggcactgcgcaaccttgcagtggacgcgagaaacaaggaacttatcggtaaacacgcaattcccaatctagtgaagaacctcccaggggggcagcagaattcttcctggaatttctctgaggatactgtgatttccattctgaacaccatcaacgaagtgattgcagagaatttggaggcagccaagaaattaagagagacacaagggatagagaaattagtcctgattaataaatcgggcaataggtccgagaaagaagtgagggccgcagctctggtcctccagaccatctgggggtataaggagctgcgaaagccactcgaaaaagaaggatggaaaaagagcgattttcaggttaatcttaataatgcaagcaggtcgcagtcatcccatagctacgatgactccactctgcctttaatcgaccggaaccagaaaagcgacaagaagccagatagagaggagattcaaatgagtaatatgggaagcaatactaagagcctggataataactactctacacccaacgagaggggtgaccacaaccgtaccctcgacaggagcggcgatttgggggatatggagcctctaaagggaaccacgccgctcatgcaggacgaaggacaagagagtcttgaggaagaactggatgtgttggtgttggacgatgagggcgggcaggttagctatccctctatgcagaagatctag

SEQ ID NO: 38024 - DNA, 2844 bp, Artificial Sequence
  derived and/or modified sequence
atggacgactccgaggtggaatccacagcttcaatactggcctccgtgaaagaacaggaggcccagttcgagaaacttactcgcgctttggaagaggaacgcaggcatgtgtctgcccagttggagcgagtgcgggtgagtccacaggatgccaacccactgatggctaacggtacccttacaaggaggcatcagaatggaaggttcgttggcgacgccgaccttgaacgacagaaattcagcgacctgaagctgaatggaccacaggatcatagccatctgctttatagcacaattcctcggatgcaggagccgggtcagatcgtggagacctacactgaagaagatccagagggggcaatgagcgtcgtatctgtggagacctctgatgatggtactacaaggcggacagagactacagtgaagaaggtagtcaaaaccgtgaccacacgaaccgtccaaccagtggccatgggacccgatggacttcctgtagacgcttcctccgtgtccaataactatattcagaccttggggagagacttccggaaaaatggtaacggtggtcctggcccatatgttgggcaggccggaaccgccaccctcccacggaacttccactacccccctgacggctactcacgccattacgaggacggatatccaggcggaagcgacaactacggtagtctgtcccgcgtgacccgcattgaggaacgctaccgccctagcatggaaggctacagagcccctagtcgccaagatgtgtatggcccacaaccacaggtgcgcgttggagggagcagtgtggatttgcatcgctttcatcccgaaccgtatggtttagaggatgaccagagatcaatgggctacgatgacctggactatgggatgatgtcagattacggcacagccagacgcacgggaaccccctctgatccacgtcgacggttaagatcatacgaagacatgatcggggaggaggtccccagtgatcagtactactgggccccactggcacagcacgagagaggatctctggcctccctggactccctgcgaaaaggtggaccacctcccccaaattggcgccagcccgagcttcccgaggtgattgcgatgttaggatttaggttagacgcagtgaagtctaatgccgctgcatatctacagcatttgtgttacaggaatgataaggtgaaaacagatgtacgaaagcttaaaggtattccagttcttgtggggcttctagaccacccgaagaaagaggtccatctgggcgcttgtggtgcactgaagaatataagctttggacgcgaccaggacaataagattgcaattaagaattgtgacggcgtgcccgctttggttcggctgctgcggaaggcgcgagacatggatctgaccgaggtgatcactggaacactgtggaacctcagctcccacgactctatcaaaatggagattgtggatcacgcactgcacgcccttactgacgaagtgatcatcccgcacagcgggtgggagcgcgaaccgaacgaggactgcaaacccaggcatattgagtgggagtctgtcctgacgaatacagcgggttgccttcgaaatgttagctccgagcggtccgaggcaaggaggaaacttagggagtgtgatggtctggttgacgccctcattttcatcgtccaggccgaaatcggtcaaaaggattctgattcaaagttagtggaaaattgcgtgtgcctgttgaggaatttaagctaccaggttcacagggaaatcccccaggcagaacgctatcaggaagcggctccgaacgtggcgaataacaccgggcctcacgcggcttcatgcttcggagccaagaaggggaaggacgagtggttctctaggggaaaaaaacccatcgaggacccggcaaatgataccgtagatttccctaagaggacctcccccgcaagaggttacgagctgctgttccagcccgaggtggtgagaatttatatatctctgttgaaggaaagcaaaacccccgcaattcttgaggcttcagccggtgcgattcagaatctgtgcgcgggaaggtggacttacggacggtacatccggagtgctctgagacaggaaaaggctctgtccgccatagccgatttattaactaatgagcacgagagagtcgttaaggccgctagcggagccctgcgtaacctggcagtagatgcgaggaacaaagaactgataggaaagcacgcaatcccaaatctagttaagaatctcccagggggacagcaaaattcctcgtggaattttagcgaggatacagtgatctctattctgaacactattaacgaggtcattgctgagaacctggaagcagctaagaaactgagggaaacgcaaggcatcgaaaagcttgtgttgataaataagagcggaaatcgctcagaaaaagaggtcagagctgcagctctcgtgctgcagacaatttgggggtacaaggaactccgcaagcccctggaaaaagagggatggaaaaagagcgactttcaagtcaacctgaataatgcctcccggtcacaatcatcccacagttacgacgactctaccctccctctcatcgaccgtaatcaaaaatctgataataactacagcactcctaacgagaggggagaccacaacaggaccttagacaggtccggggatctgggcgacatggaaccattaaagggcacaaccccactgatgcaggacgaaggacaggagagccttgaggaggaactcgacgtgcttgtgctggacgacgaaggaggccaggtgagttacccgtctatgcagaaaatctag

SEQ ID NO: 38025 - DNA, 2907 bp, Artificial Sequence
  derived and/or modified sequence
atggatgatagcgaggtggagtcaaccgcttccatcctggctagcgtgaaggaacaagaagctcaattcgaaaagttaacccgggctctcgaggaggagagaagacacgtgagcgcccaattggagcgggtgagggttagccctcaagacgccaaccccttaatggcaaatgggaccctgacaaggcgccaccagaacggaaggttcgtcggagacgcagacctggaacggcaaaagttctcagacctgaagttaaatggtccccaagaccactcccatcttctgtatagtacaatcccacgcatgcaagagcctggacagatcgtcgagacttacaccgaagaggaccccgaaggtgctatgtccgtggtcagcgtggaaacttctgatgatggtactacgaggcgcactgaaacaacggtgaaaaaggtggtgaaaaccgtgaccactcggacagtgcagccagtcgcaatgggtcccgacggattgccggtggatgccagctctgtatccaacaattatatccaaaccctgggcagggatttccgaaagaatggcaacggaggccctggtccgtatgtagggcaggctggcaccgccacgctaccgaggaacttccactatccacctgatggatacagtcgccactatgaggatggttatcccggtggtagtgataactatggatccttgagccgcgtgactcggattgaggaacggtatagaccttccatggaaggatatcgggctcccagccgccaggacgtttacggcccacagcctcaggtgcgtgtgggaggaagctcagtggacttgcaccggttccatccagagccctacggtctcgaggacgaccaaagatccatggggtatgacgatctggactatgggatgatgagcgactatggtactgcacgaagaacaggcaccccctcggatccgcgacgtcgtctgcgttcttacgaggatatgataggcgaagaggtgccaagtgatcagtactactgggcccctctggcacagcacgagagaggtagcctagcctcgctcgacagcctgagaaagggcggaccgccaccacccaactggaggcagcctgagctcccagaggtgatagcaatgctgggttttaggctcgacgccgtgaagagcaacgctgctgcctatctccagcatttgtgctaccgaaatgataaggtcaagaccgacgtgcggaaactgaaaggaatcccggtgctggtcggtttgctcgatcaccctaaaaaagaggtccacttgggggcatgcggcgctttaaagaacattagcttcggaagggatcaggacaataagatcgccataaaaaactgtgatggcgttcccgcattggtccgcctgctaaggaaggctcgagatatggaccttaccgaggtcataacaggaacgctgtggaatctatcttctcatgactccattaagatggaaatcgtcgaccatgcactacatgcattgactgatgaagtgataataccccatagcggttgggagcgggagcctaatgaagattgcaagccgaggcacattgagtgggagtcagttcttacgaatacagctgggtgcctgcggaatgtctcttctgaacgcagcgaggccaggaggaagctgcgcgagtgtgacggccttgtggatgcccttattttcatcgttcaggcggaaattggacagaaagactcagactcaaagctcgtcgagaactgtgtatgcttgctgcgcaatctgagctaccaggtacatcgcgagataccacaggcagagcggtaccaggaggccgcacctaatgtggctaacaataccggtccccacgcagcatcatgctttggggcaaagaagggcaaggatgaatggtttagtaggggaaagaaaccaattgaggacccagccaacgatactgttgactttcccaagagaacttcccctgccagagggtacgaactgctattccagccggaggtggtgcgcatttatatttctttgcttaaggaaagcaaaacgcccgctattcttgaggcaagcgctggagcaatccagaacctgtgcgctggacggtggacctacggccgatatattcgatcagctctccgacaggagaaggctctgtcagcgatcgctgacctgctcaccaacgagcatgaaagggtcgttaaagcagctagcggagccttaaggaacctcgcagttgatgcacgcaacaaagaactgatcggtaagcatgcaatcccaaatctcgtcaaaaatcttcctggtggtcagcaaaactcttcttggaatttcagcgaggacacagttatcagcatcctaaacaccatcaatgaagttatcgccgagaacctggaggcggctaaaaaactccgggagacacagggaatcgagaagctggtgttaattaataagagcgggaatcgaagcgagaaggaagtccgggcagctgctctggtgctacaaaccatctggggatataaagagttgcgcaagcccctggaaaaagagggctggaaaaagtccgattttcaggttaatctgaataatgcaagccgttcccaatcttcccatagttatgacgactccacattgccactcatagatagaaaccagaagagtgacaagaaacccgatagggaggaaatccagatgtcaaacatggggagcaacaccaagtccctggacaataactacagtaccccgaacgaaagaggggatcacaacaggactcttgaccggagtggagacctgggagatatggagccacttaagggaacaacacctcttatgcaagatgagggccaagagtcattggaggaggagttagatgtgcttgtgttggacgatgagggaggccaggtcagttacccgtctatgcaaaagatctag

SEQ ID NO: 38026 - DNA, 6286 bp, Artificial Sequence
  derived and/or modified sequence
ggctgacatcacttaggaaagcgaagggggtagggctgccagatcagtttgtcaccacccaggctcccttgcctttggctgggtgcaacttccattttaggtgttggatctgagggggaaaaaaaagagagagggagagagagagaaagaagagcaggaaagatcccgaaaggaggaagaggtggcgaaaaatcaactgccctgctggatttgtctttctcagcaccttggcgaagccttgggtttctttcttaaaggactgatttttagaactccacatttgaggtgtgtggcttttgaagaaaatgtatgtactgacgggaaaaggaggataagcaagtcgaatttttgtcttacgctctctccttcctgcttcctccttgctgtggtggctgggatgcttcttccatgattttttgaatctagactgggctgttctctgtgttaaaccaatcagttgcgaccttctcttaacagtgtgaagtgagggggtctctctccctccttctccttcctctgtgattcaccttcctttttaccctgccctgcggcggctccgccccttaccttcatggacgactcagaggtggagtcgaccgccagcatcttggcctctgtgaaggaacaagaggcccagtttgagaagctgacccgggcgctggaggaggaacggcgccacgtctcggcgcagctggaacgcgtccgggtctcaccacaagatgccaacccactcatggccaacggcacactcacccgccggcatcagaacggccggtttgtgggcgatgctgaccttgaaagacagaaattttcagatttgaaactcaacggaccccaggatcacagtcaccttctatatagcaccatccccaggatgcaggagccggggcagattgtggagacctacacggaggaggatcctgagggagccatgtctgtagtctctgtggagacctcagatgatgggaccactcggcgcacagagaccacggtcaagaaagtagtgaagactgtgacaacacggacagtacagccagtcgctatgggaccagacgggttgcctgtggatgcttcatcagtttctaacaactatatccagactttgggtcgtgatttccgcaagaatggcaatgggggacctggtccctatgtggggcaagctggcactgctacccttcctaggaacttccactaccctcctgatggttatagtcgccactatgaagatggttatccaggtggcagtgataactatggcagtctgtcccgggtgacccgcattgaggagcggtataggcccagcatggaaggctaccgggcacctagtagacaggatgtgtatgggccccaaccccaggttcgggtaggtgggagcagcgtggatctgcatcgctttcatccagagccttatgggctagaggatgaccagcgtagtatgggctatgatgacctggattatggtatgatgtctgattatggcactgcccgtcggactgggacaccctctgaccctcgtcggcgcctcaggagctatgaagacatgattggtgaggaggtgccatcggatcaatactactgggctcctttggcccagcatgagcgaggaagtttagcaagcttggatagcctgcgcaaaggagggcctccacctcctaattggagacagccagagctgccagaggtgatcgccatgcttggattccgcttggatgctgtcaagtccaatgcagctgcatacctgcaacacttatgctaccgcaatgacaaggtgaagactgacgtgcggaagctcaagggcatcccagtactggtgggattgttagaccatcccaaaaaggaagtgcaccttggagcctgtggagctctcaagaatatctcttttggacgtgaccaggataacaagattgccataaaaaactgtgatggtgtgcctgcccttgtgcgattgcttcgaaaggctcgtgatatggaccttactgaagttattaccggaaccctgtggaatctttcatcccatgactcaatcaaaatggagattgtggaccatgcactgcatgccttgacagatgaagtgatcattcctcattctggttgggagcgggaacctaatgaagactgtaagccacgccacattgagtgggaatcggtgctcaccaacacagctggctgccttaggaatgtaagctcagagaggagtgaagctcgccggaaacttcgggaatgtgatggtttagttgatgccctcattttcattgttcaggctgagattgggcagaaggattcagacagcaagcttgtagagaactgtgtttgccttcttcggaacttatcatatcaagttcaccgggagatcccacaggcagagcgttaccaagaggcagctcccaatgttgccaacaatactgggccacatgctgccagttgctttggggccaagaagggcaaagatgagtggttctccagagggaaaaaacctatagaggatccagcaaacgatacagtggatttccctaaaagaacgagtccagctcgaggctatgagctcttatttcagccagaggtggttcggatatacatctcacttcttaaggagagcaagactcctgccatcctagaagcctcagctggagctatccagaacttgtgtgctgggcgctggacgtatggtcgatacatccgctctgctctgcgtcaagagaaggctctttctgccatagctgacctcctgactaatgaacatgaacgggtggtgaaagctgcatctggagcactgagaaacctggctgtggatgctcgcaacaaagaattaattggtaaacatgctattcctaacttggtaaagaatctgccaggaggacagcagaactcctcttggaatttctctgaggacactgtcatctctattttgaacactatcaacgaggttatcgctgagaacttggaggctgccaaaaagcttcgagagacacagggtattgagaagctggtgttgatcaacaaatcagggaaccgctcagaaaaagaagttcgagcagcagcacttgtattacagacaatctggggatataaggaactgcggaagccactggaaaaagaaggatggaagaaatcagactttcaggtgaatctaaacaatgcttcccgaagccagagcagtcattcatatgatgatagtactctccctctcattgaccggaaccaaaaatcagataacaactattccacaccaaatgagagaggagaccacaatagaacactggatcgatcgggggatctaggcgacatggagccattgaagggaacaacacccttgatgcaggacgaggggcaggaatctctggaggaagagttggatgtgttggttttggatgatgaggggggccaagtgtcttacccctccatgcagaagatttagcaccactatctccgttccatctgggcttatatgtacttttattttttggtggtgaaattgactgatgattttcctttttcttcgctggactattgtgccaactgccaggctgcctcctgcccttacagccctaagtggctgccttctttccatcaactcccaacttcttcctgtgaagtttaattgtctcaacgcctccccctcccccattccctccatttttctcccaagaaacctgactcaattatttgcatattttgagaaactgctgcagattagttctttttgccagttttccctggaactcctggccttttgtggaggggagggatggagagaataggaatcttcactagaagccgtgggaagaattggaagttacatgctgtatatgcaatgtccagcagtctgataaactgacgattcttaatcaagatttttttcctgatggggaagggacttttattttcttttagagaggggaaagtgtgagctcttcccttattcctaatggctatttttgaagcaaagaaggccagcaacattggcacatgccacctggcaaaggacccttgagtaagtgaaggtctcctaaaactgggattaagaaaccttgctctcctcatctccaaggcagggaccatcaagaacctacagactccatctcttctgcaagcctcatgccaaccctgggctattgctgctgccccttaaacacaggctgtccttaacccacctctcctgccctgtgatatgtctgctgagttggcctggccatttccaagaggctgtagaaaggggagaatgtcaaggaagacttttggtagagaaggagcagaaagatgtgtttttgggaagaagaagacctctaggaggagctagtaggaatgtacatgaagcaattagtctgaaactggcttccccactcccccgtttctccttttcctatccttataggcctgtcccttgcctctgccctggattggttggcaaactaaaggacttgatgtacataactcctgtcccttttcccttacaaggtggggattgcccctggctttgcctcttctttgtgcctttggcctggggtgcatctcctcccgcccttccatgtgcctttctttgcctctgcagtctcatttctcataattttgcaaattatattttgttgctttcttacctactattggccctaaatagcagaaagaagagaagtgaccgagagaacctcagattcttcattgaggattggtatagccatgatttcagtcatagcaagcttttgctcaacagcatatgggtgggattttgcaaaaatcctattctgatgaatctcaaagtaaggctggtaagagaagtgagtggtgtgactcttactccttaggtgcccagaatttaccatcatctctgaaggagttacagggaagtggtctccccaattctcccctccctccagtattgccccctctcactttagcatatattaattagcaggttgggctagagaaatcagctgctatgcgggttgattattattattatttctaatccttttccttatttgccttctactccccttaatctaatctaaaagctctgttccatgcaactggagttccttatccctctcttccccttcccttatatattgaggctatggggtaggagaaaagtgcacaacccaccaccccctttactcgtgcattaaaatttcttatttacccttttcccccttcccatttcttcccactttcatctaccttttctggcaaaaaggagccttttgctctctgtgaccctaagagcacactgcacagggaaaattgccccatccagacctggctccactcttgatctctcttgtcctcttctgctcttttcctggtgctcttttttctcggtggggtgtgggtaatagaacagccgtgggcttttggggacctttaacttttttttctctcttttgtttataaaaaacactaaacattcaattccagagaaccaaaaatcccaccttcccaccgaacactactaaggggcttgtgttctgctccataccttttctcttttctttctgtcttgttaatgcttttaaaaacaaatgagttttttatataaataaagtttttaaagtgtgtatgtggggggtctgtgtcatttcttcacttcaagctgttatttcttccctgctttgcatctttgttacttccttatgtatcagtgtcctttccagagcaaccagaaggaggttataccaggatttattttgagctcagccccaactctttatcaagcaacattcttgttaactatatgtgaaacattttttcttctgaagattcttaaaaattgaatgtggctgaagttgaacatgggagcttattgctaatttagagataggaaactgaagcataaagaattaatgacttactttaattactggaattcttctgcaacatttgacaaaactaaccttgaataaggcccactgtaatacgtagctctcttaaatataacacttaggactagaagattagaaactaccaatcccaactacgtaataggaaaatgtaggatcaaaaggcccatgtatataagtactgaccactgggccataatgttgcttctcaggctatatgcagtcctttagtcagaagtcaataggcctatttattaatattttacagaccatattacctggattaccagggactatctttgctgcagagatcaagggttaagatctatgggaagatacttatttttctgaggtccttatgtcctgtcatataattaaagactcaagagaatttatgtgaaatgctttctgtatgcccaaatctttagattaaaattatatagctgctcctg

SEQ ID NO: 38027 - DNA, 6313 bp, Artificial Sequence
  derived and/or modified sequence
ctgccagatcagtttgtcaccacccaggctcccttgcctttggctgggtgcaacttccattttaggtgttggatctgagggggaaaaaaaagagagagggagagagagagaaagaagagcaggaaagatcccgaaaggaggaagaggtggcgaaaaatcaactgccctgctggatttgtctttctcagcaccttggcgaagccttgggtttctttcttaaaggactgatttttagaactccacatttgaggtgtgtggcttttgaagaaaatgtatgtactgacgggaaaaggaggataagcaagtcgaatttttgtcttacgctctctccttcctgcttcctccttgctgtggtggctgggatgcttcttccatgattttttgaatctagactgggctgttctctgtgttaaaccaatcagttgcgaccttctcttaacagtgtgaagtgagggggtctctctccctccttctccttcctctgtgattcaccttcctttttaccctgccctgcggcggctccgccccttaccttcatggacgactcagaggtggagtcgaccgccagcatcttggcctctgtgaaggaacaagaggcccagtttgagaagctgacccgggcgctggaggaggaacggcgccacgtctcggcgcagctggaacgcgtccgggtctcaccacaagatgccaacccactcatggccaacggcacactcacccgccggcatcagaacggccggtttgtgggcgatgctgaccttgaaagacagaaattttcagatttgaaactcaacggaccccaggatcacagtcaccttctatatagcaccatccccaggatgcaggagccggggcagattgtggagacctacacggaggaggatcctgagggagccatgtctgtagtctctgtggagacctcagatgatgggaccactcggcgcacagagaccacggtcaagaaagtagtgaagactgtgacaacacggacagtacagccagtcgctatgggaccagacgggttgcctgtggatgcttcatcagtttctaacaactatatccagactttgggtcgtgatttccgcaagaatggcaatgggggacctggtccctatgtggggcaagctggcactgctacccttcctaggaacttccactaccctcctgatggttatagtcgccactatgaagatggttatccaggtggcagtgataactatggcagtctgtcccgggtgacccgcattgaggagcggtataggcccagcatggaaggctaccgggcacctagtagacaggatgtgtatgggccccaaccccaggttcgggtaggtgggagcagcgtggatctgcatcgctttcatccagagccttatgggctagaggatgaccagcgtagtatgggctatgatgacctggattatggtatgatgtctgattatggcactgcccgtcggactgggacaccctctgaccctcgtcggcgcctcaggagctatgaagacatgattggtgaggaggtgccatcggatcaatactactgggctcctttggcccagcatgagcgaggaagtttagcaagcttggatagcctgcgcaaaggagggcctccacctcctaattggagacagccagagctgccagaggtgatcgccatgcttggattccgcttggatgctgtcaagtccaatgcagctgcatacctgcaacacttatgctaccgcaatgacaaggtgaagactgacgtgcggaagctcaagggcatcccagtactggtgggattgttagaccatcccaaaaaggaagtgcaccttggagcctgtggagctctcaagaatatctcttttggacgtgaccaggataacaagattgccataaaaaactgtgatggtgtgcctgcccttgtgcgattgcttcgaaaggctcgtgatatggaccttactgaagttattaccggaaccctgtggaatctttcatcccatgactcaatcaaaatggagattgtggaccatgcactgcatgccttgacagatgaagtgatcattcctcattctggttgggagcgggaacctaatgaagactgtaagccacgccacattgagtgggaatcggtgctcaccaacacagctggctgccttaggaatgtaagctcagagaggagtgaagctcgccggaaacttcgggaatgtgatggtttagttgatgccctcattttcattgttcaggctgagattgggcagaaggattcagacagcaagcttgtagagaactgtgtttgccttcttcggaacttatcatatcaagttcaccgggagatcccacaggcagagcgttaccaagaggcagctcccaatgttgccaacaatactgggccacatgctgccagttgctttggggccaagaagggcaaagatgagtggttctccagagggaaaaaacctatagaggatccagcaaacgatacagtggatttccctaaaagaacgagtccagctcgaggctatgagctcttatttcagccagaggtggttcggatatacatctcacttcttaaggagagcaagactcctgccatcctagaagcctcagctggagctatccagaacttgtgtgctgggcgctggacgtatggtcgatacatccgctctgctctgcgtcaagagaaggctctttctgccatagctgacctcctgactaatgaacatgaacgggtggtgaaagctgcatctggagcactgagaaacctggctgtggatgctcgcaacaaagaattaattggtaaacatgctattcctaacttggtaaagaatctgccaggaggacagcagaactcctcttggaatttctctgaggacactgtcatctctattttgaacactatcaacgaggttatcgctgagaacttggaggctgccaaaaagcttcgagagacacagggtattgagaagctggtgttgatcaacaaatcagggaaccgctcagaaaaagaagttcgagcagcagcacttgtattacagacaatctggggatataaggaactgcggaagccactggaaaaagaaggatggaagaaatcagactttcaggtgaatctaaacaatgcttcccgaagccagagcagtcattcatatgatgatagtactctccctctcattgaccggaaccaaaaatcagataagaaacctgatcgggaagaaattcagatgagcaatatgggatcaaacacaaaatcactagataacaactattccacaccaaatgagagaggagaccacaatagaacactggatcgatcgggggatctaggcgacatggagccattgaagggaacaacacccttgatgcaggacgaggggcaggaatctctggaggaagagttggatgtgttggttttggatgatgaggggggccaagtgtcttacccctccatgcagaagatttagcaccactatctccgttccatctgggcttatatgtacttttattttttggtggtgaaattgactgatgattttcctttttcttcgctggactattgtgccaactgccaggctgcctcctgcccttacagccctaagtggctgccttctttccatcaactcccaacttcttcctgtgaagtttaattgtctcaacgcctccccctcccccattccctccatttttctcccaagaaacctgactcaattatttgcatattttgagaaactgctgcagattagttctttttgccagttttccctggaactcctggccttttgtggaggggagggatggagagaataggaatcttcactagaagccgtgggaagaattggaagttacatgctgtatatgcaatgtccagcagtctgataaactgacgattcttaatcaagatttttttcctgatggggaagggacttttattttcttttagagaggggaaagtgtgagctcttcccttattcctaatggctatttttgaagcaaagaaggccagcaacattggcacatgccacctggcaaaggacccttgagtaagtgaaggtctcctaaaactgggattaagaaaccttgctctcctcatctccaaggcagggaccatcaagaacctacagactccatctcttctgcaagcctcatgccaaccctgggctattgctgctgccccttaaacacaggctgtccttaacccacctctcctgccctgtgatatgtctgctgagttggcctggccatttccaagaggctgtagaaaggggagaatgtcaaggaagacttttggtagagaaggagcagaaagatgtgtttttgggaagaagaagacctctaggaggagctagtaggaatgtacatgaagcaattagtctgaaactggcttccccactcccccgtttctccttttcctatccttataggcctgtcccttgcctctgccctggattggttggcaaactaaaggacttgatgtacataactcctgtcccttttcccttacaaggtggggattgcccctggctttgcctcttctttgtgcctttggcctggggtgcatctcctcccgcccttccatgtgcctttctttgcctctgcagtctcatttctcataattttgcaaattatattttgttgctttcttacctactattggccctaaatagcagaaagaagagaagtgaccgagagaacctcagattcttcattgaggattggtatagccatgatttcagtcatagcaagcttttgctcaacagcatatgggtgggattttgcaaaaatcctattctgatgaatctcaaagtaaggctggtaagagaagtgagtggtgtgactcttactccttaggtgcccagaatttaccatcatctctgaaggagttacagggaagtggtctccccaattctcccctccctccagtattgccccctctcactttagcatatattaattagcaggttgggctagagaaatcagctgctatgcgggttgattattattattatttctaatccttttccttatttgccttctactccccttaatctaatctaaaagctctgttccatgcaactggagttccttatccctctcttccccttcccttatatattgaggctatggggtaggagaaaagtgcacaacccaccaccccctttactcgtgcattaaaatttcttatttacccttttcccccttcccatttcttcccactttcatctaccttttctggcaaaaaggagccttttgctctctgtgaccctaagagcacactgcacagggaaaattgccccatccagacctggctccactcttgatctctcttgtcctcttctgctcttttcctggtgctcttttttctcggtggggtgtgggtaatagaacagccgtgggcttttggggacctttaacttttttttctctcttttgtttataaaaaacactaaacattcaattccagagaaccaaaaatcccaccttcccaccgaacactactaaggggcttgtgttctgctccataccttttctcttttctttctgtcttgttaatgcttttaaaaacaaatgagttttttatataaataaagtttttaaagtgtgtatgtggggggtctgtgtcatttcttcacttcaagctgttatttcttccctgctttgcatctttgttacttccttatgtatcagtgtcctttccagagcaaccagaaggaggttataccaggatttattttgagctcagccccaactctttatcaagcaacattcttgttaactatatgtgaaacattttttcttctgaagattcttaaaaattgaatgtggctgaagttgaacatgggagcttattgctaatttagagataggaaactgaagcataaagaattaatgacttactttaattactggaattcttctgcaacatttgacaaaactaaccttgaataaggcccactgtaatacgtagctctcttaaatataacacttaggactagaagattagaaactaccaatcccaactacgtaataggaaaatgtaggatcaaaaggcccatgtatataagtactgaccactgggccataatgttgcttctcaggctatatgcagtcctttagtcagaagtcaataggcctatttattaatattttacagaccatattacctggattaccagggactatctttgctgcagagatcaagggttaagatctatgggaagatacttatttttctgaggtccttatgtcctgtcatataattaaagactcaagagaatttatgtgaaatgctttctgtatgcccaaatctttagattaaaattatatagctgctcct

SEQ ID NO: 38028 - DNA, 6012 bp, Artificial Sequence
  derived and/or modified sequence
ctgccagatcagtttgtcaccacccaggctcccttgcctttggctgggtgcaacttccattttaggtgttggatctgagggggaaaaaaaagagagagggagagagagagaaagaagagcaggaaagatcccgaaaggaggaagaggtggcgaaaaatcaactgccctgctggatttgtctttctcagcaccttggcgaagccttgggtttctttcttaaaggactgatttttagaactccacatttgaggtggagtcgaccgccagcatcttggcctctgtgaaggaacaagaggcccagtttgagaagctgacccgggcgctggaggaggaacggcgccacgtctcggcgcagctggaacgcgtccgggtctcaccacaagatgccaacccactcatggccaacggcacactcacccgccggcatcagaacggccggtttgtgggcgatgctgaccttgaaagacagaaattttcagatttgaaactcaacggaccccaggatcacagtcaccttctatatagcaccatccccaggatgcaggagccggggcagattgtggagacctacacggaggaggatcctgagggagccatgtctgtagtctctgtggagacctcagatgatgggaccactcggcgcacagagaccacggtcaagaaagtagtgaagactgtgacaacacggacagtacagccagtcgctatgggaccagacgggttgcctgtggatgcttcatcagtttctaacaactatatccagactttgggtcgtgatttccgcaagaatggcaatgggggacctggtccctatgtggggcaagctggcactgctacccttcctaggaacttccactaccctcctgatggttatagtcgccactatgaagatggttatccaggtggcagtgataactatggcagtctgtcccgggtgacccgcattgaggagcggtataggcccagcatggaaggctaccgggcacctagtagacaggatgtgtatgggccccaaccccaggttcgggtaggtgggagcagcgtggatctgcatcgctttcatccagagccttatgggctagaggatgaccagcgtagtatgggctatgatgacctggattatggtatgatgtctgattatggcactgcccgtcggactgggacaccctctgaccctcgtcggcgcctcaggagctatgaagacatgattggtgaggaggtgccatcggatcaatactactgggctcctttggcccagcatgagcgaggaagtttagcaagcttggatagcctgcgcaaaggagggcctccacctcctaattggagacagccagagctgccagaggtgatcgccatgcttggattccgcttggatgctgtcaagtccaatgcagctgcatacctgcaacacttatgctaccgcaatgacaaggtgaagactgacgtgcggaagctcaagggcatcccagtactggtgggattgttagaccatcccaaaaaggaagtgcaccttggagcctgtggagctctcaagaatatctcttttggacgtgaccaggataacaagattgccataaaaaactgtgatggtgtgcctgcccttgtgcgattgcttcgaaaggctcgtgatatggaccttactgaagttattaccggaaccctgtggaatctttcatcccatgactcaatcaaaatggagattgtggaccatgcactgcatgccttgacagatgaagtgatcattcctcattctggttgggagcgggaacctaatgaagactgtaagccacgccacattgagtgggaatcggtgctcaccaacacagctggctgccttaggaatgtaagctcagagaggagtgaagctcgccggaaacttcgggaatgtgatggtttagttgatgccctcattttcattgttcaggctgagattgggcagaaggattcagacagcaagcttgtagagaactgtgtttgccttcttcggaacttatcatatcaagttcaccgggagatcccacaggcagagcgttaccaagaggcagctcccaatgttgccaacaatactgggccacatgctgccagttgctttggggccaagaagggcaaagatgagtggttctccagagggaaaaaacctatagaggatccagcaaacgatacagtggatttccctaaaagaacgagtccagctcgaggctatgagctcttatttcagccagaggtggttcggatatacatctcacttcttaaggagagcaagactcctgccatcctagaagcctcagctggagctatccagaacttgtgtgctgggcgctggacgtatggtcgatacatccgctctgctctgcgtcaagagaaggctctttctgccatagctgacctcctgactaatgaacatgaacgggtggtgaaagctgcatctggagcactgagaaacctggctgtggatgctcgcaacaaagaattaattggtaaacatgctattcctaacttggtaaagaatctgccaggaggacagcagaactcctcttggaatttctctgaggacactgtcatctctattttgaacactatcaacgaggttatcgctgagaacttggaggctgccaaaaagcttcgagagacacagggtattgagaagctggtgttgatcaacaaatcagggaaccgctcagaaaaagaagttcgagcagcagcacttgtattacagacaatctggggatataaggaactgcggaagccactggaaaaagaaggatggaagaaatcagactttcaggtgaatctaaacaatgcttcccgaagccagagcagtcattcatatgatgatagtactctccctctcattgaccggaaccaaaaatcagataagaaacctgatcgggaagaaattcagatgagcaatatgggatcaaacacaaaatcactagataacaactattccacaccaaatgagagaggagaccacaatagaacactggatcgatcgggggatctaggcgacatggagccattgaagggaacaacacccttgatgcaggacgaggggcaggaatctctggaggaagagttggatgtgttggttttggatgatgaggggggccaagtgtcttacccctccatgcagaagatttagcaccactatctccgttccatctgggcttatatgtacttttattttttggtggtgaaattgactgatgattttcctttttcttcgctggactattgtgccaactgccaggctgcctcctgcccttacagccctaagtggctgccttctttccatcaactcccaacttcttcctgtgaagtttaattgtctcaacgcctccccctcccccattccctccatttttctcccaagaaacctgactcaattatttgcatattttgagaaactgctgcagattagttctttttgccagttttccctggaactcctggccttttgtggaggggagggatggagagaataggaatcttcactagaagccgtgggaagaattggaagttacatgctgtatatgcaatgtccagcagtctgataaactgacgattcttaatcaagatttttttcctgatggggaagggacttttattttcttttagagaggggaaagtgtgagctcttcccttattcctaatggctatttttgaagcaaagaaggccagcaacattggcacatgccacctggcaaaggacccttgagtaagtgaaggtctcctaaaactgggattaagaaaccttgctctcctcatctccaaggcagggaccatcaagaacctacagactccatctcttctgcaagcctcatgccaaccctgggctattgctgctgccccttaaacacaggctgtccttaacccacctctcctgccctgtgatatgtctgctgagttggcctggccatttccaagaggctgtagaaaggggagaatgtcaaggaagacttttggtagagaaggagcagaaagatgtgtttttgggaagaagaagacctctaggaggagctagtaggaatgtacatgaagcaattagtctgaaactggcttccccactcccccgtttctccttttcctatccttataggcctgtcccttgcctctgccctggattggttggcaaactaaaggacttgatgtacataactcctgtcccttttcccttacaaggtggggattgcccctggctttgcctcttctttgtgcctttggcctggggtgcatctcctcccgcccttccatgtgcctttctttgcctctgcagtctcatttctcataattttgcaaattatattttgttgctttcttacctactattggccctaaatagcagaaagaagagaagtgaccgagagaacctcagattcttcattgaggattggtatagccatgatttcagtcatagcaagcttttgctcaacagcatatgggtgggattttgcaaaaatcctattctgatgaatctcaaagtaaggctggtaagagaagtgagtggtgtgactcttactccttaggtgcccagaatttaccatcatctctgaaggagttacagggaagtggtctccccaattctcccctccctccagtattgccccctctcactttagcatatattaattagcaggttgggctagagaaatcagctgctatgcgggttgattattattattatttctaatccttttccttatttgccttctactccccttaatctaatctaaaagctctgttccatgcaactggagttccttatccctctcttccccttcccttatatattgaggctatggggtaggagaaaagtgcacaacccaccaccccctttactcgtgcattaaaatttcttatttacccttttcccccttcccatttcttcccactttcatctaccttttctggcaaaaaggagccttttgctctctgtgaccctaagagcacactgcacagggaaaattgccccatccagacctggctccactcttgatctctcttgtcctcttctgctcttttcctggtgctcttttttctcggtggggtgtgggtaatagaacagccgtgggcttttggggacctttaacttttttttctctcttttgtttataaaaaacactaaacattcaattccagagaaccaaaaatcccaccttcccaccgaacactactaaggggcttgtgttctgctccataccttttctcttttctttctgtcttgttaatgcttttaaaaacaaatgagttttttatataaataaagtttttaaagtgtgtatgtggggggtctgtgtcatttcttcacttcaagctgttatttcttccctgctttgcatctttgttacttccttatgtatcagtgtcctttccagagcaaccagaaggaggttataccaggatttattttgagctcagccccaactctttatcaagcaacattcttgttaactatatgtgaaacattttttcttctgaagattcttaaaaattgaatgtggctgaagttgaacatgggagcttattgctaatttagagataggaaactgaagcataaagaattaatgacttactttaattactggaattcttctgcaacatttgacaaaactaaccttgaataaggcccactgtaatacgtagctctcttaaatataacacttaggactagaagattagaaactaccaatcccaactacgtaataggaaaatgtaggatcaaaaggcccatgtatataagtactgaccactgggccataatgttgcttctcaggctatatgcagtcctttagtcagaagtcaataggcctatttattaatattttacagaccatattacctggattaccagggactatctttgctgcagagatcaagggttaagatctatgggaagatacttatttttctgaggtccttatgtcctgtcatataattaaagactcaagagaatttatgtgaaatgctttctgtatgcccaaatctttagattaaaattatatagctgctcct

SEQ ID NO: 38029 - DNA, 2844 bp, Artificial Sequence
  derived and/or modified sequence
atggacgacagcgaggtggagagcaccgccagcatcctggccagcgtgaaggagcaggaggcccagttcgagaagctgaccagagccctggaggaggagagaagacacgtgagcgcccagctggagagagtgagagtgagcccccaggacgccaaccccctgatggccaacggcaccctgaccagaagacaccagaacggcagattcgtgggcgacgccgacctggagagacagaagttcagcgacctgaagctgaacggcccccaggaccacagccacctgctgtacagcaccatccccagaatgcaggagcccggccagatcgtggagacctacaccgaggaggaccccgagggcgccatgagcgtggtgagcgtggagaccagcgacgacggcaccaccagaagaaccgagaccaccgtgaagaaggtggtgaagaccgtgaccaccagaaccgtgcagcccgtggccatgggccccgacggcctgcccgtggacgccagcagcgtgagcaacaactacatccagaccctgggcagagacttcagaaagaacggcaacggcggccccggcccctacgtgggccaggccggcaccgccaccctgcccagaaacttccactacccccccgacggctacagcagacactacgaggacggctaccccggcggcagcgacaactacggcagcctgagcagagtgaccagaatcgaggagagatacagacccagcatggagggctacagagcccccagcagacaggacgtgtacggcccccagccccaggtgagagtgggcggcagcagcgtggacctgcacagattccaccccgagccctacggcctggaggacgaccagagaagcatgggctacgacgacctggactacggcatgatgagcgactacggcaccgccagaagaaccggcacccccagcgaccccagaagaagactgagaagctacgaggacatgatcggcgaggaggtgcccagcgaccagtactactgggcccccctggcccagcacgagagaggcagcctggccagcctggacagcctgagaaagggcggcccccccccccccaactggagacagcccgagctgcccgaggtgatcgccatgctgggcttcagactggacgccgtgaagagcaacgccgccgcctacctgcagcacctgtgctacagaaacgacaaggtgaagaccgacgtgagaaagctgaagggcatccccgtgctggtgggcctgctggaccaccccaagaaggaggtgcacctgggcgcctgcggcgccctgaagaacatcagcttcggcagagaccaggacaacaagatcgccatcaagaactgcgacggcgtgcccgccctggtgagactgctgagaaaggccagagacatggacctgaccgaggtgatcaccggcaccctgtggaacctgagcagccacgacagcatcaagatggagatcgtggaccacgccctgcacgccctgaccgacgaggtgatcatcccccacagcggctgggagagagagcccaacgaggactgcaagcccagacacatcgagtgggagagcgtgctgaccaacaccgccggctgcctgagaaacgtgagcagcgagagaagcgaggccagaagaaagctgagagagtgcgacggcctggtggacgccctgatcttcatcgtgcaggccgagatcggccagaaggacagcgacagcaagctggtggagaactgcgtgtgcctgctgagaaacctgagctaccaggtgcacagagagatcccccaggccgagagataccaggaggccgcccccaacgtggccaacaacaccggcccccacgccgccagctgcttcggcgccaagaagggcaaggacgagtggttcagcagaggcaagaagcccatcgaggaccccgccaacgacaccgtggacttccccaagagaaccagccccgccagaggctacgagctgctgttccagcccgaggtggtgagaatctacatcagcctgctgaaggagagcaagacccccgccatcctggaggccagcgccggcgccatccagaacctgtgcgccggcagatggacctacggcagatacatcagaagcgccctgagacaggagaaggccctgagcgccatcgccgacctgctgaccaacgagcacgagagagtggtgaaggccgccagcggcgccctgagaaacctggccgtggacgccagaaacaaggagctgatcggcaagcacgccatccccaacctggtgaagaacctgcccggcggccagcagaacagcagctggaacttcagcgaggacaccgtgatcagcatcctgaacaccatcaacgaggtgatcgccgagaacctggaggccgccaagaagctgagagagacccagggcatcgagaagctggtgctgatcaacaagagcggcaacagaagcgagaaggaggtgagagccgccgccctggtgctgcagaccatctggggctacaaggagctgagaaagcccctggagaaggagggctggaagaagagcgacttccaggtgaacctgaacaacgccagcagaagccagagcagccacagctacgacgacagcaccctgcccctgatcgacagaaaccagaagagcgacaacaactacagcacccccaacgagagaggcgaccacaacagaaccctggacagaagcggcgacctgggcgacatggagcccctgaagggcaccacccccctgatgcaggacgagggccaggagagcctggaggaggagctggacgtgctggtgctggacgacgagggcggccaggtgagctaccccagcatgcagaagatctag

SEQ ID NO: 38030 - DNA, 2907 bp, Artificial Sequence
  derived and/or modified sequence
atggacgacagcgaggtggagagcaccgccagcatcctggccagcgtgaaggagcaggaggcccagttcgagaagctgaccagagccctggaggaggagagaagacacgtgagcgcccagctggagagagtgagagtgagcccccaggacgccaaccccctgatggccaacggcaccctgaccagaagacaccagaacggcagattcgtgggcgacgccgacctggagagacagaagttcagcgacctgaagctgaacggcccccaggaccacagccacctgctgtacagcaccatccccagaatgcaggagcccggccagatcgtggagacctacaccgaggaggaccccgagggcgccatgagcgtggtgagcgtggagaccagcgacgacggcaccaccagaagaaccgagaccaccgtgaagaaggtggtgaagaccgtgaccaccagaaccgtgcagcccgtggccatgggccccgacggcctgcccgtggacgccagcagcgtgagcaacaactacatccagaccctgggcagagacttcagaaagaacggcaacggcggccccggcccctacgtgggccaggccggcaccgccaccctgcccagaaacttccactacccccccgacggctacagcagacactacgaggacggctaccccggcggcagcgacaactacggcagcctgagcagagtgaccagaatcgaggagagatacagacccagcatggagggctacagagcccccagcagacaggacgtgtacggcccccagccccaggtgagagtgggcggcagcagcgtggacctgcacagattccaccccgagccctacggcctggaggacgaccagagaagcatgggctacgacgacctggactacggcatgatgagcgactacggcaccgccagaagaaccggcacccccagcgaccccagaagaagactgagaagctacgaggacatgatcggcgaggaggtgcccagcgaccagtactactgggcccccctggcccagcacgagagaggcagcctggccagcctggacagcctgagaaagggcggcccccccccccccaactggagacagcccgagctgcccgaggtgatcgccatgctgggcttcagactggacgccgtgaagagcaacgccgccgcctacctgcagcacctgtgctacagaaacgacaaggtgaagaccgacgtgagaaagctgaagggcatccccgtgctggtgggcctgctggaccaccccaagaaggaggtgcacctgggcgcctgcggcgccctgaagaacatcagcttcggcagagaccaggacaacaagatcgccatcaagaactgcgacggcgtgcccgccctggtgagactgctgagaaaggccagagacatggacctgaccgaggtgatcaccggcaccctgtggaacctgagcagccacgacagcatcaagatggagatcgtggaccacgccctgcacgccctgaccgacgaggtgatcatcccccacagcggctgggagagagagcccaacgaggactgcaagcccagacacatcgagtgggagagcgtgctgaccaacaccgccggctgcctgagaaacgtgagcagcgagagaagcgaggccagaagaaagctgagagagtgcgacggcctggtggacgccctgatcttcatcgtgcaggccgagatcggccagaaggacagcgacagcaagctggtggagaactgcgtgtgcctgctgagaaacctgagctaccaggtgcacagagagatcccccaggccgagagataccaggaggccgcccccaacgtggccaacaacaccggcccccacgccgccagctgcttcggcgccaagaagggcaaggacgagtggttcagcagaggcaagaagcccatcgaggaccccgccaacgacaccgtggacttccccaagagaaccagccccgccagaggctacgagctgctgttccagcccgaggtggtgagaatctacatcagcctgctgaaggagagcaagacccccgccatcctggaggccagcgccggcgccatccagaacctgtgcgccggcagatggacctacggcagatacatcagaagcgccctgagacaggagaaggccctgagcgccatcgccgacctgctgaccaacgagcacgagagagtggtgaaggccgccagcggcgccctgagaaacctggccgtggacgccagaaacaaggagctgatcggcaagcacgccatccccaacctggtgaagaacctgcccggcggccagcagaacagcagctggaacttcagcgaggacaccgtgatcagcatcctgaacaccatcaacgaggtgatcgccgagaacctggaggccgccaagaagctgagagagacccagggcatcgagaagctggtgctgatcaacaagagcggcaacagaagcgagaaggaggtgagagccgccgccctggtgctgcagaccatctggggctacaaggagctgagaaagcccctggagaaggagggctggaagaagagcgacttccaggtgaacctgaacaacgccagcagaagccagagcagccacagctacgacgacagcaccctgcccctgatcgacagaaaccagaagagcgacaagaagcccgacagagaggagatccagatgagcaacatgggcagcaacaccaagagcctggacaacaactacagcacccccaacgagagaggcgaccacaacagaaccctggacagaagcggcgacctgggcgacatggagcccctgaagggcaccacccccctgatgcaggacgagggccaggagagcctggaggaggagctggacgtgctggtgctggacgacgagggcggccaggtgagctaccccagcatgcagaagatctag

SEQ ID NO: 38031 - protein, 962 aa, Artificial Sequence
  derived and/or modified sequence
MDDSEVESTASILASVKEQEAQFEKLTRALEEERRHVSAQLERVRVSPQDANPLMANGTLTRRHQNGRFVGDADLERQKFSDLKLNGPQDHSHLLYSTIPRMQEPGQIVETYTEEDPEGAMSVVSVETSDDGTTRRTETTVKKVVKTVTTRTVQPVAMGPDGLPVDASSVSNNYIQTLGRDFRKNGNGGPGPYVGQAGTATLPRNFHYPPDGYSRHYEDGYPGGSDNYGSLSRVTRIEERYRPSMEGYRAPSRQDVYGPQPQVRVGGSSVDLHRFHPEPYGLEDDQRSMGYDDLDYGMMSDYGTARRTGTPSDPRRRLRSYEDMIGEEVPSDQYYWAPLAQHERGSLASLDSLRKGGPPPPNWRQPELPEVIAMLGFRLDAVKSNAAAYLQHLCYRNDKVKTDVRKLKGIPVLVGLLDHPKKEVHLGACGALKNISFGRDQDNKIAIKNCDGVPALVRLLRKARDMDLTEVITGTLWNLSSHDSIKMEIVDHALHALTDEVIIPHSGWEREPNEDCKPRHIEWESVLTNTAGCLRNVSSERSEARRKLRECDGLVDALIFIVQAEIGQKDSDSKLVENCVCLLRNLSYQVHREIPQAERYQEAAPNVANNTGPHAASCFGAKKGKGKKPIEDPANDTVDFPKRTSPARGYELLFQPEVVRIYISLLKESKTPAILEASAGAIQNLCAGRWTYGRYIRSALRQEKALSAIADLLTNEHERVVKAASGALRNLAVDARNKELIGKHAIPNLVKNLPGGQQNSSWNFSEDTVISILNTINEVIAENLEAAKKLRETQGIEKLVLINKSGNRSEKEVRAAALVLQTIWGYKELRKPLEKEGWKKSDFQVNLNNASRSQSSHSYDDSTLPLIDRNQKSDKKPDREEIQMSNMGSNTKSLDNNYSTPNERGDHNRTLDRSGDLGDMEPLKGTTPLMQDEGQESLEEELDVLVLDDEGGQVSYPSMQKI

SEQ ID NO: 38032 - protein, 908 aa, Artificial Sequence
  derived and/or modified sequence
MANGTLTRRHQNGRFVGDADLERQKFSDLKLNGPQDHSHLLYSTIPRMQEPGQIVETYTEEDPEGAMSVVSVETSDDGTTRRTETTVKKVVKTVTTRTVQPVAMGPDGLPVDASSVSNNYIQTLGRDFRKNGNGGPGPYVGQAGTATLPRNFHYPPDGYSRHYEDGYPGGSDNYGSLSRVTRIEERYRPSMEGYRAPSRQDVYGPQPQVRVGGSSVDLHRFHPEPYGLEDDQRSMGYDDLDYGMMSDYGTARRTGTPSDPRRRLRSYEDMIGEEVPSDQYYWAPLAQHERGSLASLDSLRKGGPPPPNWRQPELPEVIAMLGFRLDAVKSNAAAYLQHLCYRNDKVKTDVRKLKGIPVLVGLLDHPKKEVHLGACGALKNISFGRDQDNKIAIKNCDGVPALVRLLRKARDMDLTEVITGTLWNLSSHDSIKMEIVDHALHALTDEVIIPHSGWEREPNEDCKPRHIEWESVLTNTAGCLRNVSSERSEARRKLRECDGLVDALIFIVQAEIGQKDSDSKLVENCVCLLRNLSYQVHREIPQAERYQEAAPNVANNTGPHAASCFGAKKGKGKKPIEDPANDTVDFPKRTSPARGYELLFQPEVVRIYISLLKESKTPAILEASAGAIQNLCAGRWTYGRYIRSALRQEKALSAIADLLTNEHERVVKAASGALRNLAVDARNKELIGKHAIPNLVKNLPGGQQNSSWNFSEDTVISILNTINEVIAENLEAAKKLRETQGIEKLVLINKSGNRSEKEVRAAALVLQTIWGYKELRKPLEKEGWKKSDFQVNLNNASRSQSSHSYDDSTLPLIDRNQKSDKKPDREEIQMSNMGSNTKSLDNNYSTPNERGDHNRTLDRSGDLGDMEPLKGTTPLMQDEGQESLEEELDVLVLDDEGGQVSYPSMQKI

SEQ ID NO: 38033 - protein, 129 aa, Artificial Sequence
  derived and/or modified sequence
MANGTLTRRHQNGRFVGDADLERQKFSDLKLNGPQDHSHLLYSTIPRMQEPGQIVETYTEEDPEGAMSVVSVETSDDGTTRRTETTVKKVVKTVTTRTVQPVAMGPDGLPVDASSVSNNYIQTLGRDFR

SEQ ID NO: 38034 - protein, 861 aa, Artificial Sequence
  derived and/or modified sequence
MQEPGQIVETYTEEDPEGAMSVVSVETSDDGTTRRTETTVKKVVKTVTTRTVQPVAMGPDGLPVDASSVSNNYIQTLGRDFRKNGNGGPGPYVGQAGTATLPRNFHYPPDGYSRHYEDGYPGGSDNYGSLSRVTRIEERYRPSMEGYRAPSRQDVYGPQPQVRVGGSSVDLHRFHPEPYGLEDDQRSMGYDDLDYGMMSDYGTARRTGTPSDPRRRLRSYEDMIGEEVPSDQYYWAPLAQHERGSLASLDSLRKGGPPPPNWRQPELPEVIAMLGFRLDAVKSNAAAYLQHLCYRNDKVKTDVRKLKGIPVLVGLLDHPKKEVHLGACGALKNISFGRDQDNKIAIKNCDGVPALVRLLRKARDMDLTEVITGTLWNLSSHDSIKMEIVDHALHALTDEVIIPHSGWEREPNEDCKPRHIEWESVLTNTAGCLRNVSSERSEARRKLRECDGLVDALIFIVQAEIGQKDSDSKLVENCVCLLRNLSYQVHREIPQAERYQEAAPNVANNTGPHAASCFGAKKGKGKKPIEDPANDTVDFPKRTSPARGYELLFQPEVVRIYISLLKESKTPAILEASAGAIQNLCAGRWTYGRYIRSALRQEKALSAIADLLTNEHERVVKAASGALRNLAVDARNKELIGKHAIPNLVKNLPGGQQNSSWNFSEDTVISILNTINEVIAENLEAAKKLRETQGIEKLVLINKSGNRSEKEVRAAALVLQTIWGYKELRKPLEKEGWKKSDFQVNLNNASRSQSSHSYDDSTLPLIDRNQKSDKKPDREEIQMSNMGSNTKSLDNNYSTPNERGDHNRTLDRSGDLGDMEPLKGTTPLMQDEGQESLEEELDVLVLDDEGGQVSYPSMQKI

SEQ ID NO: 38035 - protein, 639 aa, Artificial Sequence
  derived and/or modified sequence
MIGEEVPSDQYYWAPLAQHERGSLASLDSLRKGGPPPPNWRQPELPEVIAMLGFRLDAVKSNAAAYLQHLCYRNDKVKTDVRKLKGIPVLVGLLDHPKKEVHLGACGALKNISFGRDQDNKIAIKNCDGVPALVRLLRKARDMDLTEVITGTLWNLSSHDSIKMEIVDHALHALTDEVIIPHSGWEREPNEDCKPRHIEWESVLTNTAGCLRNVSSERSEARRKLRECDGLVDALIFIVQAEIGQKDSDSKLVENCVCLLRNLSYQVHREIPQAERYQEAAPNVANNTGPHAASCFGAKKGKGKKPIEDPANDTVDFPKRTSPARGYELLFQPEVVRIYISLLKESKTPAILEASAGAIQNLCAGRWTYGRYIRSALRQEKALSAIADLLTNEHERVVKAASGALRNLAVDARNKELIGKHAIPNLVKNLPGGQQNSSWNFSEDTVISILNTINEVIAENLEAAKKLRETQGIEKLVLINKSGNRSEKEVRAAALVLQTIWGYKELRKPLEKEGWKKSDFQVNLNNASRSQSSHSYDDSTLPLIDRNQKSDKKPDREEIQMSNMGSNTKSLDNNYSTPNERGDHNRTLDRSGDLGDMEPLKGTTPLMQDEGQESLEEELDVLVLDDEGGQVSYPSMQKI

SEQ ID NO: 38036 - protein, 126 aa, Artificial Sequence
  derived and/or modified sequence
MIGEEVPSDQYYWAPLAQHERGSLASLDSLRKGGPPPPNWRQPELPEVIAMLGFRLDAVKSNAAAYLQHLCYRNDKVKTDVRKLKGIPVLVGLLDHPKKEVHLGACGALKNISFGRDQDNKIAIKN

SEQ ID NO: 38037 - DNA, 2889 bp, Artificial Sequence
  derived and/or modified sequence
atggatgactccgaggtggagtcaacggcctccattctcgcatcagtaaaggaacaggaggctcagttcgagaaactgacccgtgccctcgaggaagaaagacgacatgtttctgcccagctggaaagggtccgagtctcaccgcaggacgcaaatccgcttatggctaacggcacccttacccgccggcatcaaaatggtcgcttcgtcggagacgcagatctggaaagacagaagttcagcgatttgaagctgaacgggcctcaggatcacagtcacctgctctactctaccattcctcgcatgcaggaaccgggacagatcgtcgagacctataccgaagaagacccggagggggcgatgtccgtggtgagcgtggaaaccagcgacgacggcacaactcgccggactgaaacgacagtcaagaaggtcgtgaaaacagtcacgactcgaactgttcagccagtcgccatggggccagatggcttgcctgtggatgcgagttccgtgtctaataactacatccagactcttgggcgggactttagaaagaacggtaatggtggacctggaccctatgtgggccaggctgggactgcaaccctcccgaggaattttcactaccctccagacgggtatagccgtcactacgaagatggctacccgggaggcagcgataactatggtagtctcagtagagtgacacgtattgaggagaggtaccgaccctcaatggaaggctatcgagctccttcaagacaggacgtctacgggcctcagccacaagtgagggtgggaggatcctctgttgatctccaccgattccatcctgaaccctacgggttagaagatgaccaaagatccatggggtacgatgacctggactatggtatgatgtctgattacggcacagcccgcaggactggtacccctagcgatccccgcagaaggctgcgctcgtacgaggatatgatcggagaagaggtgccctccgatcagtattattgggcacccctcgcccagcatgaacgtggctcactcgccagtctggacagcctgaggaagggcgggccaccgccacccaactggcgtcagccggagctgcctgaagtgattgcaatgctcggttttaggttggacgccgtcaagagtaacgccgccgcctacctccagcatctctgctaccggaacgacaaggtaaagacagacgtacggaaactcaagggcattccggtgttagtgggactgctggaccatccaaagaaggaggttcacctgggtgcatgtggggctctgaaaaatatatcctttggacgagatcaagacaataaaatcgccattaagaattgcgacggcgtgcctgcgttagtgcgcctcctgcgcaaggcacgggatatggaccttacggaagtcataaccggtaccctgtggaatttgagttcccatgacagcattaagatggagatcgtggatcacgctctgcacgccctcaccgatgaggttatcattccacacagtggatgggagagagagcctaacgaggactgcaaacccagacacatagagtgggagtctgtgttaacgaacaccgccggctgcctgcggaacgtgagcagcgaaaggtccgaagccagacgaaaattgagagaatgtgacggcctcgtggacgcccttatatttatcgtgcaggccgaaataggtcagaaagattctgactcaaagcttgtcgagaactgcgtctgcttactgagaaacctctcctaccaagtccatagagaaattccacaggctgaaaggtaccaggaagcagctcctaacgtggcaaacaacacagggcctcatgccgcatcatgttttggcgcgaaaaagggtaagggcaagaagccaattgaagacccagccaacgacacagtggattttccgaaacgcacgtcacccgcccgcggttatgagctgttgttccagcccgaagtcgtacggatatatatcagcctcttaaaggagtctaagactcccgcaatactagaagcgtctgctggagcaatccaaaacctgtgtgctggccgctggacgtacggacggtacattcgcagcgccttacgccaggagaaggcactgagtgccatcgccgacttgttgacaaacgaacacgagcgggtggtgaaggcagcttcgggcgccttacgaaatctggcggtggacgcccggaacaaggaattgattggcaagcacgcaatcccgaacctggtgaagaacctaccgggtgggcaacagaactccagctggaatttttcggaggataccgtcatctccatcctcaatacgatcaatgaagttatagccgagaatctggaggcagccaagaagctgagagaaactcaaggcattgagaagctagtactgattaacaagtctggtaaccggtctgagaaggaagtacgggccgctgcccttgtgctccagactatatgggggtataaagaacttcgcaagccactggagaaagaaggctggaagaagtccgacttccaggtgaacctaaacaacgcgtctagaagccaaagctctcatagttatgacgatagcacactgccactcattgatcgcaatcaaaaaagcgataagaagcctgacagagaagagatacagatgtccaatatgggttctaatactaaatccttggacaataactacagcacccccaacgaacggggagatcataatcgtactttagaccggagcggagaccttggcgacatggagcccctcaagggaactacacccctaatgcaggatgaggggcaagagtccctagaagaggaactagacgtactcgtgctcgatgatgaaggtggccaggtgtcgtacccatcaatgcagaaaatctag

SEQ ID NO: 38038 - DNA, 2889 bp, Artificial Sequence
  derived and/or modified sequence
atggatgacagcgaggtggagagcacagccagcatcctggcctctgtgaaggagcaggaggcccagtttgagaagctgacccgggccctggaggaggagcggcggcacgtgtctgcccagctggagcgggtgcgggtgagcccccaggatgccaaccccctgatggccaacggcaccctgacccggcggcaccagaatggccgctttgtgggagatgctgacctggagcggcagaagttcagtgacctgaagctgaatggcccccaggaccacagccacctgctgtacagcaccatccccaggatgcaggagcccggccagatcgtggagacctacacagaagaagatcctgagggcgccatgtctgtggtgtctgtggagaccagtgatgatggcaccaccaggagaacagagaccaccgtgaagaaggtggtgaagacagtgaccaccaggacagtgcagcctgtggccatgggcccagatggcctgcctgtggatgccagctctgtgagcaacaactacatccagaccctgggccgggacttcaggaagaatggaaatggaggccctggcccctacgtgggccaggccggcacagccaccctgcccaggaacttccactaccccccagatggctacagccgccactatgaagatggctacccaggcggcagtgacaactacggcagcctgagccgggtgaccagaattgaggagcgctaccggcccagcatggagggctaccgggcccccagccggcaggatgtgtatggcccccagccccaggtgcgggtgggcggcagctctgtggacctgcaccgcttccaccctgagccctacggcctggaggatgaccagaggtccatgggctatgatgacctggactatggcatgatgtctgactatggaacagcccggaggacaggcacccccagcgacccccggcggcggctgcggagctatgaggacatgattggagaggaggtgcccagcgaccagtactactgggcccccctggcccagcacgagcggggcagcctggccagcctggacagcctgaggaaaggaggccccccaccacccaactggaggcagcctgagctgcctgaggtgattgccatgctgggcttccggctggatgctgtgaagagcaatgctgctgcctacctgcagcacctgtgctacagaaatgacaaggtgaagacagatgtgaggaagctgaagggcatccctgtgctggtgggcctgctggaccaccccaagaaggaggtgcacctgggcgcctgtggggccctgaagaacatcagctttggccgggaccaggacaacaagatcgccatcaagaactgtgatggagtgcctgccctggtgcggctgctgaggaaggcccgggacatggacctgacagaggtgatcaccggcaccctgtggaacctgagcagccatgacagcatcaagatggagatcgtggaccacgccctgcacgccctgacagatgaagtcatcatcccccacagcggctgggagcgggagcccaatgaagactgcaagcccaggcacatcgagtgggagagcgtgctgaccaacacagctggctgcctgagaaatgtgtcctctgagaggtctgaggcccggaggaagctgcgggagtgtgatggcctggtggatgccctgatcttcatcgtgcaggccgagatcggccagaaggacagcgacagcaagctggtggagaactgtgtgtgcctgctgaggaacctgagctaccaggtgcaccgggagatcccccaggccgagcgctaccaggaggccgcccccaacgtggccaacaacacaggcccccatgctgccagctgctttggagccaagaagggcaagggcaagaagcccattgaagatcctgccaatgacacagtggacttccccaagaggaccagccctgcccggggctatgagctgctcttccagcctgaggtggtgcgcatctacatcagcctgctgaaggagagcaagaccccagccatcctggaggccagcgctggggccatccagaacctgtgtgccggccgctggacctacggccgctacatccgcagcgccctgcggcaggagaaggccctgagcgccatcgctgacctgctgaccaatgaacatgagcgggtggtgaaggccgccagcggggccctgaggaacctggccgtggatgccaggaacaaggagctgattggcaagcacgccatccccaacctggtgaagaacctgcccggcggccagcagaacagctcctggaacttcagcgaggacaccgtcatcagcatcctgaacaccatcaatgaggtgattgctgagaacctggaggccgccaagaagctgcgggagacccagggcatcgagaagctggtgctgatcaacaagagcggcaacagaagtgagaaggaggtgcgggccgccgccctggtgctgcagaccatctggggctacaaggagctgaggaagcccctggagaaggagggctggaagaagagtgacttccaggtgaacctgaacaatgccagccgcagccagagcagccacagctatgatgacagcaccctgcccctgattgacaggaaccagaagagtgacaagaagccagaccgggaggagatccagatgagcaacatgggcagcaacaccaagagcctggacaacaactacagcaccccaaatgaaagaggagaccacaacagaaccctggacagaagtggggacctgggggacatggagcccctgaagggcaccacccccctgatgcaggatgagggccaggagagcctggaggaggagctggatgtgctggtgctggatgatgaaggaggccaggtgtcctaccccagcatgcagaagatctag

SEQ ID NO: 38039 - DNA, 2889 bp, Artificial Sequence
  derived and/or modified sequence
atggacgacagcgaggtggagagcaccgccagcatcctggccagcgtcaaggagcaggaagcacagtttgagaagcttacgcgcgcactggaggaagagcgaagacacgtctcggctcagctcgaacgggtcagggttagtccgcaggacgcaaatccgttgatggccaatggcacactgactaggcggcaccaaaatgggcgattcgtaggagacgcggatcttgagaggcaaaaatttagcgatctcaagctcaatggccctcaggatcattcacacttactctactccactattcccagaatgcaggaacccggccagattgtggaaacttacaccgaggaggatccggaaggcgctatgtcggtagtgtctgtagaaacctccgacgatgggaccacccgacgcaccgagaccaccgttaagaaggtcgtaaaaacagtgactactcggacggtgcaacctgtggcaatgggtcccgacggcctgcctgttgacgcgagttctgtgtcgaacaattacattcaaactcttgggcgtgattttaggaaaaacggaaatggcggacctggtccctacgtgggacaggcaggaacagcaactcttccaaggaatttccattatccaccggacggttattcaagacactatgaagatggctatcccggggggtcagacaattatggctctttgagccgggtgacgcgaatagaggagcggtaccgcccaagtatggagggctatagggctccaagtagacaagatgtatacgggcctcaacctcaggttcgtgtggggggctcttctgtggacctgcacaggttccaccccgagccgtatggactcgaagacgatcaaagaagcatgggctatgatgatctcgactacggcatgatgagcgactacggaactgctaggaggactggcacaccaagtgacccccgacgtcgtttgaggtcttatgaggatatgatcggcgaggaggtcccctccgaccagtactactgggcacccctcgcacagcacgagcgaggcagtctagcatcacttgacagcttgcggaaaggaggccctcctcccccgaattggcggcagcccgaactgccagaggtaatcgccatgctgggcttccgtctggacgccgtgaaaagcaacgccgctgcatatctacagcacctgtgctaccgtaatgataaagtgaagaccgacgtgcggaagctgaagggtatcccagttctggtggggctgctcgatcatcctaaaaaagaggttcacctgggagcttgcggtgccctgaaaaatatctcattcggaagagaccaggacaataagatcgcaatcaaaaactgtgatggggtaccagccctggtcaggctgttaagaaaagcgagggacatggacctgaccgaagtcatcaccgggacactgtggaacttgtcctctcacgattcaattaagatggagattgttgatcatgcgctgcatgcgcttacagacgaagttataatcccccactcaggctgggagagggagccgaatgaggattgcaaaccacgtcacattgagtgggagagcgttctgaccaacacagccggttgcttgaggaatgtgagtagtgaaaggtccgaggcgaggcgcaagctgcgggaatgtgacgggctcgtggacgccctgatctttattgtgcaagctgagataggtcagaaggactctgacagcaagctggtggagaattgcgtctgcctcctgcggaacctgtcttatcaggttcacagagagattcctcaggccgagcgttatcaggaagcggctccaaatgttgccaataacactgggcctcatgctgcctcttgctttggggctaagaaaggaaaggggaaaaagcctatagaggatcccgctaatgatacagtggacttcccaaagaggacaagcccagcacgggggtatgaactgctttttcagccggaggtggtcaggatatatatttctctgctcaaggagagcaaaacccctgcaatccttgaggcatccgccggggccatccaaaacctgtgcgccggcagatggacgtatggcaggtatatcagaagtgctctgaggcaggagaaagccctgagtgctattgcggacttgcttacgaatgaacacgagagggtggttaaggccgcttcaggtgcactgagaaatctcgccgtcgacgcgcgtaataaagaactgattgggaagcacgctattcccaatctagtgaaaaacctgccaggtggacagcagaatagtagttggaatttctccgaggatacagtgatttccatcctaaacacgataaatgaggtaatcgccgagaacttggaagccgccaagaagcttcgcgagactcaaggcatcgagaagttggtgctgatcaataagtccggcaatcggtcagagaaagaggtgagagcagcggctcttgtgctccaaactatctggggttataaggagctgaggaaacctctagaaaaggagggatggaagaaatcagattttcaggtcaatctgaataacgcatcaagatctcagagcagtcacagctacgacgattcaaccctgccgctgatcgaccgcaatcagaagtcggataaaaagcctgatagggaggaaattcagatgtctaacatggggtccaacaccaagagcctcgacaataattacagcaccccaaatgaacgcggggatcacaaccggaccctggatcggtccggggacctcggagatatggaacccttgaaggggactacgcccctcatgcaggatgaggggcaggaatcactcgaggaagagctggacgttcttgtgctcgatgacgagggaggacaggtgagctaccccagtatgcagaaaatttag

SEQ ID NO: 38040 - DNA, 2889 bp, Artificial Sequence
  derived and/or modified sequence
atggacgatagtgaggtagaatctactgctagcatcctagcgtctgtgaaagagcaagaagctcagttcgaaaaactgactagagctctggaagaggagaggaggcacgtatccgcgcaattggaaagagtgagggtgagtccgcaggacgcaaatccattaatggcaaacgggacgctcactaggcgccaccagaatggtaggttcgtcggcgatgccgatctcgagaggcaaaaattttccgacctcaagctgaacggacctcaagatcactcacatcttctttatagcaccatcccaaggatgcaggagcctggccagattgttgaaacctacacggaggaggacccggagggggcaatgagcgtggtgagcgtggagaccagtgacgatggaactacccgtaggactgagaccaccgtgaagaaggtcgtgaaaaccgtaacgactagaacagtgcagcccgtggccatgggaccagacggcctgcccgtggatgcttctagtgtgagcaataactatatccagacactggggagggattttcgcaaaaatggcaatggcggtccaggcccttatgtgggacaggccggaacggccactctgccccgaaactttcattatccgccagacgggtatagccggcactacgaggacggatatcctgggggttcagataattatggttccctgagtagagtgaccagaatcgaggaaagataccgaccttccatggaaggttaccgtgccccttctcgacaggatgtgtacggaccacagcctcaggtgcgggtgggaggatcctctgttgacctgcacagattccatcccgagccctacgggcttgaggatgaccagcggagtatggggtatgatgatttagattacggaatgatgagcgactatggaacagcgcgaaggaccggaacgcccagcgatcctaggcgacgcctgaggagctacgaggatatgattggagaagaggtgcctagcgatcagtattactgggcgccactggcgcagcatgagcgcggttctttggcttcattagacagcctgcgcaagggcggtccaccacctcccaactggagacagcccgagctgcccgaagtgatcgcaatgctcgggttccgcctagatgcggttaaatcaaatgccgctgcttatctacagcacctctgctaccgcaacgataaggtaaaaaccgatgtgcggaagctgaaagggatccctgtcctagtgggcctgctggaccaccctaaaaaggaggtgcatctgggcgcttgtggggctctgaagaacataagcttcggtcgtgatcaggataacaagatcgcaatcaagaattgtgacggcgtgcccgcacttgtccggctgctgcgcaaggcaagagatatggaccttacagaagtcatcaccggcaccttatggaatctgagttctcacgatagcattaaaatggagatagtagatcatgcactgcatgccctcactgatgaagttataatcccccattccggatgggagagggagcccaatgaggactgcaaacccagacacatcgagtgggagagtgttctgaccaatacagccggttgtttgaggaatgtgtcaagcgagcggtctgaagcgagacgtaagctaagagagtgcgatggccttgtagatgcccttatcttcattgttcaggccgagatagggcagaaggattccgactctaaactggtggagaattgcgtttgtctgttgagaaacctctcgtaccaggtgcatcgtgagatcccccaagccgaaagataccaggaagccgcacctaacgttgcaaataacaccggaccccacgctgcttcatgtttcggggctaaaaaaggcaagggcaaaaaacccatcgaggatcctgccaacgataccgtggacttcccgaaacgaacctccccggcaagggggtatgagctgctttttcagcccgaagttgtgaggatttatatcagcctgcttaaggagagtaagacaccagcaatcttggaagcttctgccggtgcaatccagaatctctgcgccggtaggtggacatatggccgatacattcgttctgccctccgacaagagaaagcattaagcgcgatcgcggacctgctaacgaacgaacatgagcgcgtggtgaaagccgcatccggtgctctcagaaacctcgctgttgatgccaggaataaggaactgatcggcaaacacgccattcctaatctggtaaaaaacctgcccggagggcagcagaattcttcatggaacttcagcgaggacacggtgatctccatcctcaatacaatcaatgaggtaatcgcagaaaatctcgaggctgctaaaaagctgcgcgagacccaaggcattgagaaactggtgctaataaataagtccggtaatagatccgagaaagaggtgcgtgcggctgccctggtgctacagaccatatggggttataaagagcttcgcaagcctctggaaaaggaggggtggaaaaaatctgattttcaagtcaatctcaataacgcttctcggtcgcagtccagtcattcctacgacgactccacccttccattaattgatcgcaaccagaagtcagataagaaacctgatcgggaagaaatacagatgtccaacatgggcagcaacacgaagtcactcgacaataattacagcaccccaaacgaacggggagaccacaaccggacccttgatcggagtggggacctgggcgatatggagcctctgaaaggaaccacacctcttatgcaggacgaaggtcaggaatccttggaggaggagctggacgtgctggtgctcgacgatgaggggggacaggtcagctacccgtctatgcagaagatctag

SEQ ID NO: 38041 - DNA, 6295 bp, Artificial Sequence
  derived and/or modified sequence
ctgccagatcagtttgtcaccacccaggctcccttgcctttggctgggtgcaacttccattttaggtgttggatctgagggggaaaaaaaagagagagggagagagagagaaagaagagcaggaaagatcccgaaaggaggaagaggtggcgaaaaatcaactgccctgctggatttgtctttctcagcaccttggcgaagccttgggtttctttcttaaaggactgatttttagaactccacatttgaggtgtgtggcttttgaagaaaatgtatgtactgacgggaaaaggaggataagcaagtcgaatttttgtcttacgctctctccttcctgcttcctccttgctgtggtggctgggatgcttcttccatgattttttgaatctagactgggctgttctctgtgttaaaccaatcagttgcgaccttctcttaacagtgtgaagtgagggggtctctctccctccttctccttcctctgtgattcaccttcctttttaccctgccctgcggcggctccgccccttaccttcatggacgactcagaggtggagtcgaccgccagcatcttggcctctgtgaaggaacaagaggcccagtttgagaagctgacccgggcgctggaggaggaacggcgccacgtctcggcgcagctggaacgcgtccgggtctcaccacaagatgccaacccactcatggccaacggcacactcacccgccggcatcagaacggccggtttgtgggcgatgctgaccttgaaagacagaaattttcagatttgaaactcaacggaccccaggatcacagtcaccttctatatagcaccatccccaggatgcaggagccggggcagattgtggagacctacacggaggaggatcctgagggagccatgtctgtagtctctgtggagacctcagatgatgggaccactcggcgcacagagaccacggtcaagaaagtagtgaagactgtgacaacacggacagtacagccagtcgctatgggaccagacgggttgcctgtggatgcttcatcagtttctaacaactatatccagactttgggtcgtgatttccgcaagaatggcaatgggggacctggtccctatgtggggcaagctggcactgctacccttcctaggaacttccactaccctcctgatggttatagtcgccactatgaagatggttatccaggtggcagtgataactatggcagtctgtcccgggtgacccgcattgaggagcggtataggcccagcatggaaggctaccgggcacctagtagacaggatgtgtatgggccccaaccccaggttcgggtaggtgggagcagcgtggatctgcatcgctttcatccagagccttatgggctagaggatgaccagcgtagtatgggctatgatgacctggattatggtatgatgtctgattatggcactgcccgtcggactgggacaccctctgaccctcgtcggcgcctcaggagctatgaagacatgattggtgaggaggtgccatcggatcaatactactgggctcctttggcccagcatgagcgaggaagtttagcaagcttggatagcctgcgcaaaggagggcctccacctcctaattggagacagccagagctgccagaggtgatcgccatgcttggattccgcttggatgctgtcaagtccaatgcagctgcatacctgcaacacttatgctaccgcaatgacaaggtgaagactgacgtgcggaagctcaagggcatcccagtactggtgggattgttagaccatcccaaaaaggaagtgcaccttggagcctgtggagctctcaagaatatctcttttggacgtgaccaggataacaagattgccataaaaaactgtgatggtgtgcctgcccttgtgcgattgcttcgaaaggctcgtgatatggaccttactgaagttattaccggaaccctgtggaatctttcatcccatgactcaatcaaaatggagattgtggaccatgcactgcatgccttgacagatgaagtgatcattcctcattctggttgggagcgggaacctaatgaagactgtaagccacgccacattgagtgggaatcggtgctcaccaacacagctggctgccttaggaatgtaagctcagagaggagtgaagctcgccggaaacttcgggaatgtgatggtttagttgatgccctcattttcattgttcaggctgagattgggcagaaggattcagacagcaagcttgtagagaactgtgtttgccttcttcggaacttatcatatcaagttcaccgggagatcccacaggcagagcgttaccaagaggcagctcccaatgttgccaacaatactgggccacatgctgccagttgctttggggccaagaagggcaaagggaaaaaacctatagaggatccagcaaacgatacagtggatttccctaaaagaacgagtccagctcgaggctatgagctcttatttcagccagaggtggttcggatatacatctcacttcttaaggagagcaagactcctgccatcctagaagcctcagctggagctatccagaacttgtgtgctgggcgctggacgtatggtcgatacatccgctctgctctgcgtcaagagaaggctctttctgccatagctgacctcctgactaatgaacatgaacgggtggtgaaagctgcatctggagcactgagaaacctggctgtggatgctcgcaacaaagaattaattggtaaacatgctattcctaacttggtaaagaatctgccaggaggacagcagaactcctcttggaatttctctgaggacactgtcatctctattttgaacactatcaacgaggttatcgctgagaacttggaggctgccaaaaagcttcgagagacacagggtattgagaagctggtgttgatcaacaaatcagggaaccgctcagaaaaagaagttcgagcagcagcacttgtattacagacaatctggggatataaggaactgcggaagccactggaaaaagaaggatggaagaaatcagactttcaggtgaatctaaacaatgcttcccgaagccagagcagtcattcatatgatgatagtactctccctctcattgaccggaaccaaaaatcagataagaaacctgatcgggaagaaattcagatgagcaatatgggatcaaacacaaaatcactagataacaactattccacaccaaatgagagaggagaccacaatagaacactggatcgatcgggggatctaggcgacatggagccattgaagggaacaacacccttgatgcaggacgaggggcaggaatctctggaggaagagttggatgtgttggttttggatgatgaggggggccaagtgtcttacccctccatgcagaagatttagcaccactatctccgttccatctgggcttatatgtacttttattttttggtggtgaaattgactgatgattttcctttttcttcgctggactattgtgccaactgccaggctgcctcctgcccttacagccctaagtggctgccttctttccatcaactcccaacttcttcctgtgaagtttaattgtctcaacgcctccccctcccccattccctccatttttctcccaagaaacctgactcaattatttgcatattttgagaaactgctgcagattagttctttttgccagttttccctggaactcctggccttttgtggaggggagggatggagagaataggaatcttcactagaagccgtgggaagaattggaagttacatgctgtatatgcaatgtccagcagtctgataaactgacgattcttaatcaagatttttttcctgatggggaagggacttttattttcttttagagaggggaaagtgtgagctcttcccttattcctaatggctatttttgaagcaaagaaggccagcaacattggcacatgccacctggcaaaggacccttgagtaagtgaaggtctcctaaaactgggattaagaaaccttgctctcctcatctccaaggcagggaccatcaagaacctacagactccatctcttctgcaagcctcatgccaaccctgggctattgctgctgccccttaaacacaggctgtccttaacccacctctcctgccctgtgatatgtctgctgagttggcctggccatttccaagaggctgtagaaaggggagaatgtcaaggaagacttttggtagagaaggagcagaaagatgtgtttttgggaagaagaagacctctaggaggagctagtaggaatgtacatgaagcaattagtctgaaactggcttccccactcccccgtttctccttttcctatccttataggcctgtcccttgcctctgccctggattggttggcaaactaaaggacttgatgtacataactcctgtcccttttcccttacaaggtggggattgcccctggctttgcctcttctttgtgcctttggcctggggtgcatctcctcccgcccttccatgtgcctttctttgcctctgcagtctcatttctcataattttgcaaattatattttgttgctttcttacctactattggccctaaatagcagaaagaagagaagtgaccgagagaacctcagattcttcattgaggattggtatagccatgatttcagtcatagcaagcttttgctcaacagcatatgggtgggattttgcaaaaatcctattctgatgaatctcaaagtaaggctggtaagagaagtgagtggtgtgactcttactccttaggtgcccagaatttaccatcatctctgaaggagttacagggaagtggtctccccaattctcccctccctccagtattgccccctctcactttagcatatattaattagcaggttgggctagagaaatcagctgctatgcgggttgattattattattatttctaatccttttccttatttgccttctactccccttaatctaatctaaaagctctgttccatgcaactggagttccttatccctctcttccccttcccttatatattgaggctatggggtaggagaaaagtgcacaacccaccaccccctttactcgtgcattaaaatttcttatttacccttttcccccttcccatttcttcccactttcatctaccttttctggcaaaaaggagccttttgctctctgtgaccctaagagcacactgcacagggaaaattgccccatccagacctggctccactcttgatctctcttgtcctcttctgctcttttcctggtgctcttttttctcggtggggtgtgggtaatagaacagccgtgggcttttggggacctttaacttttttttctctcttttgtttataaaaaacactaaacattcaattccagagaaccaaaaatcccaccttcccaccgaacactactaaggggcttgtgttctgctccataccttttctcttttctttctgtcttgttaatgcttttaaaaacaaatgagttttttatataaataaagtttttaaagtgtgtatgtggggggtctgtgtcatttcttcacttcaagctgttatttcttccctgctttgcatctttgttacttccttatgtatcagtgtcctttccagagcaaccagaaggaggttataccaggatttattttgagctcagccccaactctttatcaagcaacattcttgttaactatatgtgaaacattttttcttctgaagattcttaaaaattgaatgtggctgaagttgaacatgggagcttattgctaatttagagataggaaactgaagcataaagaattaatgacttactttaattactggaattcttctgcaacatttgacaaaactaaccttgaataaggcccactgtaatacgtagctctcttaaatataacacttaggactagaagattagaaactaccaatcccaactacgtaataggaaaatgtaggatcaaaaggcccatgtatataagtactgaccactgggccataatgttgcttctcaggctatatgcagtcctttagtcagaagtcaataggcctatttattaatattttacagaccatattacctggattaccagggactatctttgctgcagagatcaagggttaagatctatgggaagatacttatttttctgaggtccttatgtcctgtcatataattaaagactcaagagaatttatgtgaaatgctttctgtatgcccaaatctttagattaaaattatatagctgctcct

SEQ ID NO: 38042 - DNA, 5994 bp, Artificial Sequence
  derived and/or modified sequence
ctgccagatcagtttgtcaccacccaggctcccttgcctttggctgggtgcaacttccattttaggtgttggatctgagggggaaaaaaaagagagagggagagagagagaaagaagagcaggaaagatcccgaaaggaggaagaggtggcgaaaaatcaactgccctgctggatttgtctttctcagcaccttggcgaagccttgggtttctttcttaaaggactgatttttagaactccacatttgaggtggagtcgaccgccagcatcttggcctctgtgaaggaacaagaggcccagtttgagaagctgacccgggcgctggaggaggaacggcgccacgtctcggcgcagctggaacgcgtccgggtctcaccacaagatgccaacccactcatggccaacggcacactcacccgccggcatcagaacggccggtttgtgggcgatgctgaccttgaaagacagaaattttcagatttgaaactcaacggaccccaggatcacagtcaccttctatatagcaccatccccaggatgcaggagccggggcagattgtggagacctacacggaggaggatcctgagggagccatgtctgtagtctctgtggagacctcagatgatgggaccactcggcgcacagagaccacggtcaagaaagtagtgaagactgtgacaacacggacagtacagccagtcgctatgggaccagacgggttgcctgtggatgcttcatcagtttctaacaactatatccagactttgggtcgtgatttccgcaagaatggcaatgggggacctggtccctatgtggggcaagctggcactgctacccttcctaggaacttccactaccctcctgatggttatagtcgccactatgaagatggttatccaggtggcagtgataactatggcagtctgtcccgggtgacccgcattgaggagcggtataggcccagcatggaaggctaccgggcacctagtagacaggatgtgtatgggccccaaccccaggttcgggtaggtgggagcagcgtggatctgcatcgctttcatccagagccttatgggctagaggatgaccagcgtagtatgggctatgatgacctggattatggtatgatgtctgattatggcactgcccgtcggactgggacaccctctgaccctcgtcggcgcctcaggagctatgaagacatgattggtgaggaggtgccatcggatcaatactactgggctcctttggcccagcatgagcgaggaagtttagcaagcttggatagcctgcgcaaaggagggcctccacctcctaattggagacagccagagctgccagaggtgatcgccatgcttggattccgcttggatgctgtcaagtccaatgcagctgcatacctgcaacacttatgctaccgcaatgacaaggtgaagactgacgtgcggaagctcaagggcatcccagtactggtgggattgttagaccatcccaaaaaggaagtgcaccttggagcctgtggagctctcaagaatatctcttttggacgtgaccaggataacaagattgccataaaaaactgtgatggtgtgcctgcccttgtgcgattgcttcgaaaggctcgtgatatggaccttactgaagttattaccggaaccctgtggaatctttcatcccatgactcaatcaaaatggagattgtggaccatgcactgcatgccttgacagatgaagtgatcattcctcattctggttgggagcgggaacctaatgaagactgtaagccacgccacattgagtgggaatcggtgctcaccaacacagctggctgccttaggaatgtaagctcagagaggagtgaagctcgccggaaacttcgggaatgtgatggtttagttgatgccctcattttcattgttcaggctgagattgggcagaaggattcagacagcaagcttgtagagaactgtgtttgccttcttcggaacttatcatatcaagttcaccgggagatcccacaggcagagcgttaccaagaggcagctcccaatgttgccaacaatactgggccacatgctgccagttgctttggggccaagaagggcaaagggaaaaaacctatagaggatccagcaaacgatacagtggatttccctaaaagaacgagtccagctcgaggctatgagctcttatttcagccagaggtggttcggatatacatctcacttcttaaggagagcaagactcctgccatcctagaagcctcagctggagctatccagaacttgtgtgctgggcgctggacgtatggtcgatacatccgctctgctctgcgtcaagagaaggctctttctgccatagctgacctcctgactaatgaacatgaacgggtggtgaaagctgcatctggagcactgagaaacctggctgtggatgctcgcaacaaagaattaattggtaaacatgctattcctaacttggtaaagaatctgccaggaggacagcagaactcctcttggaatttctctgaggacactgtcatctctattttgaacactatcaacgaggttatcgctgagaacttggaggctgccaaaaagcttcgagagacacagggtattgagaagctggtgttgatcaacaaatcagggaaccgctcagaaaaagaagttcgagcagcagcacttgtattacagacaatctggggatataaggaactgcggaagccactggaaaaagaaggatggaagaaatcagactttcaggtgaatctaaacaatgcttcccgaagccagagcagtcattcatatgatgatagtactctccctctcattgaccggaaccaaaaatcagataagaaacctgatcgggaagaaattcagatgagcaatatgggatcaaacacaaaatcactagataacaactattccacaccaaatgagagaggagaccacaatagaacactggatcgatcgggggatctaggcgacatggagccattgaagggaacaacacccttgatgcaggacgaggggcaggaatctctggaggaagagttggatgtgttggttttggatgatgaggggggccaagtgtcttacccctccatgcagaagatttagcaccactatctccgttccatctgggcttatatgtacttttattttttggtggtgaaattgactgatgattttcctttttcttcgctggactattgtgccaactgccaggctgcctcctgcccttacagccctaagtggctgccttctttccatcaactcccaacttcttcctgtgaagtttaattgtctcaacgcctccccctcccccattccctccatttttctcccaagaaacctgactcaattatttgcatattttgagaaactgctgcagattagttctttttgccagttttccctggaactcctggccttttgtggaggggagggatggagagaataggaatcttcactagaagccgtgggaagaattggaagttacatgctgtatatgcaatgtccagcagtctgataaactgacgattcttaatcaagatttttttcctgatggggaagggacttttattttcttttagagaggggaaagtgtgagctcttcccttattcctaatggctatttttgaagcaaagaaggccagcaacattggcacatgccacctggcaaaggacccttgagtaagtgaaggtctcctaaaactgggattaagaaaccttgctctcctcatctccaaggcagggaccatcaagaacctacagactccatctcttctgcaagcctcatgccaaccctgggctattgctgctgccccttaaacacaggctgtccttaacccacctctcctgccctgtgatatgtctgctgagttggcctggccatttccaagaggctgtagaaaggggagaatgtcaaggaagacttttggtagagaaggagcagaaagatgtgtttttgggaagaagaagacctctaggaggagctagtaggaatgtacatgaagcaattagtctgaaactggcttccccactcccccgtttctccttttcctatccttataggcctgtcccttgcctctgccctggattggttggcaaactaaaggacttgatgtacataactcctgtcccttttcccttacaaggtggggattgcccctggctttgcctcttctttgtgcctttggcctggggtgcatctcctcccgcccttccatgtgcctttctttgcctctgcagtctcatttctcataattttgcaaattatattttgttgctttcttacctactattggccctaaatagcagaaagaagagaagtgaccgagagaacctcagattcttcattgaggattggtatagccatgatttcagtcatagcaagcttttgctcaacagcatatgggtgggattttgcaaaaatcctattctgatgaatctcaaagtaaggctggtaagagaagtgagtggtgtgactcttactccttaggtgcccagaatttaccatcatctctgaaggagttacagggaagtggtctccccaattctcccctccctccagtattgccccctctcactttagcatatattaattagcaggttgggctagagaaatcagctgctatgcgggttgattattattattatttctaatccttttccttatttgccttctactccccttaatctaatctaaaagctctgttccatgcaactggagttccttatccctctcttccccttcccttatatattgaggctatggggtaggagaaaagtgcacaacccaccaccccctttactcgtgcattaaaatttcttatttacccttttcccccttcccatttcttcccactttcatctaccttttctggcaaaaaggagccttttgctctctgtgaccctaagagcacactgcacagggaaaattgccccatccagacctggctccactcttgatctctcttgtcctcttctgctcttttcctggtgctcttttttctcggtggggtgtgggtaatagaacagccgtgggcttttggggacctttaacttttttttctctcttttgtttataaaaaacactaaacattcaattccagagaaccaaaaatcccaccttcccaccgaacactactaaggggcttgtgttctgctccataccttttctcttttctttctgtcttgttaatgcttttaaaaacaaatgagttttttatataaataaagtttttaaagtgtgtatgtggggggtctgtgtcatttcttcacttcaagctgttatttcttccctgctttgcatctttgttacttccttatgtatcagtgtcctttccagagcaaccagaaggaggttataccaggatttattttgagctcagccccaactctttatcaagcaacattcttgttaactatatgtgaaacattttttcttctgaagattcttaaaaattgaatgtggctgaagttgaacatgggagcttattgctaatttagagataggaaactgaagcataaagaattaatgacttactttaattactggaattcttctgcaacatttgacaaaactaaccttgaataaggcccactgtaatacgtagctctcttaaatataacacttaggactagaagattagaaactaccaatcccaactacgtaataggaaaatgtaggatcaaaaggcccatgtatataagtactgaccactgggccataatgttgcttctcaggctatatgcagtcctttagtcagaagtcaataggcctatttattaatattttacagaccatattacctggattaccagggactatctttgctgcagagatcaagggttaagatctatgggaagatacttatttttctgaggtccttatgtcctgtcatataattaaagactcaagagaatttatgtgaaatgctttctgtatgcccaaatctttagattaaaattatatagctgctcct

SEQ ID NO: 38043 - DNA, 2889 bp, Artificial Sequence
  derived and/or modified sequence
atggacgacagcgaggtggagagcaccgccagcatcctggccagcgtgaaggagcaggaggcccagttcgagaagctgaccagagccctggaggaggagagaagacacgtgagcgcccagctggagagagtgagagtgagcccccaggacgccaaccccctgatggccaacggcaccctgaccagaagacaccagaacggcagattcgtgggcgacgccgacctggagagacagaagttcagcgacctgaagctgaacggcccccaggaccacagccacctgctgtacagcaccatccccagaatgcaggagcccggccagatcgtggagacctacaccgaggaggaccccgagggcgccatgagcgtggtgagcgtggagaccagcgacgacggcaccaccagaagaaccgagaccaccgtgaagaaggtggtgaagaccgtgaccaccagaaccgtgcagcccgtggccatgggccccgacggcctgcccgtggacgccagcagcgtgagcaacaactacatccagaccctgggcagagacttcagaaagaacggcaacggcggccccggcccctacgtgggccaggccggcaccgccaccctgcccagaaacttccactacccccccgacggctacagcagacactacgaggacggctaccccggcggcagcgacaactacggcagcctgagcagagtgaccagaatcgaggagagatacagacccagcatggagggctacagagcccccagcagacaggacgtgtacggcccccagccccaggtgagagtgggcggcagcagcgtggacctgcacagattccaccccgagccctacggcctggaggacgaccagagaagcatgggctacgacgacctggactacggcatgatgagcgactacggcaccgccagaagaaccggcacccccagcgaccccagaagaagactgagaagctacgaggacatgatcggcgaggaggtgcccagcgaccagtactactgggcccccctggcccagcacgagagaggcagcctggccagcctggacagcctgagaaagggcggcccccccccccccaactggagacagcccgagctgcccgaggtgatcgccatgctgggcttcagactggacgccgtgaagagcaacgccgccgcctacctgcagcacctgtgctacagaaacgacaaggtgaagaccgacgtgagaaagctgaagggcatccccgtgctggtgggcctgctggaccaccccaagaaggaggtgcacctgggcgcctgcggcgccctgaagaacatcagcttcggcagagaccaggacaacaagatcgccatcaagaactgcgacggcgtgcccgccctggtgagactgctgagaaaggccagagacatggacctgaccgaggtgatcaccggcaccctgtggaacctgagcagccacgacagcatcaagatggagatcgtggaccacgccctgcacgccctgaccgacgaggtgatcatcccccacagcggctgggagagagagcccaacgaggactgcaagcccagacacatcgagtgggagagcgtgctgaccaacaccgccggctgcctgagaaacgtgagcagcgagagaagcgaggccagaagaaagctgagagagtgcgacggcctggtggacgccctgatcttcatcgtgcaggccgagatcggccagaaggacagcgacagcaagctggtggagaactgcgtgtgcctgctgagaaacctgagctaccaggtgcacagagagatcccccaggccgagagataccaggaggccgcccccaacgtggccaacaacaccggcccccacgccgccagctgcttcggcgccaagaagggcaagggcaagaagcccatcgaggaccccgccaacgacaccgtggacttccccaagagaaccagccccgccagaggctacgagctgctgttccagcccgaggtggtgagaatctacatcagcctgctgaaggagagcaagacccccgccatcctggaggccagcgccggcgccatccagaacctgtgcgccggcagatggacctacggcagatacatcagaagcgccctgagacaggagaaggccctgagcgccatcgccgacctgctgaccaacgagcacgagagagtggtgaaggccgccagcggcgccctgagaaacctggccgtggacgccagaaacaaggagctgatcggcaagcacgccatccccaacctggtgaagaacctgcccggcggccagcagaacagcagctggaacttcagcgaggacaccgtgatcagcatcctgaacaccatcaacgaggtgatcgccgagaacctggaggccgccaagaagctgagagagacccagggcatcgagaagctggtgctgatcaacaagagcggcaacagaagcgagaaggaggtgagagccgccgccctggtgctgcagaccatctggggctacaaggagctgagaaagcccctggagaaggagggctggaagaagagcgacttccaggtgaacctgaacaacgccagcagaagccagagcagccacagctacgacgacagcaccctgcccctgatcgacagaaaccagaagagcgacaagaagcccgacagagaggagatccagatgagcaacatgggcagcaacaccaagagcctggacaacaactacagcacccccaacgagagaggcgaccacaacagaaccctggacagaagcggcgacctgggcgacatggagcccctgaagggcaccacccccctgatgcaggacgagggccaggagagcctggaggaggagctggacgtgctggtgctggacgacgagggcggccaggtgagctaccccagcatgcagaagatctag

SEQ ID NO: 38044 - protein, 933 aa, Artificial Sequence
  derived and/or modified sequence
MDDSEVESTASILASVKEQEAQFEKLTRALEEERRHVSAQLERVRVSPQDANPLMANGTLTRRHQNGRFVGDADLERQKFSDLKLNGPQDHSHLLYSTIPRMQEPGQIVETYTEEDPEGAMSVVSVETSDDGTTRRTETTVKKVVKTVTTRTVQPVAMGPDGLPVDASSVSNNYIQTLGRDFRKNGNGGPGPYVGQAGTATLPRNFHYPPDGYSRHYEDGYPGGSDNYGSLSRVTRIEERYRPSMEGYRAPSRQDVYGPQPQVRVGGSSVDLHRFHPEPYGLEDDQRSMGYDDLDYGMMSDYGTARRTGTPSDPRRRLRSYEDMIGEEVPSDQYYWAPLAQHERGSLASLDSLRKGGPPPPNWRQPELPEVIAMLGFRLDAVKSNAAAYLQHLCYRNDKVKTDVRKLKGIPVLVGLLDHPKKEVHLGACGALKNISFGRDQDNKIAIKNCDGVPALVRLLRKARDMDLTEVITGTLWNLSSHDSIKMEIVDHALHALTDEVIIPHSGWEREPNEDCKPRHIEWESVLTNTAGCLRNVSSERSEARRKLRECDGLVDALIFIVQAEIGQKDSDSKLVENCVCLLRNLSYQVHREIPQAERYQEAAPNVANNTGPHAASCFGAKKGKGKKPIEDPANDTVDFPKRTSPARGYELLFQPEVVRIYISLLKESKTPAILEASAGAIQNLCAGRWTYGRYIRSALRQEKALSAIADLLTNEHERVVKAASGALRNLAVDARNKELIGKHAIPNLVKNLPGGQQNSSWNFSEDTVISILNTINEVIAENLEAAKKLRETQGIEKLVLINKSGNRSEKEVRAAALVLQTIWGYKELRKPLEKEGWKKSDFQVNLNNASRSQSSHSYDDSTLPLIDRNQKSDKKPDREEIQMSNMGSNTKSLDNNYSTPNERGDHNRTLDRSGDLGDMEPLKGTTPLMQKI

SEQ ID NO: 38045 - protein, 832 aa, Artificial Sequence
  derived and/or modified sequence
MQEPGQIVETYTEEDPEGAMSVVSVETSDDGTTRRTETTVKKVVKTVTTRTVQPVAMGPDGLPVDASSVSNNYIQTLGRDFRKNGNGGPGPYVGQAGTATLPRNFHYPPDGYSRHYEDGYPGGSDNYGSLSRVTRIEERYRPSMEGYRAPSRQDVYGPQPQVRVGGSSVDLHRFHPEPYGLEDDQRSMGYDDLDYGMMSDYGTARRTGTPSDPRRRLRSYEDMIGEEVPSDQYYWAPLAQHERGSLASLDSLRKGGPPPPNWRQPELPEVIAMLGFRLDAVKSNAAAYLQHLCYRNDKVKTDVRKLKGIPVLVGLLDHPKKEVHLGACGALKNISFGRDQDNKIAIKNCDGVPALVRLLRKARDMDLTEVITGTLWNLSSHDSIKMEIVDHALHALTDEVIIPHSGWEREPNEDCKPRHIEWESVLTNTAGCLRNVSSERSEARRKLRECDGLVDALIFIVQAEIGQKDSDSKLVENCVCLLRNLSYQVHREIPQAERYQEAAPNVANNTGPHAASCFGAKKGKGKKPIEDPANDTVDFPKRTSPARGYELLFQPEVVRIYISLLKESKTPAILEASAGAIQNLCAGRWTYGRYIRSALRQEKALSAIADLLTNEHERVVKAASGALRNLAVDARNKELIGKHAIPNLVKNLPGGQQNSSWNFSEDTVISILNTINEVIAENLEAAKKLRETQGIEKLVLINKSGNRSEKEVRAAALVLQTIWGYKELRKPLEKEGWKKSDFQVNLNNASRSQSSHSYDDSTLPLIDRNQKSDKKPDREEIQMSNMGSNTKSLDNNYSTPNERGDHNRTLDRSGDLGDMEPLKGTTPLMQKI

SEQ ID NO: 38046 - protein, 610 aa, Artificial Sequence
  derived and/or modified sequence
MIGEEVPSDQYYWAPLAQHERGSLASLDSLRKGGPPPPNWRQPELPEVIAMLGFRLDAVKSNAAAYLQHLCYRNDKVKTDVRKLKGIPVLVGLLDHPKKEVHLGACGALKNISFGRDQDNKIAIKNCDGVPALVRLLRKARDMDLTEVITGTLWNLSSHDSIKMEIVDHALHALTDEVIIPHSGWEREPNEDCKPRHIEWESVLTNTAGCLRNVSSERSEARRKLRECDGLVDALIFIVQAEIGQKDSDSKLVENCVCLLRNLSYQVHREIPQAERYQEAAPNVANNTGPHAASCFGAKKGKGKKPIEDPANDTVDFPKRTSPARGYELLFQPEVVRIYISLLKESKTPAILEASAGAIQNLCAGRWTYGRYIRSALRQEKALSAIADLLTNEHERVVKAASGALRNLAVDARNKELIGKHAIPNLVKNLPGGQQNSSWNFSEDTVISILNTINEVIAENLEAAKKLRETQGIEKLVLINKSGNRSEKEVRAAALVLQTIWGYKELRKPLEKEGWKKSDFQVNLNNASRSQSSHSYDDSTLPLIDRNQKSDKKPDREEIQMSNMGSNTKSLDNNYSTPNERGDHNRTLDRSGDLGDMEPLKGTTPLMQKI

SEQ ID NO: 38047 - protein, 879 aa, Artificial Sequence
  derived and/or modified sequence
MANGTLTRRHQNGRFVGDADLERQKFSDLKLNGPQDHSHLLYSTIPRMQEPGQIVETYTEEDPEGAMSVVSVETSDDGTTRRTETTVKKVVKTVTTRTVQPVAMGPDGLPVDASSVSNNYIQTLGRDFRKNGNGGPGPYVGQAGTATLPRNFHYPPDGYSRHYEDGYPGGSDNYGSLSRVTRIEERYRPSMEGYRAPSRQDVYGPQPQVRVGGSSVDLHRFHPEPYGLEDDQRSMGYDDLDYGMMSDYGTARRTGTPSDPRRRLRSYEDMIGEEVPSDQYYWAPLAQHERGSLASLDSLRKGGPPPPNWRQPELPEVIAMLGFRLDAVKSNAAAYLQHLCYRNDKVKTDVRKLKGIPVLVGLLDHPKKEVHLGACGALKNISFGRDQDNKIAIKNCDGVPALVRLLRKARDMDLTEVITGTLWNLSSHDSIKMEIVDHALHALTDEVIIPHSGWEREPNEDCKPRHIEWESVLTNTAGCLRNVSSERSEARRKLRECDGLVDALIFIVQAEIGQKDSDSKLVENCVCLLRNLSYQVHREIPQAERYQEAAPNVANNTGPHAASCFGAKKGKGKKPIEDPANDTVDFPKRTSPARGYELLFQPEVVRIYISLLKESKTPAILEASAGAIQNLCAGRWTYGRYIRSALRQEKALSAIADLLTNEHERVVKAASGALRNLAVDARNKELIGKHAIPNLVKNLPGGQQNSSWNFSEDTVISILNTINEVIAENLEAAKKLRETQGIEKLVLINKSGNRSEKEVRAAALVLQTIWGYKELRKPLEKEGWKKSDFQVNLNNASRSQSSHSYDDSTLPLIDRNQKSDKKPDREEIQMSNMGSNTKSLDNNYSTPNERGDHNRTLDRSGDLGDMEPLKGTTPLMQKI

SEQ ID NO: 38048 - DNA, 2802 bp, Artificial Sequence
  derived and/or modified sequence
atggatgattctgaagttgaaagtactgcttccatcctggcctccgtcaaggagcaagaggcccaatttgagaaactcacacgtgctctggaagaggagcgtaggcacgtgtcagcccagctcgaacgggtaagggtgagtccgcaggatgcaaaccctcttatggcgaacgggaccctgaccaggcggcaccaaaacggaagattcgtgggagacgccgaccttgagaggcaaaagttctccgaccttaaactcaatggccctcaggatcactcccatctgctctactctacaatcccaaggatgcaagagcctgggcagattgtggagacctacactgaagaagatccagagggagccatgtccgtggtgagcgtcgagacttcagacgacggaaccacacgacgcacagaaaccacagtgaagaaggtcgtcaaaacggtaacaacgcgtacggtccagcccgtggctatgggcccggacggcttacctgttgacgcctccagcgtctcgaacaattacatacagactctcgggcgcgacttccgaaagaatggaaatggcggcccggggccatacgtgggtcaagcagggacagctactttgcctaggaacttccattacccgccagacggctattccagacattacgaagatggataccccggtggttccgacaattatggaagcctcagcagagttacccggattgaggaacgctataggccttctatggagggctaccgagctccttcccggcaggatgtgtatgggcctcaaccacaagtccgcgtggggggctcaagcgtagatctgcacagattccacccagaaccttatggcttggaggacgaccagaggtctatgggctacgatgatctggattacggcatgatgagcgattacggcacagctaggagaacgggcacaccgtcagatccacgccgtcgtctcaggagttatgaagatatgataggggaagaagtgccttctgatcaatactactgggcacccctggcacagcatgagcgcggctcgttggccagtctggatagcctacgcaagggtggccctcctccacccaactggcggcagccagaactccctgaagtcatcgcgatgctcgggttccggctggatgctgttaagtcaaatgccgccgcttacttgcagcatctctgttatcgtaacgataaagtgaagacagatgtgaggaaacttaaaggcatcccggttcttgtggggctgttggaccaccctaaaaaggaagttcatttgggagcttgtggggccttgaaaaacatctctttcggccgggatcaagacaacaagatcgctataaagaattgcgatggagtgcccgctttagttagattgctgcgaaaagctcgggacatggacctgaccgaggtcatcaccggtacgctgtggaacttaagttcacacgatagcatcaagatggaaattgtcgaccacgccctacatgcacttactgacgaagtgattatcccccatagcgggtgggagagagagcccaacgaggactgtaagcctagacacatcgagtgggaaagcgtcctcactaatacggccggttgcttacggaacgtttcctcagagcgctcagaggccaggcggaagctcagggaatgtgacgggctggtcgacgcactgatcttcatcgtccaagcggaaataggacaaaaagactctgacagcaaactcgtcgagaactgcgtctgtctgctcaggaatctatcctaccaggttcacagggaaataccccaggcagaacggtatcaggaggccgcacccaatgtcgcgaataatacaggacctcatgccgcaagctgcttcggcgctaaaaaagggaagggcaaaaaacctatcgaggatcccgccaatgatacagttgacttcccaaaacgcaccagccccgcccgcggctacgagcttctgtttcagcccgaagtggtcaggatctacatttcgctgctgaaggaaagcaagaccccagctattctggaagcgagtgccggagctatacagaatctttgcgccggtagatggacttatgggcgctacattcgaagtgctttgcgtcaggagaaggccctgagcgccattgcggacctgcttactaatgaacacgagagggtggtgaaagccgcttccggggccctgaggaatctagctgttgacgccagaaacaaggagctgattggcaagcatgcaattcctaatctcgtgaagaaccttccaggtgggcagcaaaattcgagctggaattttagtgaggatacagtgatctctattctgaacaccatcaatgaagttattgcagagaatttggaggctgccaaaaagcttcgggaaacccagggtattgagaaattggtacttattaataagagcggcaaccggtcagagaaggaggtgcgagctgctgcactggtgctgcagaccatctggggctataaggagctacgcaagcccttggaaaaggagggctggaaaaagagcgacttccaggtgaacctgaataatgcctcccgatcacaatcttcacattcttacgatgatagcacactgccactgatagaccggaatcagaagagcgacaagaagcccgacagagaagaaattcaaatgagtaacatgggctccaacaccaaatcgttggataacaactattctacccctaacgagcgtggcgatcataatcgtacactagacagaagtggagatctgggagatatggagcccctgaaaggaactaccccactgatgcaaaaaatctag

SEQ ID NO: 38049 - DNA, 2802 bp, Artificial Sequence
  derived and/or modified sequence
atggatgactccgaagtcgaaagcacggccagtattctcgcctcggtgaaggaacaggaggcccagtttgagaaactgactagagcccttgaagaggaaaggaggcacgtctccgcacagcttgaacgggtccgggtgtctccccaggatgcgaatcctctaatggccaacggcaccctgactaggagacaccagaatggcagattcgtgggcgatgctgatctggagcggcagaaatttagcgatcttaaattgaacggaccccaggatcattcccatcttctgtacagcactataccccgcatgcaagaacccggacagatcgtcgaaacctacacggaagaggacccagagggcgctatgagcgtagtgtccgtagagactagcgatgatgggaccacgcggcgcactgaaaccaccgtgaaaaaggtcgtcaagactgtcacaaccaggactgtacaaccagtggccatgggcccagacggcctcccggtcgacgcctcaagcgtctccaataactacatacagaccctggggagagattttcgcaaaaatggcaacggggggcccggcccctacgtaggccaagcaggcaccgctactctccccaggaacttccactatcctcccgacggatatagtcgacattacgaagatggatacccaggcggcagtgataactatggcagcctctctagggtgaccaggatcgaagaacggtacaggccctccatggagggctacagagctccttccaggcaagatgtctatgggccacagccccaggtaagggtcggaggctcgagcgtggacttacatcgcttccatccggagccatacggcctagaggacgaccagagatccatgggttatgatgatttggattacggtatgatgtcggactacgggacagcacggcggaccggaacaccgtcagaccctcgcagacgacttcggtcctatgaagatatgatcggagaagaggtgcccagcgaccagtactattgggcgcccctcgcacagcacgagagggggtctctggcaagcttggactctttaagaaaggggggacccccccctcccaattggagacagcctgagctgcccgaagttattgccatgctgggattccgcctcgatgccgtaaaaagcaatgccgccgcctacctgcagcacctgtgctaccgcaacgataaagtgaagacagatgtgcggaagctgaaagggattcctgtgctggtgggcctgctggaccatccaaagaaggaggttcacctgggtgcttgtggcgcccttaaaaacatcagtttcggtagagatcaagacaataagattgctatcaagaactgtgacggtgtgcctgcactggttagactgttgagaaaggccagagatatggacttgacagaggtcatcaccggaacgttgtggaatctatccagccacgactccataaaaatggagatcgttgaccacgctcttcacgctctgactgacgaggtcattatcccacattcaggctgggagcgggaacccaatgaggactgcaagccgcgccacattgagtgggagagtgtcctgactaataccgctggatgcctgcggaacgtttccagtgagcggagcgaggcccgtaggaagttgcgggagtgcgatgggctggtggacgctttaatttttatagtccaggccgagattggtcagaaagacagcgactcaaagctcgtcgaaaactgcgtgtgcctgctacgaaatctcagctatcaggtgcaccgcgagattccacaagccgaaaggtatcaggaagcagctccgaacgtcgcaaacaatacaggaccacacgcagcctcttgctttggcgctaaaaagggcaaaggaaagaaacccattgaagaccctgcgaacgatacggttgatttccccaagaggacaagccctgcccggggatacgaactgctcttccagcctgaagtggtccggatttacatatccctgctgaaggaaagtaaaactccggcgatcttagaggcaagcgccggcgctatacagaacctgtgcgccggacggtggacttacggtcggtacattagatctgctctacgacaggagaaagccctctcagcaatcgctgatctgcttactaatgaacacgagcgcgtcgttaaagcagcttccggcgcgctgagaaatctggctgtggacgcacgcaacaaggaactcataggaaagcatgcaatacccaatctagtgaagaaccttccaggcggccagcagaatagcagttggaactttagcgaagacacagtgatttctatcctgaacactatcaacgaggtgatcgctgagaatttggaagcagccaagaagttaagggagactcagggaatcgagaaactggtgttgattaacaaaagtggaaatcgaagtgagaaagaggtgcgcgcagcagccctcgtacttcagacaatctggggatacaaagagttgagaaagcccctcgagaaggaggggtggaagaagtctgacttccaggtaaacctgaacaatgccagtaggtcgcagtcctctcactcttatgatgactccacattgcccctgatcgaccgaaatcaaaagtctgataaaaaaccagatcgagaggagatccaaatgtcaaacatgggcagcaatacaaagtcacttgataacaactacagtacccccaatgaacgcggcgatcacaaccgtaccctagatcggtcgggtgacctaggggacatggagccactgaagggcactacgcccctgatgcagaaaatctag

SEQ ID NO: 38050 - DNA, 2802 bp, Artificial Sequence
  derived and/or modified sequence
atggacgattccgaagttgaaagcaccgcaagtatcctggcctcagttaaggagcaggaggcccagttcgagaagttaacaagggctctggaagaagagcggcggcatgttagtgcacagcttgagcgcgtccgcgtgtcaccacaggacgccaatcccctgatggctaacggcaccctgactcgcagacaccaaaatggccgttttgtaggagacgcagaccttgaacgccagaaattcagcgatctgaagttgaacggaccgcaagaccacagccacctcctttactccactataccaaggatgcaggagccaggacagatcgttgagacatacacagaagaagatccggagggcgctatgtcagttgtaagtgtagagacttccgatgacgggacaacacgccgaacggagactaccgtgaagaaagtggttaagacagtgacaacaagaaccgtgcagccagtcgctatgggtccagatggtcttcctgtggacgcttcatccgttagcaacaactatatacaaacactgggaagggactttcggaagaatgggaacgggggccctggcccttacgtggggcaggctgggacggccacacttcctcgaaactttcattacccccccgatgggtactcgaggcactacgaggatggataccccggaggcagcgacaattacggaagtctgtctagggtcacacgcattgaggagagataccgaccctctatggagggttacagggccccttcgagacaagacgtgtacggaccacaaccacaggtgcgggtggggggctcttctgtggaccttcaccgttttcatcccgagccttatggtcttgaggacgaccagcgatctatgggatatgatgacctggactacggcatgatgtcggactatggaacagctagaagaaccgggactcccagcgacccgcggcgccggctccgaagctatgaggacatgataggagaggaggtcccgtcagaccaatattactgggcacccctggcccaacatgaaagaggttcactggcctctctggacagtctcaggaaggggggcccacctccacccaattggcggcagcctgaattgccagaggtcattgctatgttgggatttcgcctggacgctgtaaaatctaacgctgctgcttacctccagcacctctgttaccggaatgacaaggtaaaaactgatgtgagaaagctcaagggcattccagtcctggtgggcctgctcgaccacccaaaaaaggaagtgcaccttggcgcatgcggagccctcaagaatatcagtttcgggcgggaccaggataacaaaattgcgattaagaactgcgatggggttcccgctctggttagactgctccgaaaggccagagacatggacttaactgaggtcataacaggcacactgtggaacttgtcttcccacgactctattaagatggaaatcgttgaccacgcgctgcacgctcttaccgatgaggtgataattcctcactctggctgggagcgggagcccaatgaggattgcaaacctcgacatattgaatgggagtccgtgctgacgaataccgcgggatgtctgcgcaacgtctcctctgagaggagcgaggcccggagaaagttgagggaatgtgatggacttgttgacgcactgatctttattgtccaggctgagatcggtcagaaggattccgactctaaacttgtcgagaactgcgtgtgcctgttacgcaatctctcgtaccaggtgcaccgagagatcccccaggcagagaggtaccaagaggcagcaccaaacgtggcaaataatacaggcccccacgccgcgtcctgtttcggcgctaagaagggaaaaggaaaaaagcccattgaagatccagcaaatgatactgtggacttccctaagcgtacctctccagcaaggggctacgaactcctgtttcagcccgaagtagttcggatctacattagtttgttgaaggagtccaaaactcccgcgatcctggaagcctccgccggagccattcagaatttgtgcgccgggcgatggacttacgggaggtacattcggtccgcgctcagacaggagaaggctctgtcggctattgcagacctcctcacaaacgagcatgaacgtgttgtcaaggcagcctctggcgctcttagaaacctggccgtagatgccaggaataaggaactgattggaaagcacgcgatccccaatctggtaaagaacctgcccggtgggcagcagaatagcagctggaacttctcagaggacacggtgatcagtatcctgaatacgatcaatgaggttatcgcagagaatctggaagccgcaaaaaaactccgggaaacccagggtatcgaaaaacttgtgctgatcaacaaatcgggaaacagatctgaaaaagaagttagggccgctgccttagttctgcaaacaatctggggttataaagagctgcgaaagccacttgagaaggaaggctggaaaaaatcggattttcaggtgaatttgaacaacgcaagccggtctcaaagcagccatagctatgacgattcaacgctgccgctgatcgacaggaaccaaaaaagtgacaagaagccggaccgggaggagatccagatgtctaacatggggtcgaatacaaaaagcctggataataattactccactccaaacgagagaggcgaccataatcgaaccctggataggtccggggatcttggagatatggagcccctgaaaggaaccaccccactaatgcagaaaatctag

SEQ ID NO: 38051 - DNA, 2802 bp, Artificial Sequence
  derived and/or modified sequence
atggacgattcagaagttgagagtactgcgagcatcctcgcgtcagtgaaggaacaagaagcacagtttgagaagctgaccagggctctggaggaggaacgcaggcatgttagcgctcagttggagcgggttcgcgtcagtccccaggacgccaatcctctcatggccaacggcaccctcaccagacggcaccaaaatggtagattcgtcggtgatgccgacctagagcgtcagaagttttccgaccttaaactgaacggcccccaggatcactcgcacctgttgtacagcacgattcccaggatgcaggagcccggccaaatagtcgagacttataccgaggaagacccagagggcgctatgtctgtagtgagtgtggaaacatcggacgacgggaccactcgtagaacagagaccaccgtcaagaaagtcgtgaaaacagtaacaactcggaccgtccagcctgtggcaatgggccctgacgggctgcccgtggatgctagctctgtttcaaacaactacattcagaccctggggagggactttcgcaaaaatggcaacgggggtcccggcccgtatgtcggccaagccggcaccgctacactacccaggaactttcattatccccccgatggctattcacgacattatgaagacgggtatccaggcggcagcgacaattacggtagtctctctagggtgacaagaattgaggaaaggtacagaccaagtatggagggttaccgcgcccccagccggcaggacgtgtacggcccacaaccgcaagtgagagtgggcggcagtagcgttgacctgcataggttccaccccgaaccctacggtcttgaagatgaccagcgaagtatggggtatgatgatctggattacggaatgatgtcggattatggtaccgcaagacgcaccgggacccctagcgatcctaggaggaggctgcggtcatatgaggacatgatcggggaagaagtgcccagcgatcaatattattgggcccccctggcccagcatgaaagagggtccctcgcctcccttgacagcttgcggaagggcggacctcctccccccaactggcgccagcctgagctgcctgaagtcatagccatgctgggctttcgactggacgcagtgaagtcaaacgcagctgcctatctgcaacacctgtgctacaggaacgataaggttaaaactgacgtgcgaaaacttaaaggcatcccagtgttagtaggacttctggatcatcctaagaaagaggttcacctcggtgcttgcggggctctgaaaaacataagtttcggacgagatcaggacaataagattgctatcaaaaactgtgatggcgtacctgctttagtgaggctccttagaaaagcacgcgatatggatctgacagaggtcattacgggaactctttggaacctgagttcacatgactctatcaaaatggagatcgtcgatcatgcacttcatgcgttgaccgacgaagttattattcctcattcaggctgggagcgggaacccaatgaggactgtaaaccccgccatatagagtgggagagcgtgctgaccaacacagctggatgtttgcgcaatgtcagcagcgaacgctcagaggcccgccgcaaactccgtgaatgcgacggactcgtagatgcactcatcttcatcgtccaggccgaaattggccagaaagacagcgacagcaagctggtggagaactgtgtatgtctgttacggaacctgtcctaccaggtccacagggagataccgcaagccgaaagatatcaggaggctgctcccaacgtcgctaataatactggacctcatgcggcgtcctgctttggtgcgaaaaaaggtaaggggaaaaagccaatagaagacccggcgaatgataccgtggatttcccaaagcgcacatctccagctaggggttacgagctccttttccaacccgaggtggtgagaatctacatctcactgctgaaagagagcaagacaccagcaattctggaagcatccgccggggcaattcagaacctatgtgcaggccgttggacctatgggagatacatcagatccgctctgagacaggagaaagccttgtccgccatagcagatctactgaccaacgagcacgaacgcgtggtgaaggctgcatctggagctctgcgaaacctggctgtggatgcacgcaacaaagagctgattggcaagcacgccatcccaaacctagtcaaaaatctacctggtggacaacagaattcctcatggaatttctctgaggacactgtaataagcattcttaacacaattaatgaagtcatagctgagaatttggaagccgctaaaaaactcagagaaacacaggggatagagaagcttgtcctcattaacaagtccgggaaccggtccgaaaaggaagtgcgcgcagcagccctggtccttcagacaatttggggatacaaagagctgaggaagcctctggagaaagaaggctggaagaaatcggatttccaggtaaacctcaataacgccagtcggtcccagagctcgcatagttatgacgatagtaccttacctctgatcgatcgcaatcagaaaagcgataaaaagcctgatcgtgaggagatacaaatgagcaatatggggtcaaacactaagagcttggataataactactcgactcccaacgagagaggtgatcacaatcgtacgctggatcggagcggcgacttgggagacatggagcccctaaaaggcacaacgcctctcatgcagaaaatttag

SEQ ID NO: 38052 - DNA, 2640 bp, Artificial Sequence
  derived and/or modified sequence
atggccaatggtactctgactcgacgtcatcagaacggaagattcgtcggcgatgccgaccttgaaaggcagaagttctccgatctcaagctgaatgggcctcaggaccactcccacctgctttactctacaatccccaggatgcaggagcccggccagatagtggaaacctatactgaagaggaccccgagggggcaatgtctgtggtaagtgttgaaacttcagacgacgggacgaccaggcgcactgagaccaccgtgaaaaaggtggtcaaaaccgtcacaacccgcacagtgcagccagtggcgatgggccctgacggactgccggtggatgccagctcagttagcaacaattatatccagacactgggccgggacttcagaaaaaatggcaacgggggccctggcccatacgttgggcaggccggtaccgccaccttgcccaggaatttccactacccccccgacggctatagccggcactacgaagatggatatcctggcggtagtgataactatggcagtctgagcagagtcacccgtatcgaagaaagatatcgaccctcaatggagggctatagagcaccctcccggcaggatgtgtacgggccacagccccaggttcgcgttggtggctcctccgttgaccttcaccggttccaccctgaaccgtacggtctggaagatgaccagaggagcatgggctatgatgatttagattacggcatgatgtccgattacgggacggcacggaggacaggaaccccttccgaccctcggaggcgcttaaggtcatatgaagacatgattggtgaggaagtcccctccgaccagtattactgggccccactggctcaacatgagagggggtctttggcgtcactggattccctgaggaaggggggacctcctcctcccaactggaggcaacctgagctgcccgaggtgatcgctatgctggggttccgtctggacgctgtgaagagcaatgcagctgcgtatctccagcacttatgctataggaacgataaggttaagactgatgtacggaagttgaagggcatccccgtcttagtcggactgcttgaccaccctaagaaggaagtccatctcggagcctgtggcgcactcaaaaatataagtttcggtagagaccaggataataagattgccataaagaattgtgacggggttcccgccctggtacggctgcttaggaaagccagggacatggatctgaccgaagtcattacgggaacgctgtggaacttgagctcacatgactccataaagatggagatcgtcgatcatgcacttcatgctttaacagacgaggtgatcataccgcacagtggttgggagcgcgaaccaaacgaggactgtaagcctagacacatcgagtgggagtcagtgctgacaaacaccgctggatgcttgcgcaacgtatcctccgaaaggtctgaggccaggcggaagctgagggaatgtgacgggctggtggatgctctcatatttattgttcaggcggagattgggcaaaaagattccgatagcaaactcgttgaaaactgtgtgtgcttgctgaggaacctttcatatcaagtccaccgcgaaattccgcaggccgagcggtaccaggaggcagctccgaatgtggcgaataacaccggcccacatgctgcttcttgcttcggggcgaaaaagggtaagggcaaaaagcctattgaagacccagctaacgataccgtcgactttccaaagcgtacgtcccccgctcgaggatatgaactcttgtttcagccagaggtggtcaggatttacatttctctattgaaggaaagcaaaaccccggccatcttggaagccagtgctggcgccattcagaacttgtgcgccggaagatggacttacggaagatacattcgtagtgcactccggcaagaaaaagcactgagtgctatcgctgacctgctaaccaatgagcatgagagggtggtaaaggctgcatcgggcgctctcagaaatcttgcagttgatgccagaaataaggaacttattgggaagcatgccatacccaatctagttaagaacttgccgggtggacagcagaacagttcatggaacttctctgaagacaccgtgatttcaatccttaataccatcaatgaagttattgccgaaaatctggaggccgcgaagaagctgcgtgagactcagggcattgaaaagctggtccttataaataagtctggcaacagatccgagaaagaggtccgggccgctgccctggtgctccagaccatctggggatataaagaactgcggaagccattggagaaagaagggtggaaaaagagcgattttcaggtgaacctgaataatgcaagtaggagccagtccagccactcttatgacgactcaaccctgccactgattgataggaatcagaagagcgataaaaagcccgaccgagaggaaatccagatgtcaaatatgggcagcaacaccaaatcgttagataataattattcaacacctaatgagaggggcgatcacaaccggacacttgataggtccggagatcttggagatatggaaccactaaagggtaccacacccctgatgcagaaaatctag

SEQ ID NO: 38053 - DNA, 2640 bp, Artificial Sequence
  derived and/or modified sequence
atggcaaacggaactctaacccgacgacatcagaacggcaggttcgttggcgatgcggacctggagcgccagaagttttctgacctgaagctcaacggcccccaggaccatagtcacttgttatatagcactatcccgcgcatgcaggagcctggccaaatcgtggagacatacacagaagaagaccccgaaggggctatgtcggtcgtgtctgtggagaccagtgacgacggaaccactaggcggaccgaaactacagtgaagaaggtggttaagacggtgaccactaggaccgttcaaccggtagcaatgggtcccgacggactccctgtggacgcctctagcgtctccaacaattatatccaaactctgggcagagattttaggaagaacgggaatggtggccctggcccgtatgtcgggcaggctggcacggcgacacttccgaggaactttcactatccccccgacggctactcccgccattatgaggacgggtacccgggcgggagcgacaactatgggtcgctctctcgagtgaccagaattgaggagaggtatcgcccatccatggaagggtatagggctccttcgaggcaggacgtgtacgggccacagccccaggtgcgagtagggggttcgagtgtggatcttcatcgcttccatcctgaaccatatggtttggaggacgaccagaggtctatgggctacgatgacctcgattacgggatgatgtctgactatggcactgctcggcgcactgggaccccatctgatcctaggagacgactgcggagctatgaggacatgatcggcgaagaggtaccctccgatcaatattattgggcgcctcttgcacagcacgaaagaggctcgctcgcctcactggactcccttaggaaaggagggccacctcccccgaattggagacagcccgagttgcccgaggtgattgccatgctgggctttcgcctggacgcagtgaaatcaaacgctgcagcctacctgcaacacctgtgctaccgcaatgataaggtcaaaactgacgtccgcaagctcaaagggatcccagtgctggtgggcttactggaccaccccaagaaggaagtgcaccttggagcttgtggcgcccttaagaacatctcatttggccgagatcaggataataagattgctattaagaattgtgatggggtcccagcccttgtccgcttgctccggaaggctcgcgacatggatctcacagaggtcatcacgggaacgctgtggaacctgtcttcccacgactctattaagatggagattgtagatcatgccctccacgcactgaccgatgaagtgattatcccccactcaggatgggagagagagccaaatgaggattgcaaacccagacatattgagtgggagagtgtgcttaccaataccgcgggttgtctccggaatgtttcatctgagagatcagaagctaggcgtaagttgcgagaatgtgatggccttgtagatgcccttatcttcattgtgcaagctgaaatcggccagaaggactctgatagcaagcttgtcgaaaactgcgtgtgtctgctcagaaatttatcgtatcaggtacatcgggagataccccaagctgagagatatcaagaagccgcacctaatgtggctaacaataccggacctcacgctgctagttgtttcggggccaaaaagggcaaaggcaaaaaaccaatcgaggaccccgcaaacgataccgtggattttcctaagcggacgagcccagcaaggggatacgagctccttttccaacctgaggtcgtgaggatttatatttcactgctgaaagaatccaaaacccctgcaatactcgaagcatccgcaggagctattcaaaacctgtgtgcgggtaggtggacctatggccggtatatcaggagcgcgctcaggcaggaaaaggctctgagtgccatcgctgatctgctgactaacgaacatgaacgtgtggttaaagctgcttcaggtgcgctgagaaacctggccgttgacgctcgaaataaagagttgattggcaaacacgcaatcccaaacttggtgaaaaacctgcctggtgggcagcagaacagctcctggaacttttctgaggatacagttattagcatccttaataccattaatgaagtcattgctgagaacctggaagctgcaaagaaactgcgcgagacacaaggaatagagaaactggtgctcattaacaagtctggaaacagatctgaaaaggaggtccgggccgcagcactggttcttcagacgatctggggctataaggaactgagaaaaccgttggagaaggaaggatggaagaagtcggatttccaggttaaccttaacaatgcaagccgctcccaatcctcacacagttatgacgatagcacactgcccttgatcgaccgtaaccaaaagtcagataaaaagcctgatcgggaggagatccaaatgtctaacatggggtctaatacaaagtctctcgacaacaattacagcacacccaacgagaggggagaccacaataggaccttagataggagtggggatttgggggatatggagccactgaagggaaccacgccactgatgcaaaaaatatag

SEQ ID NO: 38054 - DNA, 2640 bp, Artificial Sequence
  derived and/or modified sequence
atggccaatgggaccctcacccgccggcaccagaacggtagattcgtaggagacgccgacttagaacgccagaaattcagtgatctgaaattgaacggtccacaagaccactcccacctcctttattcaacaatcccacgtatgcaggaacccggccagattgtagaaacctatacagaggaggatcccgaaggcgccatgtctgtagtctctgtggagacctcagatgacggcacaacaaggaggacagagacaacagtaaaaaaggtggtcaaaactgttacaacgcggactgtccagcccgtcgccatggggcctgatggactgcccgtggacgcgtcctccgtgtcgaataactacatacagacgcttggacgcgattttaggaagaatggtaacggtggtccaggcccatacgtgggccaggccggaacggccaccctgccgcgaaactttcattatccacccgacggctattcccggcattatgaggacgggtacccgggaggatcagacaattatggctctttatcccgggtaactcgaattgaagagagatatcggccttcaatggaggggtaccgtgctcccagcaggcaggacgtgtacggtccccagccacaagtgagggttgggggatcgtcggtcgacctccacagattccacccggagccatatgggttggaggatgatcaaagaagtatgggctacgacgatctggattatggcatgatgtctgattatggcacagcaagacgaaccggcaccccatctgatccacgccgacggctcagaagctacgaggacatgataggcgaggaagtacctagcgaccagtactactgggcgcccctggctcagcacgaaagaggtagcctcgcttcgcttgattctctgcgcaaaggggggcctccaccgccaaattggcggcaacccgaactccctgaggtgattgctatgctggggtttagacttgacgccgtgaagtccaatgctgcagcctacctacagcacctatgctacaggaacgacaaggtcaaaacggacgtcagaaaactcaagggaatccccgtacttgtcggattgctggatcacccgaaaaaagaggtgcatctgggagcctgcggcgcgctcaagaacatcagcttcggaagggaccaggacaacaagattgccattaaaaactgcgatggggtccctgcgttagtgagattgctgcggaaagccagggacatggacttgacagaagtcattacaggaacgctctggaatctgtcctctcatgatagcatcaagatggagatcgtcgaccatgcactgcacgcccttactgatgaggtgattatccctcacagcgggtgggaacgagaacctaatgaggattgcaagccccgccacatagagtgggaatccgtgctgacaaacacggcagggtgcctaagaaacgtatcgagcgaacgctcagaggctaggcggaaattgcgagaatgcgatggccttgtggatgctctgatctttatagttcaagctgaaattggtcaaaaagactcggactccaagctggttgagaattgtgtgtgtctccttcgtaatctgagctaccaagtccaccgcgaaattccacaggcagagagatatcaggaagcggcccccaacgtggctaacaatacagggcctcatgccgcttcatgttttggcgctaagaagggcaaggggaaaaaacccattgaggaccctgctaatgatacagtcgatttcccaaagcgcaccagtccagcccgcggatacgagctgcttttccagccagaggtggtccgaatttacatcagcctattaaaggagagtaagacgcctgcaattcttgaagccagcgccggagccatccagaacctgtgtgctgggcgctggacctacggcaggtacataaggagtgcgttgagacaggagaaagccctctcagccatcgctgacttactgacaaatgaacacgagagagtggtgaaagctgcaagtggggcactgcgtaacctggcggtcgacgcccggaataaagagctaatcgggaagcacgcgatacctaatctagtgaaaaatttaccaggcggacagcagaattcatcctggaactttagcgaggacacagtgatcagtatcctgaataccatcaatgaagttatcgcagagaatctcgaggcagcgaaaaagcttcgggaaacgcagggaatcgagaaattggtacttataaataagagcggtaaccgctccgagaaagaggtgcgcgccgccgcccttgtactgcagacaatctgggggtacaaagagctccggaaacccctggaaaaagaaggctggaagaagtcagatttccaggttaacctcaacaacgcctcaaggagtcaaagcagtcattcatatgacgattccacccttcctcttatcgatagaaaccaaaaaagtgataagaagcccgatcgggaggagattcagatgagcaacatgggctccaacaccaaaagcttggacaataactacagtacgccaaacgaacgtggggaccacaaccggactttagaccggtccggagacctgggagacatggagccgctgaagggaacaacccccttgatgcagaaaatatag

SEQ ID NO: 38055 - DNA, 2640 bp, Artificial Sequence
  derived and/or modified sequence
atggctaacggcacgctcacacgacgtcatcaaaacggacgcttcgtcggggatgctgaccttgagagacagaaattttcagacctcaaactgaatggcccacaggatcactcacatctgttatactctaccattccaaggatgcaggaacctggacagatcgtggaaacctatacagaagaggatcccgaaggcgcaatgtctgttgtttccgtcgagacttccgacgacgggacaacgcgcagaaccgaaacaacagtcaagaaagtagtgaaaactgtaacaacccggacagtgcagcctgtcgccatgggtcctgacggtttaccggtggacgcctcatccgtatcgaataactatatccaaacactgggccgcgatttccgtaaaaacggaaacggcggacctggcccctatgtgggccaggctggcacagccaccctccctcgcaactttcactaccccccagatggttattcccggcactatgaagatggctatcccggaggaagcgacaactatggcagtctgagtagagtgactcgcatcgaggaacgctacagaccttctatggaaggataccgagctccctcaagacaggatgtatatgggccacagcctcaggtccgcgtaggtggtagttccgtcgaccttcaccgattccacccagagccctatggcctcgaagatgatcagaggtctatgggctacgacgacttagattatggtatgatgagtgactatggcaccgcacggcgaaccggtacaccaagcgaccctcggaggcgattacgctcttatgaggatatgatcggagaggaagtgccgtctgatcaatattattgggctccactagcccagcacgagcgcggcagcctggcctccctcgactccttgaggaagggcggcccccctccacccaactggcgccagcccgagcttcctgaagttattgccatgctgggcttcagactggacgccgtgaagagcaacgcagcagcttacttacagcacctgtgttatcgtaatgacaaggtgaagaccgatgtacggaagttaaagggaatccctgttctcgttgggctgctcgatcatcctaagaaagaagtgcacctaggcgcttgtggcgctcttaaaaacattagcttcggtagggatcaagataataagatagcaatcaagaactgtgatggggttcctgcgcttgtgaggctgttaaggaaggcgcgcgacatggatttaacagaggttattaccggaactttgtggaatctttctagtcatgattcaataaagatggagatcgtagaccacgcccttcacgccctgactgacgaggtgatcattcctcatagtggttgggagcgggagccgaacgaggactgcaagcccaggcatatagagtgggagtccgttctgactaacacggccggctgcctgcgcaatgtgagtagcgagcgctcagaggccagaaggaaattgcgtgagtgtgatgggttggtggatgccctgatcttcatcgtgcaggctgaaattggacagaaagatagtgacagcaagcttgtcgagaattgcgtgtgccttctgcgaaatctgagctaccaggtacaccgcgagattcctcaggctgagcgatatcaagaggcggctccaaatgtggcgaataatacgggcccgcatgctgcatcttgctttggcgcgaagaaggggaaaggaaagaagccaatcgaagatcccgccaacgatacagtggatttcccgaaacgaacatcgcctgcgcgaggttatgaactgctgtttcaacctgaagtcgttaggatttatattagtctattaaaagagtccaagaccccagccatcttagaagcttccgcgggagcgattcagaatctgtgcgccgggcgatggacatatggtcgctacatacgcagtgcactgcgacaggagaaagccctgtctgctatcgccgatctactcactaatgagcacgaacgtgttgtgaaggcagcatctggggcgctcaggaacctcgctgtggacgccaggaacaaagagttgatcgggaaacatgctatccccaacctcgtgaaaaacttgcccggcgggcaacagaactcttcttggaacttctctgaagacactgtgattagcatcttgaacacgattaacgaagtcatagcagagaacctcgaggccgctaagaaattgagagagacacagggcatcgagaaactggtgttgattaataagtcaggcaaccgtagcgagaaggaagttagagccgccgccctagtattgcagaccatatggggctataaagagctgcgcaagcctctcgaaaaagaagggtggaagaagtcggatttccaggtaaacttgaataacgccagccgatcccagtcgtcccactcctatgacgactccactctgccactgatcgatagaaaccagaaaagtgataaaaaacccgatcgcgaggagatccaaatgtcaaacatgggctccaacaccaaatctttggataacaattatagcacacccaacgagcgaggcgatcacaatcggactctggatagatccggagatctcggggatatggaacccctgaaaggaactacccccctgatgcagaaaatctag

SEQ ID NO: 38056 - DNA, 2802 bp, Artificial Sequence
  derived and/or modified sequence
atggatgacagcgaggtggagagcacagccagcatcctggcctctgtgaaggagcaggaggcccagtttgagaagctgacccgggccctggaggaggagcggcggcacgtgtctgcccagctggagcgggtgcgggtgagcccccaggatgccaaccccctgatggccaacggcaccctgacccggcggcaccagaatggccgctttgtgggagatgctgacctggagcggcagaagttcagtgacctgaagctgaatggcccccaggaccacagccacctgctgtacagcaccatccccaggatgcaggagcccggccagatcgtggagacctacacagaagaagatcctgagggcgccatgtctgtggtgtctgtggagaccagtgatgatggcaccaccaggagaacagagaccaccgtgaagaaggtggtgaagacagtgaccaccaggacagtgcagcctgtggccatgggcccagatggcctgcctgtggatgccagctctgtgagcaacaactacatccagaccctgggccgggacttcaggaagaatggaaatggaggccctggcccctacgtgggccaggccggcacagccaccctgcccaggaacttccactaccccccagatggctacagccgccactatgaagatggctacccaggcggcagtgacaactacggcagcctgagccgggtgaccagaattgaggagcgctaccggcccagcatggagggctaccgggcccccagccggcaggatgtgtatggcccccagccccaggtgcgggtgggcggcagctctgtggacctgcaccgcttccaccctgagccctacggcctggaggatgaccagaggtccatgggctatgatgacctggactatggcatgatgtctgactatggaacagcccggaggacaggcacccccagcgacccccggcggcggctgcggagctatgaggacatgattggagaggaggtgcccagcgaccagtactactgggcccccctggcccagcacgagcggggcagcctggccagcctggacagcctgaggaaaggaggccccccaccacccaactggaggcagcctgagctgcctgaggtgattgccatgctgggcttccggctggatgctgtgaagagcaatgctgctgcctacctgcagcacctgtgctacagaaatgacaaggtgaagacagatgtgaggaagctgaagggcatccctgtgctggtgggcctgctggaccaccccaagaaggaggtgcacctgggcgcctgtggggccctgaagaacatcagctttggccgggaccaggacaacaagatcgccatcaagaactgtgatggagtgcctgccctggtgcggctgctgaggaaggcccgggacatggacctgacagaggtgatcaccggcaccctgtggaacctgagcagccatgacagcatcaagatggagatcgtggaccacgccctgcacgccctgacagatgaagtcatcatcccccacagcggctgggagcgggagcccaatgaagactgcaagcccaggcacatcgagtgggagagcgtgctgaccaacacagctggctgcctgagaaatgtgtcctctgagaggtctgaggcccggaggaagctgcgggagtgtgatggcctggtggatgccctgatcttcatcgtgcaggccgagatcggccagaaggacagcgacagcaagctggtggagaactgtgtgtgcctgctgaggaacctgagctaccaggtgcaccgggagatcccccaggccgagcgctaccaggaggccgcccccaacgtggccaacaacacaggcccccatgctgccagctgctttggagccaagaagggcaagggcaagaagcccattgaagatcctgccaatgacacagtggacttccccaagaggaccagccctgcccggggctatgagctgctcttccagcctgaggtggtgcgcatctacatcagcctgctgaaggagagcaagaccccagccatcctggaggccagcgctggggccatccagaacctgtgtgccggccgctggacctacggccgctacatccgcagcgccctgcggcaggagaaggccctgagcgccatcgctgacctgctgaccaatgaacatgagcgggtggtgaaggccgccagcggggccctgaggaacctggccgtggatgccaggaacaaggagctgattggcaagcacgccatccccaacctggtgaagaacctgcccggcggccagcagaacagctcctggaacttcagcgaggacaccgtcatcagcatcctgaacaccatcaatgaggtgattgctgagaacctggaggccgccaagaagctgcgggagacccagggcatcgagaagctggtgctgatcaacaagagcggcaacagaagtgagaaggaggtgcgggccgccgccctggtgctgcagaccatctggggctacaaggagctgaggaagcccctggagaaggagggctggaagaagagtgacttccaggtgaacctgaacaatgccagccgcagccagagcagccacagctatgatgacagcaccctgcccctgattgacaggaaccagaagagtgacaagaagccagaccgggaggagatccagatgagcaacatgggcagcaacaccaagagcctggacaacaactacagcaccccaaatgaaagaggagaccacaacagaaccctggacagaagtggggacctgggggacatggagcccctgaagggcaccacccccctgatgcagaagatctag

SEQ ID NO: 38057 - DNA, 2640 bp, Artificial Sequence
  derived and/or modified sequence
atggccaacggcaccctgacccggcggcaccagaatggccgctttgtgggagatgctgacctggagcggcagaagttcagtgacctgaagctgaatggcccccaggaccacagccacctgctgtacagcaccatccccaggatgcaggagcccggccagatcgtggagacctacacagaagaagatcctgagggcgccatgtctgtggtgtctgtggagaccagtgatgatggcaccaccaggagaacagagaccaccgtgaagaaggtggtgaagacagtgaccaccaggacagtgcagcctgtggccatgggcccagatggcctgcctgtggatgccagctctgtgagcaacaactacatccagaccctgggccgggacttcaggaagaatggaaatggaggccctggcccctacgtgggccaggccggcacagccaccctgcccaggaacttccactaccccccagatggctacagccgccactatgaagatggctacccaggcggcagtgacaactacggcagcctgagccgggtgaccagaattgaggagcgctaccggcccagcatggagggctaccgggcccccagccggcaggatgtgtatggcccccagccccaggtgcgggtgggcggcagctctgtggacctgcaccgcttccaccctgagccctacggcctggaggatgaccagaggtccatgggctatgatgacctggactatggcatgatgtctgactatggaacagcccggaggacaggcacccccagcgacccccggcggcggctgcggagctatgaggacatgattggagaggaggtgcccagcgaccagtactactgggcccccctggcccagcacgagcggggcagcctggccagcctggacagcctgaggaaaggaggccccccaccacccaactggaggcagcctgagctgcctgaggtgattgccatgctgggcttccggctggatgctgtgaagagcaatgctgctgcctacctgcagcacctgtgctacagaaatgacaaggtgaagacagatgtgaggaagctgaagggcatccctgtgctggtgggcctgctggaccaccccaagaaggaggtgcacctgggcgcctgtggggccctgaagaacatcagctttggccgggaccaggacaacaagatcgccatcaagaactgtgatggagtgcctgccctggtgcggctgctgaggaaggcccgggacatggacctgacagaggtgatcaccggcaccctgtggaacctgagcagccatgacagcatcaagatggagatcgtggaccacgccctgcacgccctgacagatgaagtcatcatcccccacagcggctgggagcgggagcccaatgaagactgcaagcccaggcacatcgagtgggagagcgtgctgaccaacacagctggctgcctgagaaatgtgtcctctgagaggtctgaggcccggaggaagctgcgggagtgtgatggcctggtggatgccctgatcttcatcgtgcaggccgagatcggccagaaggacagcgacagcaagctggtggagaactgtgtgtgcctgctgaggaacctgagctaccaggtgcaccgggagatcccccaggccgagcgctaccaggaggccgcccccaacgtggccaacaacacaggcccccatgctgccagctgctttggagccaagaagggcaagggcaagaagcccattgaagatcctgccaatgacacagtggacttccccaagaggaccagccctgcccggggctatgagctgctcttccagcctgaggtggtgcgcatctacatcagcctgctgaaggagagcaagaccccagccatcctggaggccagcgctggggccatccagaacctgtgtgccggccgctggacctacggccgctacatccgcagcgccctgcggcaggagaaggccctgagcgccatcgctgacctgctgaccaatgaacatgagcgggtggtgaaggccgccagcggggccctgaggaacctggccgtggatgccaggaacaaggagctgattggcaagcacgccatccccaacctggtgaagaacctgcccggcggccagcagaacagctcctggaacttcagcgaggacaccgtcatcagcatcctgaacaccatcaatgaggtgattgctgagaacctggaggccgccaagaagctgcgggagacccagggcatcgagaagctggtgctgatcaacaagagcggcaacagaagtgagaaggaggtgcgggccgccgccctggtgctgcagaccatctggggctacaaggagctgaggaagcccctggagaaggagggctggaagaagagtgacttccaggtgaacctgaacaatgccagccgcagccagagcagccacagctatgatgacagcaccctgcccctgattgacaggaaccagaagagtgacaagaagccagaccgggaggagatccagatgagcaacatgggcagcaacaccaagagcctggacaacaactacagcaccccaaatgaaagaggagaccacaacagaaccctggacagaagtggggacctgggggacatggagcccctgaagggcaccacccccctgatgcagaagatctag

SEQ ID NO: 38058 - DNA, 2802 bp, Artificial Sequence
  derived and/or modified sequence
atggacgacagcgaggtggagagcaccgccagcatcctggccagcgtgaaggagcaggaggcccaattcgaaaagctgacaagagcactggaagaggagaggagacatgtgtccgcacaactggaacgagtcagggtcagccctcaggatgcaaatccgttaatggcaaacgggactctgactagaagacaccagaatggtaggtttgttggcgatgcggatttggaacgccagaagttctcagaccttaagctgaacggaccccaggaccattcccatctgctgtattcaaccatccctcgcatgcaggaaccaggtcaaattgtggagacgtataccgaggaagaccctgagggcgccatgagcgtggtcagcgttgaaacttcagatgacggtactacgcggaggactgagaccacagtgaaaaaagttgtgaaaacggtgacgacacgaacagtccagccggtggcaatgggccccgacgggctgcccgtcgacgcatcaagcgtgtctaataactacattcagacgctggggcgagacttccggaaaaatggaaacggaggacccggtccatatgtcggtcaagccgggacagctactctgccacgcaattttcactacccacccgacggctattcccgccactacgaagacggctaccccggaggatcggacaactatggctcactctcaagggtgacacgtatcgaagagcggtaccggccctctatggaagggtaccgagcaccaagccgccaggatgtgtatggcccccagccacaagtacgcgttgggggtagctccgttgatctccaccgtttccatcccgagccatacgggctcgaggacgaccaaaggtcgatgggttacgatgacctggattacgggatgatgagcgactatggaacagccaggaggactggaactcctagtgatcctagacgacggctgaggagttatgaggatatgatcggcgaggaagtccctagcgaccagtattactgggcccccctggctcagcatgagagagggtcccttgctagcctggactctttgcgaaagggtggtccaccaccccctaattggagacagcccgaattgcctgaggtgattgcgatgctgggtttccgcctggatgccgtgaagagtaatgccgctgcctacttgcagcacctgtgttatcgtaacgacaaggtgaagacagatgttcgcaaactgaaggggattcctgtcctggttggcctcctagatcaccccaaaaaggaggtgcatctcggcgcctgtggcgccctgaagaatatctctttcggccgcgaccaggacaacaagatcgctatcaaaaactgtgacggggttcctgcactggtgagacttctgaggaaggcaagagacatggatctcaccgaggttattacagggaccctctggaacctctcttcccatgactcgatcaaaatggagatagtggatcacgccctccacgccttgactgacgaagtgatcattcctcattccggctgggagcgcgaacccaatgaggattgtaaaccgcgtcatattgaatgggagtcagtcctcactaacaccgctgggtgtctgcgtaatgtaagcagcgagagatccgaggcaagacgaaaactgagagagtgcgatggcctcgtggacgcactgattttcatcgtacaggccgagattggacagaaagactccgacagtaagctggtagagaactgcgtgtgcttgttgcggaacttgagttatcaggtacatagggagattccacaggccgagcgataccaggaagccgccccgaacgtggcaaacaatacaggaccccacgccgcttcttgttttggcgccaaaaaggggaaggggaagaagcccatcgaagaccctgccaacgatacagtcgatttcccgaagcggacatcccctgcgagggggtatgaactgctttttcaaccagaagttgtccggatttatatctccctcttgaaggaatcaaaaaccccagcaatcctcgaggcgagtgccggcgctatccagaacctgtgcgccggcagatggacctatggccgctacatacgatctgccttgaggcaggagaaagccctgagtgccattgcagacttattaacgaatgagcacgagagggtggtcaaagccgcctccggggccctgcgcaatctcgccgttgacgctcggaataaggaactcatcggcaaacatgctatccccaatcttgttaagaatcttcctgggggccagcagaactcgtcatggaattttagtgaggatacagtgatttccatcttgaacacaatcaacgaagtgattgccgagaacttagaggctgcaaaaaagcttcgagagacgcagggtatcgagaagctggttctcattaacaaaagtggcaatagaagcgagaaggaggtccgtgccgccgcattagttcttcaaacaatctgggggtacaaagaactccggaaaccccttgagaaggagggttggaagaaatccgactttcaggtgaatctcaataatgcctccagaagccagagttcgcactcatacgacgattcaaccttacctctgatagacagaaaccaaaagtcggataaaaaaccggatcgcgaagaaatccagatgtccaacatgggctccaataccaagtccttagataataattacagcacccccaatgaaagaggggatcacaaccggaccctggatcggagtggtgatctgggtgacatggaacctctaaaaggcactaccccacttatgcagaagatctag

SEQ ID NO: 38059 - DNA, 2802 bp, Artificial Sequence
  derived and/or modified sequence
atggacgacagcgaggtggagagcaccgccagcatcctggccagcgtgaaggaacaggaggcacagttcgagaagctgaccagagcactggaagaagagagaagacatgttagcgcacagctcgagcgtgtgagagtcagtccccaggatgctaatccactgatggcaaacgggaccttgactcggaggcaccaaaatggacgattcgttggcgacgccgacctggagagacagaagttttccgacttaaaattaaacgggcctcaagatcactcccatctgctctactctactatcccccgaatgcaggaacctggccaaatcgtcgagacctacacagaggaggatcctgagggcgccatgtctgtagtgtcagtggagacatctgacgatggcacgactaggcgcaccgaaaccacagtgaagaaggtggtgaagactgttacaacccggacagtacaaccggtggcaatgggcccagatggactccctgtagacgcctcaagcgtctccaacaattatatccagactctggggagagatttcaggaaaaatggcaacggtggaccgggcccttacgtcggccaagccggcacagccacgctgccacggaacttccactaccccccagacggttactcaaggcactatgaggatggctatcctgggggtagcgacaactatgggagcctgtctcgcgtgacacgaatcgaagagaggtaccggccctccatggaggggtatcgcgcccccagccgacaggatgtctatggcccccaaccacaggtgagagtaggcggatcctctgttgatctgcacaggtttcaccccgagccatatggcctcgaagacgaccagcggtccatggggtatgacgatctggattatggcatgatgagcgattatgggacggcaaggcgcacgggtactccctcagatcctaggaggaggctgaggagctacgaggatatgatcggcgaagaggtcccctcagaccagtattactgggcccccctggcacagcatgagcgaggctcgctcgcgagtctcgacagtctgcgaaaagggggcccacccccacccaactggcgccagccagagcttccagaagtgatcgccatgctgggctttagactggatgccgtcaagagtaacgcagcagcctacctgcagcatctgtgttatcggaatgataaagtcaagacggacgttcggaaactgaaagggattccggtactcgtggggctgcttgatcaccctaagaaggaggtgcacctaggtgcatgcggggcgctgaagaatatatcctttggtcgggaccaggataataaaatcgctatcaaaaactgtgacggggttccggccctggtgaggctgctgagaaaggcgcgggacatggacctaacagaggtgattacaggcaccctgtggaacctttcaagccacgacagcatcaagatggagattgttgatcatgccctgcatgcactcacagacgaggtaatcatcccacatagcggatgggaacgtgaacctaatgaggactgcaaaccacgtcacattgagtgggagtcagttttgaccaatacagctggttgtctccggaatgtgtccagcgagaggtcagaggccagacgcaaactacgtgagtgtgatgggctcgtggatgcactgatcttcatcgtccaggccgaaattgggcagaaagattccgacagcaagctcgttgagaactgtgtgtgcctgttaagaaacttgagctaccaggtgcacagggaaatcccccaggctgagcgttatcaggaggccgcacccaatgttgctaacaataccggtccacacgcagccagctgtttcggggcaaaaaaaggaaagggtaagaagcccatcgaggacccggcaaatgatacagtggatttccccaaaagaacttctcccgcccgcgggtacgagctcttattccagccagaagttgtcaggatctatattagcttgcttaaggaatcgaagacccccgccattttggaagcctcggcaggggccatccaaaatctgtgcgcgggaaggtggacttatggccgatatatacgctccgcattgagacaggaaaaagccctgtcagctatagccgacctgcttactaacgaacacgaaagggtcgtgaaggccgcttcaggagctctccggaatctggccgtggacgccaggaataaagaactcattggtaaacacgccattccaaatctggtgaaaaatctgcctgggggtcagcaaaactcaagttggaacttctcggaggatactgtcatctctatacttaataccatcaatgaggtgattgccgagaacctagaagccgccaagaaactgcgagagactcagggaatcgagaagctggtgttaataaacaagagcggcaataggagcgagaaggaggtaagggctgccgctcttgtcctgcagacaatatgggggtataaagagctgcgaaagcctctcgagaaggaggggtggaagaagtctgactttcaagtcaacttaaataatgcgagtaggtctcaaagttcacatagttatgatgattctacgttaccattaatcgaccgcaaccagaagagtgacaagaagccggatcgagaagaaattcagatgtcaaacatggggtccaatacaaaatcactagacaacaattatagcacacctaacgaaagaggtgaccacaacaggaccttagatcggagcggggacctcggcgatatggaacctctgaagggaaccactcctttgatgcaaaagatctag

SEQ ID NO: 38060 - DNA, 2802 bp, Artificial Sequence
  derived and/or modified sequence
atggacgacagcgaggtggagagcaccgccagcatcctggccagcgtcaaggagcaggaggcccaatttgagaagcttacccgcgccctggaggaagaacggcgccacgtgtccgctcagcttgaaagagtgagagtttcacctcaggacgctaatcccctgatggctaatgggacattgacaaggagacaccagaacgggcggttcgtcggagatgccgacttggagcgacaaaagttttcggacctgaaactgaacgggccacaagatcactctcatttgttgtacagcaccatcccgcggatgcaggagcctggccagattgtggagacttacacggaggaagatccggagggtgccatgtctgtggtctcagttgaaacttccgacgacgggaccacgagaagaaccgagacgacagtcaagaaagtggtcaagaccgttaccaccaggacagtccaacctgtggccatgggacccgatggcctgccagttgatgctagtagtgtgtccaataattacatacagactctggggagagacttcagaaagaacggtaatggggggcctggtccgtacgtaggccaggcaggcaccgcgactctgcccaggaattttcactaccccccagacggatactcccggcactatgaagatggataccccggtggctccgacaattacgggagtctgtctcgagtcaccaggattgaggagaggtacaggcctagcatggaggggtacagggctccgagtcgacaggacgtatacggtccacagccccaagtcagggttgggggttcatccgtggatttacaccgattccatcccgagccttacggcctggaagacgaccagcgatccatgggctacgatgatttggactatggaatgatgtccgattacggcaccgcccgaagaaccggaacgccaagcgacccacgacggagactgagatcctacgaggatatgattggcgaggaggtgccctctgatcagtattattgggctcccctggcccagcacgagaggggatcgctagcctcactcgactccctgcggaagggaggaccaccgcccccaaattggcgccagcctgagttgccggaagttatcgcaatgctggggttcagactggatgccgtcaagtcaaacgccgccgcttatttacagcatctgtgttacaggaacgataaagtgaaaactgacgtccgtaaattgaaaggaatcccggtacttgtaggccttctggaccaccccaaaaaagaggttcacctcggcgcttgcggcgccctgaaaaatatatcttttggaagagatcaagacaataagatagctattaagaactgcgacggcgtgccagccctcgtgcgtctgctgcggaaggcccgtgatatggacctcacagaagttattactggtaccctctggaacctgagctcccatgactccatcaagatggagattgtcgaccatgccctgcatgcacttactgacgaagtaattataccacactccggatgggaaagagaacctaacgaggattgcaagcctcggcacatcgagtgggagtccgtgttgacaaatacggctggatgtctgcgaaatgttagtagcgagcgttcagaggctagacggaagctccgagaatgtgatggcctcgtcgatgcactcatcttcattgtccaggcagagattggccagaaggattctgactccaagctcgtcgaaaactgtgtgtgtttactccggaatctttcgtaccaggtccatagggagattcctcaggccgagcggtaccaagaagcggccccaaacgtggcaaacaataccggtccccacgctgccagttgcttcggcgccaagaagggaaaggggaagaaacctatcgaggatccggccaacgatactgtggacttccctaagcggacctctcccgcccgtgggtatgagcttctgttccagcctgaagttgttcggatttacatctccctcctaaaggagtcaaaaacccccgctattttggaagcgagtgccggcgccatccaaaatttgtgtgcgggacgatggacttacgggaggtacatcaggtccgctctccggcaggaaaaagctttgagcgccattgctgatctcctcaccaacgaacatgagcgagtcgtcaaggctgcaagcggggccctcaggaacctggctgtggacgctagaaataaggagctgatcggaaaacacgctattcccaatctggtgaagaaccttccgggtggccaacagaacagcagttggaacttttcagaggatacagtcatctctatcctaaatactatcaacgaagtgatcgccgagaatctagaagcagccaagaagctgagagagacacaagggatcgaaaagctagtgctgatcaacaaatcaggaaacaggagtgagaaggaggtgagggctgccgcgctggtgttacagaccatttggggttataaggagttgaggaagcccctcgaaaaggaaggatggaaaaaatcagattttcaggttaatctcaataacgcctcacgttcccagagcagccattcctatgacgactccacacttcctcttatcgatcgaaaccagaagtcagacaagaagcccgacagggaggaaatacagatgagtaatatggggtctaatacaaagtctttggacaataattatagcactcctaacgaaagaggtgaccacaacaggaccctcgacagatccggggatctcggagatatggaacctctgaagggcacaaccccactgatgcagaaaatctag

SEQ ID NO: 38061 - DNA, 2802 bp, Artificial Sequence
  derived and/or modified sequence
atggacgacagcgaggtggagagcaccgccagcatcctggccagcgtaaaagagcaagaggcccagtttgagaagctgacgcgggcactcgaggaagaacgaaggcacgtgagcgcccagctcgagcgcgtcagggtgtccccgcaggacgctaatcccctcatggcgaacggaactctcactcgcagacaccagaatggacggtttgtgggggacgccgacctcgaacgccagaaattcagcgacctcaaactcaacggtccccaagaccattcccacctgctctacagcaccatcccgcgtatgcaggagcccggccagatcgttgaaacatataccgaggaagacccagagggggccatgtctgttgtgtccgtagagacttccgacgacgggacaactagaagaaccgaaaccactgtcaaaaaggtcgtgaaaaccgtgactactcgtaccgtgcagcccgtcgctatggggccagatggccttccggtggatgcgtcctccgtttctaacaactatatacagaccctcgggcgcgacttccgaaagaacggtaatgggggaccagggccctacgtgggccaagccggcaccgccacattgccaaggaatttccactatcccccggatgggtattcccgacactatgaggacggctacccaggcggaagcgataattacggttctttgagcagggtgaccagaatcgaagaaagataccgcccatccatggaggggtaccgagcgccaagtcgacaggatgtctatggtccacagcctcaggtcagagtcggaggatcaagcgtggacctgcacaggttccatcctgaaccctacgggcttgaggacgaccaaagaagcatgggctatgacgacctggattacggaatgatgagcgattatgggaccgcccgccgcaccggaactccctcagatccaaggagaagactccggtcatatgaggatatgattggcgaagaggtgcctagcgatcagtactactgggccccattggctcagcatgaaaggggttccctggcttcacttgacagcttacgaaaaggtggccctcctccgcctaactggcgccagccagaattacctgaggtcatcgcaatgttgggttttcgactggatgcggttaagagcaacgcagcagcctaccttcaacacctctgctataggaacgacaaagtgaaaacagacgtgcggaaactcaagggtatccccgtgctggtagggctcctggaccatccaaagaaggaagttcatttgggcgcttgtggagcactaaagaacatcagctttggaagagatcaagataacaaaattgcaattaagaattgtgacggtgtccccgctctggttcgcctgctacgtaaagcaagggacatggatctgacagaggtgattaccgggacactgtggaacttatccagtcacgacagcattaagatggaaatcgtcgatcatgctctgcatgccctgacagatgaggtgataattcctcattctggttgggaacgggagccaaatgaggattgcaagccaagacacatcgaatgggaatcagtgcttaccaatactgccggttgcttgcggaacgtctccagtgaaaggagtgaggctcggcggaagctgcgcgagtgcgatggccttgttgatgctctgatttttatcgtgcaggcagaaattgggcagaaagactcagattcaaagctcgtcgagaattgtgtttgcctgctgcggaacctgagttaccaggtgcatcgggagatcccacaggcagaacggtatcaggaagcggcccccaatgtcgccaataacacgggcccacacgcagcctcctgcttcggtgccaagaaaggaaaggggaaaaaacccattgaggatcctgccaatgatacagttgatttccccaaaaggacctcccccgcaaggggttacgaactcctgttccagccagaagtggtcagaatctatatttccctcctgaaggagtccaagacccccgccatcctggaggccagtgcaggagcgatccaaaatttgtgcgcaggtcgttggacgtatgggcgttacatccgcagcgccctcagacaagagaaggctctgagtgctatcgcagatcttttaaccaatgagcatgagcgagtagtaaaggccgcttctggtgctctgcgtaacctagcagtggacgcccgaaacaaagagctgataggtaaacatgctatccctaatttagtaaagaatctgcccgggggccaacagaattcatcctggaacttttcagaagatacagttattagtattttgaataccatcaacgaagtgatcgccgaaaacctcgaggctgcaaagaaactaagggaaactcagggaatcgagaaattggtgctgattaacaagtccggaaacagaagtgagaaagaagtcagagcagctgccctcgtgctgcagaccatctggggctacaaagaactgagaaagccacttgagaaagagggatggaaaaagtccgacttccaggtgaatttgaacaacgcatcccggagccagtcctcacatagttatgatgatagcaccctacctctaatcgaccgcaaccagaaatctgataaaaaacccgaccgtgaagaaatccagatgtccaacatgggatccaatactaaaagcctcgataataattattcgactccaaatgagagaggggatcacaaccgtactctggatcgttctggcgacctgggagatatggaacccttgaaggggacaacacccctgatgcagaaaatttag

SEQ ID NO: 38062 - DNA, 2640 bp, Artificial Sequence
  derived and/or modified sequence
atggccaacggcaccctgacccggcggcaccagaacggccggttcgtcggcgacgcggacctcgagcgccagaaatttagtgacctaaagttgaatggccctcaagaccatagtcatctgctttattcaacaattccaaggatgcaggagccaggccagattgtagagacatacactgaggaggacccagagggcgccatgtccgtcgtcagcgtggagacctcagatgatggcacaactcgccggaccgaaactacagttaagaaggtggtcaaaacagtgactacccgaaccgtccagcctgttgcaatgggacctgatgggctgcccgtggatgcttcgtccgtcagcaacaattacattcaaaccttggggcgcgactttagaaagaacggaaacgggggacccggtccctacgtgggtcaggcagggacagcaactcttccgcggaattttcattacccccccgacggttacagcagacactacgaggacggataccctggcggctccgataattacggctcattatccagggtgaccagaattgaggagcggtatcgccctagtatggagggataccgggccccatctcgtcaggacgtctacggcccccagccacaggttcgcgtcgggggctcctctgtcgatctccaccgcttccatcccgagccttatggactggaggatgaccagcggtcaatgggctacgacgacttggactacggcatgatgtccgattacggcacagctcggcgcaccggcacaccatcagaccctcggcggcggttacggtcttatgaagatatgataggtgaggaagtgccgagcgaccagtactattgggcacctcttgctcagcatgaacggggctctttggcaagtctggactcactgaggaagggaggccctccccctcccaattggcgccagcccgagcttcccgaagtgatagccatgttgggatttaggttggatgcagtgaagagtaatgctgccgcatatctccaacacctctgttataggaatgataaagttaaaactgacgtgagaaaattgaaagggattcctgtgttagtcggactgctggaccacccaaagaaagaggtccacttgggcgcctgtggcgcacttaagaatatctcttttgggagggatcaggacaacaagattgccatcaaaaactgtgatggcgtgcccgccttggtgcgcctgctccggaaggcgcgagacatggatctgacagaggtgattactgggacgctctggaacctaagctcgcatgatagcataaagatggagatagtggaccatgccctccacgccctaactgacgaggttatcattcctcatagcgggtgggaaagggaacccaacgaagactgtaagccaaggcatatcgagtgggaaagcgtgttgacaaatactgctggttgtttgcggaatgtgagctcagagcggtctgaggccaggcgcaaactgagagaatgtgacgggctcgtggacgcactcatatttatagtccaggccgagatcggtcagaaggactccgacagcaaattagtggagaattgcgtgtgtctactccgcaacttgtcttaccaggtgcatcgggagatccctcaagctgagaggtatcaggaggcagctcctaatgtggccaacaatactggcccacatgcagcctcatgctttggggcgaaaaaggggaagggcaaaaagccaattgaggatcctgccaatgacaccgtggactttccaaaacgcacctcccccgcacgaggatacgagctgctgtttcagccagaggttgtgcggatatatatcagtttgttaaaggaaagcaaaacaccagccatactggaggcgagcgcgggggcgatccaaaacctctgtgcaggtaggtggacctatggaagatatattaggagtgctctgaggcaagagaaggctttgagcgccatagctgacctgctcactaacgagcacgagagggtggtgaaggcagccagtggtgccctcaggaacctcgccgtggacgcacggaataaggaattaatcggcaaacatgctatccctaatttggtgaaaaaccttcctgggggtcaacagaacagttcctggaacttttccgaagacacggtgatttctattctcaataccattaatgaggtcatcgcagaaaacctggaggccgccaaaaagttaagggagacccagggtattgaaaagctggtactgatcaacaagtccgggaacagatctgagaaagaagtgcgcgccgcagctctcgtactgcaaaccatttgggggtataaagagctgcggaagcccctggagaaagagggctggaagaagtcagactttcaagtaaacctgaacaacgcaagccgatcacaaagttcccattcttacgacgatagcacgctgcctctgatagacaggaaccagaagtctgacaagaagcccgacagagaagaaatccagatgtcaaacatggggagcaatacgaagtcactcgacaataactactccaccccaaacgaacggggcgaccacaatcgcacacttgatagaagtggggacctaggtgacatggaacccctcaaaggaacgaccccccttatgcaaaagatatag

SEQ ID NO: 38063 - DNA, 2640 bp, Artificial Sequence
  derived and/or modified sequence
atggccaacggcaccctgacccggcggcaccagaacggccggttcgtaggcgacgctgacctggagaggcagaaattttctgacctgaagctgaacggccctcaggaccattcccatttgctgtacagcactattccacgcatgcaagagcctggacagatcgtggagacatatacagaagaggatcccgagggagctatgagtgtagtctccgttgaaacttcagacgacggcacgactagaagaaccgagaccacggtcaagaaagtggtgaaaacggtgactacccgcaccgttcagcctgtggctatgggaccagacggcctgccagtggatgctagcagtgttagcaataattacatccagactctgggtcgggactttaggaaaaacggaaacgggggacccggcccttacgtcggccaagccgggacagccactctgcctaggaatttccactacccccctgatggctatagccggcattacgaggacggctaccccggggggagcgacaattatgggtccctgtcccgggtaaccaggatcgaggagagatacagaccctccatggaagggtatagggccccttcccggcaggacgtgtacgggcctcagccacaagtgagggtgggagggagctcggtggatctgcatcgttttcacccggagccctacgggttggaagatgaccagcgctcaatgggatatgatgacttggactatggtatgatgagcgactacgggaccgctcggcggactgggaccccatcggacccccgacgcagacttcgtagctacgaggatatgatcggcgaggaggttcctagcgatcagtattattgggccccacttgcacagcacgagcgcggtagcctggcatccctggactccttacgcaagggcggaccgcctccccctaactggcggcagcccgagttgccagaagtcatcgctatgctggggttccgccttgatgccgtgaagtcaaatgctgctgcctatctgcagcacctatgttatcggaatgataaggttaagacagacgtcaggaaactaaagggcattcccgtcttagtaggactccttgatcatcctaagaaggaggtccatcttggcgcatgcggggctttaaagaatatttccttcggccgggatcaggataataagattgccatcaagaattgcgacggcgtgcccgccctcgttcgcctgctgaggaaggcccgcgacatggatctgaccgaagtgattaccggcacgctgtggaatttgtcgtcgcatgattctatcaaaatggaaattgtcgaccacgctctgcatgcactgaccgacgaggtgataatcccacatagcgggtgggagcgggagcccaatgaggactgtaagccccggcatatcgaatgggagtccgtgttgacaaacaccgccgggtgtttgaggaatgtgtcgagtgaaaggtccgaggcaaggcggaaattaagagaatgcgacggactagttgacgctctgatatttatcgtgcaagcggaaattggacagaaagactcagacagcaagttggtggaaaactgcgtttgtcttctgagaaatctcagctaccaggttcaccgagagattcctcaagctgaacggtatcaggaggctgcgccaaatgtggccaataacaccgggccgcatgcagccagctgcttcggagccaaaaaaggaaaaggcaagaagcccatcgaagatcccgctaatgataccgtagattttccgaaaagaacctcaccagctagaggctacgaactgcttttccagcctgaagtcgtgaggatttatataagtcttctgaaagaatctaaaacccctgcgattttagaggcgtccgccggcgccattcaaaatctgtgcgccggaaggtggacatacggccggtacataagaagcgcccttaggcaggaaaaagcattaagcgccatcgctgacctgttgactaatgagcatgaacgtgtcgttaaagcagcttctggggcactgcggaatctggctgtcgacgcacgaaacaaggaattgatcggcaagcatgctattccaaacctggtgaagaatttgccaggcggccaacaaaattcatcttggaacttttccgaggacaccgtcatttcaatactcaacaccattaacgaggtaattgcagagaacctggaagcagctaagaaattacgagaaactcaggggattgagaaactggtcctcattaataaatcgggtaaccggtccgagaaggaagttcgagcagcggcactcgttctgcagaccatttgggggtacaaggagctgagaaaaccccttgaaaaggaagggtggaaaaaaagcgactttcaagtcaatctgaacaatgcaagccgctcacagagctcgcattcctatgacgatagtactttgcctctgatcgatagaaatcagaaatccgataagaaacccgaccgggaggagattcaaatgtctaatatgggcagcaacactaaaagcctggataataactacagtacccctaacgagcggggtgaccataaccgaacattggataggagcggcgacttgggagacatggaacctctgaaaggcaccacacccttgatgcagaaaatctag

SEQ ID NO: 38064 - DNA, 2640 bp, Artificial Sequence
  derived and/or modified sequence
atggccaacggcaccctgacccggcggcaccagaacggccggttcgtcggggacgcggatctggaacgacagaagttctccgacctcaaactgaacggcccccaggaccactcccacctcctgtattctactattccccgcatgcaggaaccggggcagattgtggagacttatactgaagaggatccggaaggggctatgagcgtggtctccgttgagacttctgacgacggcacaactcgaaggaccgagacgacagtaaaaaaggtggtgaaaacagtgacaacgcgcacggtgcaaccagtggccatgggtcctgacgggctgcctgtggacgcaagcagtgtgagtaataactacatccagaccctggggcgggatttcaggaaaaatggaaacggcggacctgggccatatgtgggccaggctgggaccgcaacacttccaagaaacttccactacccacctgatggttactctaggcattatgaggatggataccctgggggttcggacaactatggaagtctgtcgcgagtgactcgaatagaagagcggtacaggccgtctatggaggggtacagggctccatctcgccaggatgtttatggccctcagccccaggtacgtgtcggcggttcctccgtcgacctgcatagatttcatccagaaccttacgggctggaagatgaccagaggtccatggggtacgacgatctggactacggaatgatgtcagactacggaacagctcgaagaactggcacaccttccgatccacggagaagactaaggtcatacgaagatatgattggggaggaggtaccgtctgatcaatattattgggcaccgctggctcaacacgagcggggatccctggcctccctggacagccttcggaaggggggcccgcccccaccaaactggcgccaacccgagttgccagaggttatcgcaatgctgggattccgcttggacgctgtcaagtccaacgccgccgcttacttacaacatctgtgttatcgcaatgataaggtgaaaaccgatgtcagaaagctgaagggtatacctgtgctggtggggcttttggatcaccctaaaaaagaagtgcaccttggcgcgtgtggcgctctgaaaaatatcagcttcggcagggatcaggataataaaatcgcgattaagaattgcgatggtgtgccagctctcgtgcgcctgctcagaaaggctagggacatggatcttaccgaggtcataacgggaactttatggaacctctcctcccacgatagtatcaagatggagatcgtcgatcacgccttgcatgctctaaccgacgaagtgatcattccccactctgggtgggaacgggagccaaacgaggattgcaagccaagacacattgaatgggagtccgtacttaccaacaccgccggctgtcttcggaatgtgtcgtcagagcggagtgaggccaggcgaaaacttcgcgagtgtgacgggttggttgacgcgctgattttcatcgtgcaagcggagatcgggcagaaggactctgactctaaattagtcgaaaattgtgtgtgtctcctccgcaaccttagctaccaagtacaccgtgagatacctcaggccgaaaggtatcaggaggcggcccccaatgtcgctaacaataccggcccccatgcagcgtcatgctttggagcaaaaaagggaaaaggcaagaagcctattgaggatccagccaatgacaccgttgatttcccaaaacgcacgagtccagcccgaggctacgagctcctgttccagccagaggttgtcaggatttatatcagcttgctcaaagaaagtaaaacaccggctatcttagaagcgtccgctggcgccatccagaacctctgtgcaggcaggtggacttacggccggtacatcaggagtgccttacggcaggagaaggccctaagtgcgattgcggacctgctcaccaatgagcacgagcgtgtcgtgaaagccgcctccggcgccttgagaaatctggctgtggacgcgcgaaacaaggaactgattgggaagcacgcgatacccaatctcgtgaagaacttacctgggggccaacagaactcatcctggaacttcagtgaagataccgtaatcagcatcctgaacacaatcaatgaggtgatcgctgagaacttggaggcggcaaaaaagttgagagagacccagggcattgagaagctggtcctaatcaataaatctggtaataggagcgagaaggaggtccgcgccgcagccctcgtgttacagacaatctggggctataaagagctgcgaaagccactggagaaagaggggtggaagaagagcgacttccaggtgaacctgaacaatgctagcaggtcacagagcagccactcgtatgatgattctaccctgcctttgattgaccgcaaccaaaagtccgataagaaacccgatagggaagaaatccagatgagcaacatggggagtaacacaaagtctctcgataataattactctacgcctaacgagaggggcgaccacaaccggacacttgatcggagtggcgatctgggcgatatggagcccctgaaaggcacaactcccctgatgcaaaagatctag

SEQ ID NO: 38065 - DNA, 2640 bp, Artificial Sequence
  derived and/or modified sequence
atggccaacggcaccctgacccggcggcaccagaacggccggttcgtcggggacgctgaccttgaaagacagaagttctctgacctgaagctgaatgggcctcaggatcatagccacctgctgtactccacaatcccccgcatgcaggaaccggggcagatcgtggaaacctacaccgaggaggaccccgaaggcgcaatgagcgtggtcagtgtcgaaactagcgacgatgggaccaccaggaggactgagacaacagtgaagaaggtcgtcaagaccgtgacaactcgcaccgtgcaaccagtggccatggggcctgatggtctccccgttgatgcaagttccgtctctaataactacattcagactctggggagagactttcggaagaacggaaatgggggccctggaccgtatgtagggcaggcagggacagccacactgccccgcaacttccattaccctccagacggttattctcggcattacgaagacggatatcccggcggcagcgataactatggtagcttatctcgcgtaaccagaatcgaagaacggtacaggccttcaatggaaggttacagagccccctctcgtcaggacgtgtacggcccccagcctcaggttcgggtgggcggaagctccgtcgacctccatcggtttcacccggagccctacgggcttgaggacgatcagcggagtatgggttatgacgacctggactacgggatgatgagtgactacggaaccgctaggagaactgggaccccatcagacccacgccgacggttgcgctcatacgaggacatgattggggaggaggtccctagtgatcaatattactgggctcctcttgctcagcatgagcgtgggtcccttgccagccttgattccctacgaaaggggggccctcctccccccaactggcggcaaccagagctgcccgaggtgatcgcgatgctgggctttcgcctggacgctgtaaagtccaacgctgccgcgtacttacagcacctatgttaccgcaacgacaaggtaaaaaccgacgttaggaaactcaagggtattccggtgttagtgggtctactcgaccatcctaagaaggaggtccacctgggtgcttgcggcgcactcaagaacatctcctttgggcgggaccaggataataaaattgcaataaagaactgtgatggcgtgccggctctggtgcggctcctgagaaaggccagggatatggacctcaccgaagtgataaccggcaccttatggaacttgagcagccacgattctattaaaatggagatcgtggatcacgccctgcacgccctgaccgacgaagtaattattccgcacagtgggtgggaaagagagccaaatgaagactgcaagccacgtcatatcgaatgggagagcgttctgactaatacggctggatgtctgagaaacgtctctagtgagaggtccgaagcgaggcggaaactgcgcgagtgcgacggccttgtggacgcccttattttcatcgtccaggccgaaattggccagaaggactcagactcaaagctggtcgaaaactgtgtatgtttacttcgcaatctgtcatatcaagtacacagagaaataccccaagcggagcggtatcaagaagccgccccaaatgtggccaacaacactggcccacatgccgctagctgttttggggcgaagaaaggaaagggcaagaagcctatcgaagatcctgcaaatgataccgtagacttccctaagagaactagcccagccaggggatatgaactgctgtttcagcccgaggtggtaagaatctatataagtttgcttaaagagtccaaaaccccagcaattctggaggccagcgcaggtgctatccagaacttgtgtgctggcaggtggacatacggccgttacattcggtccgccttgaggcaggagaaagcactgtcggctatagccgatctgcttaccaacgagcacgaacgggtcgtcaaggcagcttccggtgcacttaggaacctcgcggtggacgctaggaacaaggaactgatcggaaagcatgctattcctaatctggttaagaatttgccgggagggcagcaaaactcttcttggaatttctccgaggatacagtgatctccatattaaacaccattaacgaggtgatcgccgaaaatttggaggctgcgaagaagttgcgcgaaacccagggaatagaaaagctggttctgatcaacaagtctggaaatagatctgaaaaagaggtaagggcagcggcattagtcctccagaccatctgggggtacaaggagctgcgcaaaccactcgaaaaagagggctggaagaaatctgactttcaggtaaacctgaacaacgcatctcgcagtcaaagctctcatagttacgacgattcgacactgcctttgatcgaccgtaatcaaaagagcgacaaaaaaccagatcgggaggagatccagatgagcaatatgggatcaaatacaaaatctctcgacaacaactacagcacccccaatgagagaggagatcacaatagaacactagacagatccggagaccttggcgacatggagcctctgaagggcacaacccccttaatgcaaaaaatatag

SEQ ID NO: 38066 - DNA, 2802 bp, Artificial Sequence
  derived and/or modified sequence
atggatgactctgaggtcgagtctacggccagcatcctagcctccgtcaaggaacaggaggcacagttcgaaaaattaactagagccctggaggaggagagaagacatgtgtctgcacagttagaacgcgtgcgcgtttccccacaggacgccaaccccctaatggctaatggaaccctcacccggcgtcatcagaatggccgtttcgtgggggacgccgatcttgagcgccagaagttctcagatctgaagctcaatggaccccaggatcactcccatctcttgtattcaactatcccacgaatgcaagagccaggccagatagtggagacttatacggaggaagatcctgagggcgctatgagcgttgtaagcgttgagacttctgatgacggaaccactcggaggaccgaaacaaccgtgaaaaaggtggtgaagacagttactactaggactgtgcaacctgtggcaatgggccctgacggcttacctgtggatgcaagtagcgtcagcaataactatattcagactctgggaagagacttccggaaaaacggcaacggtggccctggtccttatgtcggtcaggcgggtaccgccaccctacccaggaactttcactaccccccagacggctactctagacactatgaggacggatatccaggtggcagcgataactacggttctctgagccgggtcacgaggatagaagagcgctaccgcccttctatggagggctaccgcgctccttccaggcaagacgtctacggcccacagcctcaggtccgggtgggcggaagctcagttgacctgcaccgcttccatcctgagccctacgggctggaagatgaccaacgcagcatggggtatgacgatcttgattacggcatgatgtccgactacggcaccgccagaaggaccgggacccctagcgaccccaggcgcagattgaggagttatgaagacatgattggcgaagaagtgccttccgaccagtactattgggctccccttgcgcagcacgaacgagggtcacttgcctctctggactccctgagaaaagggggaccccctccaccgaactggcgccaacccgagctgcctgaggtgattgccatgcttgggtttcgactggatgctgtcaaaagtaatgcagccgcttatctgcagcatctgtgctatcgcaatgacaaagtaaagactgatgtaaggaaattgaaggggattcctgtactggtcggactgctagatcaccccaaaaaggaggttcatttgggtgcgtgcggggctcttaagaatattagctttggaagggatcaagacaataagattgccatcaaaaattgcgacggcgtacctgcactcgtgcggctgctgcgaaaggcccgagacatggatctgactgaggttatcactgggaccctatggaacttgtcttcccatgactccattaagatggaaatcgtagaccacgctctgcacgctctgacagacgaggtgatcatcccacatagtggctgggagagagaaccaaatgaggattgcaagccacgacacatagaatgggagtcagttctgactaacaccgccggatgtctgcgaaacgtgtcctctgagcggtcggaagccagaagaaagctgagagagtgcgacggcctcgtggatgccctgattttcatagtgcaggctgaaatcggccaaaaggattctgacagcaagttagtagagaattgcgtctgtctgctgagaaacctttcttatcaagtccatcgcgagatcccccaggctgagcgttatcaggaggccgctccaaatgtggccaataacaccgggccacacgccgcttcctgctttggagcgaagaaaggaaaaggtaagaagccgatcgaggaccccgcaaacgacacagtggatttcccaaagcgtaccagcccagcccgaggttacgaactgctctttcagccggaggtagtgcgcatctacatttccctgttaaaggaatctaagacgcctgcaatcctggaggcaagtgctggggcaatccaaaacctgtgtgctggcagatggacctacggacgctacattagaagcgcactccgccaggaaaaggccttaagcgccatcgccgacctgctgaccaacgaacacgagcgcgtggtaaaggccgcatccggagccttgaggaacctggccgtggacgctcgtaacaaggaactgattggcaagcacgcgattcccaacttggtgaagaacctgccaggtggacagcagaacagcagctggaacttcagtgaggacacggtcatttcaatcctcaacaccattaacgaggtgatcgccgagaacctcgaggcggctaaaaaactcagagagacacaagggatcgaaaaactagtgcttattaacaagtcgggtaatcggtcggaaaaagaggtacgggcagcagcccttgtactgcaaactatttggggctataaagaattacggaaaccattggagaaggaggggtggaaaaaaagtgactttcaggtgaacttgaacaacgcttccaggagtcagtcatctcatagttacgatgacagcacactaccgttgatagaccgtaatcaaaaatccgacaaaaagcccgatcgggaagaaattcagatgtctaatatggggagcaacaccaaaagccttgataataactattctacccccaatgagaggggtgatcataataggaccctggataggtcaggcgatctgggagatatggagccactaaaggggactacacccctgatgcagaaaatctag

SEQ ID NO: 38067 - DNA, 2802 bp, Artificial Sequence
  derived and/or modified sequence
atggacgacagcgaagtcgagagtaccgccagcatactggcttccgtgaaggaacaagaggcccagttcgagaaattaacacgcgctttggaggaagaaaggagacacgttagcgcacagctggagcgcgtgcgagtgtcccctcaggatgccaatccccttatggcaaacgggaccctgacaagaaggcaccagaacggcaggtttgtgggcgacgctgacttggaaaggcagaagttcagcgatctaaaactaaacggcccacaggatcatagtcacttgttgtacagcacgatcccccgaatgcaggaacccggtcagatcgtggaaacctataccgaagaggatccagagggagctatgagcgtcgttagtgtggaaacaagtgatgacggcacaacgcggagaactgaaaccaccgtcaagaaagttgttaaaacagttactaccaggaccgtgcaacccgtagcaatggggccagacggtttgcctgtagatgcaagctctgtgagcaacaattacatacagacgctcggtagggacttccggaaaaacggaaatggcggacctggaccatatgtcggccaggccggaacggcgaccctgcccaggaactttcattatccaccagacgggtactccagacattatgaagatggctatcccggaggatctgacaactatggctcactgagccgcgttacaaggattgaggagcggtacagacccagcatggaagggtacagagcccctagccgccaggacgtgtacggacctcagccccaggttagggtgggtgggtcgagcgtggacttgcatagattccatccagagccatacggtctggaggacgatcaaaggtctatggggtatgatgacctagattacgggatgatgtcagactatgggacagctcgcaggactggaacgccttctgatcctaggcgacgattgagatcatacgaggacatgatcggagaagaggtgccttctgaccagtattactgggccccactggctcagcacgagcggggaagtcttgcttcgctggattccctacgaaaggggggtccacctccacctaactggcgacaaccagaacttccagaagttatcgctatgctgggattccggctggacgctgtaaaatcaaacgccgcagcctacctgcagcatctctgttacagaaatgataaggtgaagacggatgtgcgtaaactcaaggggattcccgtcttagtgggcctgcttgaccaccctaaaaaggaggtccacttaggcgcttgcggcgcactgaaaaacatcagctttgggcgtgaccaggacaacaaaattgccattaagaattgcgacggtgttcccgctctggttcgcctgcttcgaaaagcacgagatatggatctgactgaagttattacaggcaccctgtggaatctgtccagccatgacagcatcaaaatggagattgtggaccatgcgctgcacgcattaactgatgaagtcattatcccccacagcggctgggagcgcgagccaaatgaagactgcaagcccagacatatcgaatgggagtcagtcctgaccaatacagccggatgcctgcgaaacgtgagttctgagagatcagaggctcgcagaaaattaagagaatgcgacggcttggtggacgctctgatcttcatagtgcaggcggagatcggtcagaaggattcagatagtaagctggtcgaaaactgcgtctgtctcctgcggaacctgtcctatcaggttcatagggagataccccaggcagagcggtatcaggaagcagccccaaatgtggcgaataacacgggtccccatgccgcatcgtgcttcggcgctaagaaaggaaaagggaagaagcctatcgaggaccccgctaacgataccgtagacttccccaaacgcacatccccggcacgaggttacgaactcctcttccagccggaagtggttagaatctatatcagcttgctgaaggagagcaaaactccagccattctggaagcctctgctggagctatccagaatctttgcgccggacgctggacctacggcagatacatacgaagcgccctgcgacaggagaaagctctgtccgccatcgcagacctgctcaccaatgagcacgagcgggtcgtgaaagctgcgtctggcgcactgcgcaatctcgcggtcgatgcgagaaacaaagagctaatcggcaagcatgccatcccaaatttggtgaagaatttgccaggaggccaacaaaatagctcctggaacttttccgaggacaccgtgattagtatactgaacaccataaacgaggtcatcgccgaaaatctggaagcggctaaaaagctgagggagacacaggggatcgaaaagctcgtgctcattaataaatcaggcaaccgctccgagaaagaagtgagggccgctgcattggtcctacaaacaatttggggatataaagagctccgcaagccattggagaaagagggatggaaaaaatccgattttcaggtgaatctgaataacgcttctcggagccaaagttcccattcatacgacgattccacattaccactgatcgatcgaaaccaaaagagcgataaaaaacccgaccgagaagagatccagatgagcaacatggggtcaaatacaaaaagcctggacaacaactattccacacccaacgagcgcggagaccataatcgaaccctggacaggtctggagacctaggggacatggaacccctgaaaggcaccacgccacttatgcaaaaaatatag

SEQ ID NO: 38068 - DNA, 2802 bp, Artificial Sequence
  derived and/or modified sequence
atggatgactccgaagttgagtctaccgcctctatcttggcatctgtcaaagagcaggaggcgcagttcgaaaaactgacaagagcactggaggaggaacggaggcatgttagcgctcagctggaaagggtcagagtatctccacaggatgcaaaccccctgatggcaaacggcacacttactagaaggcaccagaatgggcgtttcgtcggagacgctgacttggaaaggcagaagttcagcgacttaaagctcaacggccctcaggaccactcacatcttctttattctacaatccctcggatgcaggaaccgggtcagatcgtggagacttacaccgaagaggatccagagggagcaatgtctgtggtcagcgtcgaaacgagcgatgatggtacaacacgcaggaccgagacaacagtgaagaaagtggtcaagaccgtaacaaccagaaccgtccaaccagtggccatggggcctgatgggctcccagtcgatgcctctagcgtgagcaataattacatccagactctcggaagggactttagaaaaaatggaaacggcggtccgggtccttacgtggggcaagcaggtactgcaaccctgccccgtaactttcactaccctccggatggatacagtagacattacgaggacggttatcccggagggagcgacaactacggctctctcagccgcgtcactcgcattgaagagcggtatcgaccctctatggaggggtaccgcgctcccagtcggcaggatgtctacggaccccaaccacaggtgcgcgtgggtggatccagcgtcgatttacatcggttccaccctgaaccgtatggactagaggacgatcaacggagcatgggctatgatgacctcgactatggaatgatgtctgactatggaacagccaggcgcacggggacccctagtgaccccagaagacggctcagatcatacgaagacatgataggcgaggaggttcccagcgaccagtattactgggcacctcttgcacagcatgagcggggatctcttgcttccctggattctctcagaaaggggggaccaccaccgccaaactggcgccagcccgaactccctgaggtgattgctatgcttggctttcggctggatgcagtaaagtctaacgcagctgcttatttacaacacctatgctacaggaatgacaaagtgaagaccgacgtgaggaaactgaagggaatcccagttttggtcggtctgctagatcacccaaagaaggaggtgcatctgggcgcatgtggggctctgaagaatatctccttcggcagggatcaggacaacaagattgcaatcaaaaattgcgacggtgtccccgctctcgttcggctgcttagaaaagctcgggacatggaccttacggaggtgattacagggacactgtggaatctgagtagccacgattcaattaagatggagattgtggaccatgccctgcacgccctgacagacgaggtcattatcccccactctggttgggagagggaacccaacgaagattgtaagccacgccacattgagtgggagagcgttctgactaacactgccggttgccttagaaacgtgagctccgaacgttctgaagcaagaagaaaattgagagagtgcgacgggctggtggacgccttgatcttcatcgtacaggcagagatagggcagaaggacagcgactcaaaactggtcgaaaattgtgtgtgtcttctcaggaacctctcgtaccaagtacaccgagagataccacaggcggagagataccaggaggccgctcctaacgtggccaacaacaccggaccgcatgccgcaagttgcttcggcgctaagaagggaaagggaaaaaagcctattgaggatcctgcgaatgacacagtcgactttccaaagcgcacctcaccggctcggggatacgagctgctctttcaaccagaggttgtgcggatctatatctcccttctcaaggaatctaagaccccggctatcctcgaagcctcagctggcgctattcagaatctgtgtgctggacgttggacctatggccgttatatccggagcgccctcaggcaggagaaagcactctcagccattgccgatcttctgaccaatgagcacgaacgcgtcgtgaaagctgcgtccggtgctttgaggaatctggctgtagacgcacgcaacaaggagttgatcggaaagcacgcgattccaaacctagtcaaaaacctgccgggaggacaacagaactccagctggaactttagcgaggatacagttatatccatcctgaatacaattaatgaggtgatagctgagaatctcgaggctgctaaaaaattgcgcgagacccagggcatagaaaagttagtgctaataaacaagtctggcaatcgatcggaaaaggaagtgcgggctgctgcactagtgttgcaaactatctggggctacaaggaattgcggaaacctttggagaaagaggggtggaagaaaagtgacttccaggtgaatctgaacaatgccagccgctcacagtccagtcactcatatgacgatagcaccctgccactaattgataggaaccagaagtctgataaaaagcccgatcgcgaagagatccagatgtccaatatggggtctaacactaaatctctggacaacaattacagcacgccaaacgagcggggagatcacaaccggactctggacagatctggtgatctgggcgatatggagccacttaaagggacaacccccttgatgcagaagatctag

SEQ ID NO: 38069 - DNA, 2802 bp, Artificial Sequence
  derived and/or modified sequence
atggatgacagcgaggtggagtcgaccgcctcaattctggcgagtgttaaggagcaggaagcacagttcgagaagctgacccgagcgctggaggaagaacgtaggcacgtttcagcacaactggagcgcgtgcgcgtgtctccacaggatgcaaatcccctgatggccaacgggacacttacccgtaggcaccagaacggacggtttgttggggacgctgacttggaaaggcagaagttctccgacctgaagctcaacggcccacaggatcattcccaccttttgtactctaccatccctaggatgcaggagccaggacagattgtggaaacgtatactgaggaggaccctgagggcgctatgtcagtcgtctcggttgagacgtcggacgatgggaccacccgacggaccgagaccaccgtgaaaaaagtggtcaagacagtgaccacacgaaccgtgcagcccgttgcgatggggccagatgggttgcctgtcgacgcctcctcggtctcaaacaattacatccaaacactcggacgcgatttccggaaaaacggcaatggaggtcccggtccgtatgtgggacaggctggcactgcgactctgcccaggaactttcactatcctccagacgggtactctaggcattatgaggacgggtaccctggaggctcagacaactatgggtccctttcaagggtgacccgtatcgaggagcgatacaggccaagcatggagggttacagagcgccttcccgtcaggatgtatacggacctcagccccaggtaagagtcggcggatcaagcgtcgacctgcatagatttcaccccgagccctacggactggaagacgaccagagatctatgggatacgacgacctggactatggaatgatgtccgattacggcactgctagacgaaccggcacaccctcagatccacggagacgccttagaagttatgaagatatgattggcgaggaggtgccaagtgatcagtactactgggccccactggctcagcatgaaagggggagtctggcgagccttgactcactgaggaaggggggtcctcccccacccaactggcgccaacctgaactgcccgaggtgatcgccatgttgggctttaggctggatgccgtgaaaagcaatgctgcagcttatcttcagcacctgtgctaccgcaacgacaaagtgaaaacagacgtgagaaagttgaaagggataccagtcttagtgggcctactcgatcatccaaaaaaggaagttcacctaggggcatgtggcgcacttaagaatatttcgtttggccgtgaccaggacaacaagatcgctataaaaaactgtgacggagttcccgcattggtccggttactccggaaggcacgggatatggacttgacagaggtgattaccgggactctttggaacctgtcaagccacgattccattaaaatggagattgtggatcacgctcttcacgcattgaccgatgaggtgatcatcccccactcaggctgggagcgagaacctaatgaagactgtaaacccaggcatatcgaatgggagtcagtactgactaataccgccggatgcctccgaaacgtgagttctgagcggtctgaagcccgacgaaaactgcgggaatgcgacggcctggtcgacgcattaatcttcattgtgcaggcagagatagggcaaaaggacagtgattcaaagctggtcgagaactgtgtgtgtctcctgcgtaatctgtcctatcaggtgcacagagagatccctcaagcggaaaggtatcaagaagccgcaccaaatgtcgctaacaacactggcccacacgctgcaagctgctttggagcaaagaagggaaagggtaaaaagccaatcgaggaccccgcaaatgacaccgtggactttccgaagcggacaagccccgcacgtggctacgaacttctgttccagcctgaagtcgtccggatatacatctccctgctgaaggaatcaaagactcccgcaatcctggaggcctccgcaggcgctattcagaatctgtgtgccggacgatggacatatgggcgatatatacgatctgctttacggcaggaaaaggccttgtctgccatcgctgatctgctgacaaacgagcacgaacgagttgtaaaagccgcttcaggtgccctccgcaatcttgcagtagatgcgaggaacaaggaacttatagggaagcacgctatccccaatctagtgaaaaatcttccaggcggacaacagaactcctcttggaacttttctgaggacaccgtcatctccattttgaatacgataaatgaggtgatcgcggaaaacctggaggccgcaaaaaaacttcgcgagacacaggggattgaaaagctggtattgatcaacaaatctggtaatcggagtgagaaagaggtcagagcggcagctcttgttctgcagacaatatggggatacaaagaattgcgaaagcccctcgaaaaggaaggatggaagaaaagcgatttccaagttaacctgaataacgccagtagatcccagtccagtcacagttacgacgatagtaccctgcctctgattgacaggaaccagaaaagcgacaagaaacccgatagggaggaaatccaaatgtctaacatgggtagcaatactaaatcactggacaataactactccactccaaacgagaggggggatcacaatcggaccttggatcggagcggtgacctgggagacatggagccactgaaaggcactactcctctaatgcaaaaaatttag

SEQ ID NO: 38070 - DNA, 2640 bp, Artificial Sequence
  derived and/or modified sequence
atggccaacggtacactcaccagacggcatcaaaacggacggtttgtcggcgatgccgacctggaaaggcagaagttttcagatctgaagctgaacggaccccaggaccacagtcacctgctgtactccactattcccaggatgcaggagccaggacagatagttgagacctacacagaggaagatcctgagggagctatgtctgtggtttctgttgagaccagtgatgatggcaccacaagacgcaccgagacgaccgtgaagaaggtggttaagactgtgacgactcggactgtgcagcccgttgccatgggtccagacggcctgcctgtcgatgcttcaagtgtttcgaataactatatccaaaccctcggcagagacttccgtaagaacggcaacggaggtccaggcccttacgtcggccaggcaggaaccgctacgctcccacgcaactttcattaccccccagacgggtattcacgacattacgaggatggttacccgggtggcagcgacaactacgggtccttgtctcgggtaaccaggatagaggaaaggtacaggcctagtatggaaggctacagggcgccatcccgccaagacgtgtatggcccacagccgcaagtcagggtagggggaagcagcgtggacttacaccgcttccatccagagccttatggactggaggacgaccagcggtctatgggatacgacgatctggactacggcatgatgtcggactacgggacagcacgcagaacagggaccccgtctgatccgaggaggcgcctgaggagttacgaggatatgataggggaggaggttccatccgatcagtattactgggctccactggcacagcacgagcgcggatctctggccagcctggattctttgagaaaggggggaccgccaccacccaactggcgccaacctgagcttccggaagtcatcgccatgctggggttcaggcttgacgctgtgaagtccaatgcagccgcttacttgcagcacctgtgttaccgtaacgacaaggtcaaaacagacgtgcggaaactgaagggtattcctgttctggtgggcctgctggaccacccgaagaaggaggtgcaccttggtgcgtgcggtgctttaaaaaatatctcatttggacgagatcaggacaataagattgcaattaagaattgcgacggagtaccagctctggtgcgattactgcgaaaggcgcgagacatggatctgaccgaggtgatcactgggactctgtggaatttatcatctcacgattctatcaagatggaaattgtggaccatgcactgcacgcattgacggacgaggtaatcattccccacagcggatgggagagagaaccaaatgaggactgtaaacccaggcatatcgagtgggaaagtgttctcaccaacactgccggatgccttaggaacgtttctagtgagagaagcgaggccagacgaaagttgagagagtgcgacggactcgtcgacgcactaatcttcatcgtgcaagcagagatcggacaaaaagattctgacagcaaacttgtggagaactgcgtgtgcttattgcgcaacctgagctaccaagtccaccgggagattccgcaggcggagcggtaccaagaggccgctcctaatgtggctaataataccggccctcacgcagctagctgcttcggcgcaaaaaagggcaaaggcaaaaaacctatcgaggatcccgctaacgacacagtggattttcctaagaggacgagcccggcacgcggttatgaactcctgttccaacctgaggtagtgcggatctacatcagcctgttgaaggagtccaagacccccgctattctggaggctagcgccggagccatccagaatctgtgtgccggtcgatggacttatggacggtatatcaggtcggcgctgagacaagagaaggcactgtccgccatagctgaccttttgactaatgagcatgagagagttgtcaaagccgcttctggagctctccggaatctggcggtagacgctcggaacaaggaacttattgggaaacatgccatacctaatctggtgaaaaatctacccggtggtcagcagaattcttcctggaatttcagcgaagataccgtgatttccatcctgaacacaattaacgaggtgatagcggagaacctggaagccgcaaagaagcttcgtgagacccagggcattgaaaagctcgtgcttattaataaatcgggaaaccgcagcgaaaaggaggtgcgggcagctgcgctggttttgcagacaatctggggatacaaagaactccggaaaccactagaaaaggaggggtggaagaagagcgacttccaggttaacttaaataacgctagtcgttcccagtcatcccactcttacgacgactctactctccctctcatcgatcgcaatcagaagtctgataagaaaccagaccgggaggagatccaaatgagtaatatgggatccaacacaaagtctcttgacaacaactactctacccccaatgagagaggggaccacaacaggacactagatcgaagtggggacttgggggacatggagccgctcaaggggacgaccccactgatgcagaagatctag

SEQ ID NO: 38071 - DNA, 2640 bp, Artificial Sequence
  derived and/or modified sequence
atggccaatgggacattgacaagaaggcaccaaaatggaagatttgtgggtgatgcagatcttgagcggcagaagttctctgaccttaagctgaatgggcctcaggaccattctcatctgctttacagcaccattcccagaatgcaggaacccggacagattgttgagacttacacggaggaagatcccgagggggcaatgagcgtggtctcagtcgagaccagcgatgacggaactacacgcagaaccgagacaacagttaaaaaagtagtaaagacggtgaccacaaggaccgtgcagcctgttgccatgggtcccgatggactacctgtggacgcatccagcgtcagcaacaactacatccagactctaggtcgcgattttcgcaaaaatggaaacgggggtcctggaccatacgtcggccaggccggaacagcaacattgccaaggaattttcactacccaccagatggttattcacggcattacgaagatgggtaccccggtggtagcgacaattacggttctctgagcagagtgacgcgtatcgaggagcgctaccgaccctctatggaaggctatcgggctccatctcgccaagacgtttacggaccacagccccaggttcgcgtcgggggatcgtccgttgacctgcatcggtttcacccagaaccttatggcctagaagatgatcagcgctctatggggtacgacgatctggattacgggatgatgagtgattacggcactgcacggaggactggcactccttctgatccgaggcgcaggcttagatcatacgaggacatgattggtgaagaggtcccatccgatcagtactattgggctccactcgctcagcacgagcgcggaagcctggcatccctggattcactgcggaaaggcggaccccctccacctaactggcgtcagcccgagctgccagaggtgattgcgatgctaggttttagactggacgctgtgaaatccaacgctgcagcctatttgcagcatctgtgctatcgaaacgacaaagtgaagaccgacgtgagaaagctgaaaggaattcccgttttggtgggcctgttggatcacccgaagaaggaggttcatctgggagcctgcggggcattgaagaacatatcattcggaagagaccaagacaataagatagctattaagaactgcgacggtgttcccgctttggttagactgttacgcaaagctcgtgatatggacttaaccgaagtgataaccggtactctctggaacctgagctcccatgattcgattaaaatggagattgtcgaccatgctctccatgcccttaccgacgaagtaataattccacactctgggtgggagcgtgaaccaaacgaagactgtaagccgaggcacattgagtgggagtctgtactgaccaacaccgccggatgcctgcgaaacgtgtcttccgagagatcagaagcgaggaggaaactgagagaatgcgatggtctcgtcgatgccctcatctttatcgtgcaagctgaaatcggccagaaggactccgattcgaagctcgtggagaactgtgtctgtctcctcaggaacttgtcatatcaggttcaccgagagatcccacaggcagaaaggtaccaggaagctgcgcctaacgtcgccaataatacaggccctcacgctgccagttgttttggagccaagaaaggaaaaggcaagaaacccatcgaggatcctgctaatgacacggtggattttcccaaaaggacctcgcccgctaggggctatgaactgttatttcaaccagaagtcgttcgcatttatatctcgctactgaaggagagtaaaacccccgctatcctggaggcgtcagctggcgcaatccaaaatctttgcgccggaagatggacatatgggagatatatcagatctgccttgcgacaggagaaagccctgtccgccatcgcggatcttcttaccaatgagcacgaacgcgtggtcaaagctgcctccggagcgctccgcaatctggcggtggacgctaggaataaggagctcatcgggaagcacgccataccaaacctggtcaagaacttgcccggtggtcaacagaacagcagctggaattttagcgaggatacggtgatctctatcctgaatactataaatgaagtgatagcagagaatctggaagccgctaaaaagctgagagaaactcagggaattgagaaacttgtgctgatcaataagtccggaaatcgcagcgaaaaggaggtgagggcagctgccctcgtgctgcagacgatatgggggtataaagagctgagaaaaccactggagaaggagggatggaagaaatctgactttcaggttaatctcaataatgcctcgaggtcacagtcttcccactcttacgatgactctacactgcccctcattgatcgcaatcaaaaaagtgataagaagccagaccgcgaggagattcagatgtcaaacatggggtcgaataccaaaagtctggacaacaattattccactcccaatgagcgtggagaccacaataggacacttgatcgttccggcgacctgggagatatggagccactgaagggaaccactcctctgatgcaaaaaatttag

SEQ ID NO: 38072 - DNA, 2640 bp, Artificial Sequence
  derived and/or modified sequence
atggctaacggcaccctcacacggaggcaccagaatggacggtttgtgggggatgctgatctggagaggcagaaattttcagacctcaagttgaatggacctcaagaccatagtcacctgctgtattcaactattcccagaatgcaggagccgggacagattgtggagacgtataccgaggaagatccagagggcgcaatgtccgtagtctctgtcgagacaagcgatgacggcacaacccggaggacggagaccacagtgaaaaaagtggtcaagactgtcaccacccggaccgtgcagccggtcgcaatgggacccgatgggctgcctgtggacgcatcatcagttagcaacaactatattcaaactctcggccgagactttcgtaaaaatggaaatgggggacctggcccatacgtcggacaggccggaacagccaccctgccccgaaacttccactacccgcctgatggctattctcgccactatgaggacggatacccaggcggaagcgataactatggatccttatcaagggttacccgtatcgaagagagatatcgaccctcaatggagggttatagggctccatcaagacaggacgtatacggaccgcaacctcaggtacgtgttgggggaagctcggtggatctgcatcgttttcaccccgaaccctacggcctcgaggacgatcagaggtccatgggctatgacgatctcgactatggaatgatgagcgactatggaaccgccagaaggaccgggactccttctgatccgagacgcaggctgcggtcgtatgaggatatgattggagaagaggtaccctccgatcaatactattgggctcctttagctcagcacgaacgcggttctcttgcctctctcgatagcttacgtaagggcggtccacctcctcctaattggcggcaacctgaactcccagaagtgatcgctatgcttgggtttaggctcgacgctgtgaaaagtaatgcggctgcctacctacagcacctgtgctaccgcaacgataaagtgaaaaccgacgtacggaagctcaagggtatccctgtgttagttgggctgctggatcaccctaaaaaagaggtgcacttgggagcttgtggcgctctgaagaatatatccttcggtcgcgaccaggataataagatcgccatcaagaactgtgatggtgtgcctgcgttggtcagactgcttaggaaagcgagagacatggacctgactgaggttattaccggaactctgtggaatctttcttcgcacgacagcatcaagatggagatcgtcgaccatgccctgcacgcgttgacggacgaagtcatcataccacacagcggctgggagagagaacctaatgaggactgcaagccacgccacatcgagtgggagagcgtgttgaccaacacggctggatgtcttcgaaacgtctcaagtgaacggtcggaggcccgacggaaactccgcgagtgcgacggcctggtggacgcactaatatttattgttcaagcagaaatcggccagaaagattctgattctaagttggtggagaattgtgtgtgtctactgaggaatctatcatatcaggtacacagggagattcctcaggctgagcggtatcaggaagcagctccaaatgtggcaaataacaccggaccgcacgctgcctcatgcttcggggcaaagaagggtaaggggaaaaaacccatagaagaccccgctaatgacactgtcgactttccaaaacggacttcccccgctaggggctatgagctgctttttcaacctgaagtcgtgaggatttacatctcccttctcaaagagtcgaaaacaccggctattctggaggccagtgcaggcgctatacagaacctgtgcgcgggacgctggacctacggcaggtacatccggagcgccctgagacaggaaaaagcactgagtgcaatcgccgatctgttaaccaatgagcacgagagggtcgtcaaagctgccagtggcgctctgcgcaacctggcagtcgacgcgagaaacaaagagctgatcgggaagcatgctattcctaacttggtgaaaaacctgcccggaggccagcagaattccagctggaactttagtgaggacacagtaatttccattctgaataccatcaatgaagtgatcgctgaaaatcttgaggccgcaaagaaactgcgtgaaacacagggtattgagaagctggtccttattaacaaatccggaaacaggagtgagaaggaggtacgcgcagcagcgttggtcctccagacaatctggggttataaggaactccgtaagccactcgaaaaggaggggtggaaaaagagcgacttccaagtcaatcttaacaatgctagccgatcgcagtctagtcactcgtatgatgactccaccctgcccctaattgatcggaatcagaagagtgataaaaagccggaccgggaggagatccagatgtccaacatgggctccaacactaagagcctggataataattacagtacccccaacgagcggggtgaccataacaggacactcgatcgttccggtgacttgggcgacatggagcctctcaagggcacaacgcccctgatgcagaaaatttag

SEQ ID NO: 38073 - DNA, 2640 bp, Artificial Sequence
  derived and/or modified sequence
atggcaaacggaactctgacaaggcggcaccaaaatggcaggttcgtgggcgatgccgatctcgagcggcagaaattctctgacctgaagctgaacgggcctcaagatcacagccacttgctgtatagtaccattccacgcatgcaggagcccggacagattgtcgagacatatacggaggaggacccagagggagcaatgtcagtggtttcagtagaaacctctgatgatggcactacaagacgaaccgagacaactgtcaaaaaggtagttaagaccgtcacaacgcgaacagttcagcctgtcgcaatgggcccagacggtctgccagtagatgcgtcctccgtgagcaataattatatacaaacattaggaagggacttccgcaagaatggcaacggaggacctgggccatacgtgggacaagccggaaccgccacactgcctaggaacttccactatccgcctgacggctattctcgccactatgaagacggttacccaggtggaagtgataattatggcagtctgtccagggttacaagaatcgaagagcggtataggccttctatggaagggtacagagccccatcacgccaagatgtgtatggccctcagccccaggtgagggtgggcggaagcagtgtagacctgcatagatttcaccccgagccctacggtctcgaggacgaccagaggtccatgggctacgacgaccttgattatgggatgatgagcgattacggaactgcaagacggacaggaacccctagcgatccgaggagacgcctccgcagttatgaggatatgatcggggaggaggttcctagcgaccagtattactgggctccgctggcacagcatgagcgcggaagtctggccagtctcgacagcctgcggaaagggggaccaccacctcctaactggaggcaacccgaacttccagaggtcattgccatgttgggcttcagattggacgcagtgaagtctaacgccgctgcttacctgcaacacctctgttaccggaatgacaaggtgaagacagatgtgcgcaagctgaagggtatccctgttttggtggggttgctcgatcatccaaaaaaagaggttcacctaggcgcatgcggtgctttgaagaatatttcttttggaagggatcaggataacaagatcgcgatcaaaaactgcgatggggtgcctgcactggtacgccttttgagaaaggctagggacatggatcttacagaggtgattacagggaccctttggaacctttcttcccacgactctataaagatggagatcgtggaccatgcactgcacgccttgactgacgaggtgattattccacattcaggatgggaacgagagccgaatgaggattgcaagcccaggcatatcgagtgggagtcagtgttaacaaatacagctgggtgtctcagaaacgtcagctctgaacggagcgaggcacggaggaagctcagggaatgcgatggcctcgtggacgctctcattttcattgtacaggcggaaattgggcagaaagactccgatagcaagctggtcgaaaattgcgtgtgcttgctgcggaacctgtcttatcaggtgcatcgtgagatcccacaagctgaacggtaccaggaggctgctcccaatgtggcgaacaataccggcccacacgcagcttcctgcttcggagcgaaaaaaggcaaagggaagaagccaatagaagaccctgccaatgatacagtggattttccaaagaggactagcccagcgaggggctatgagctgttgtttcagcctgaggtcgtgagaatttacatcagtctgctgaaagaatctaagacccctgccatactggaggcctctgccggagccatccagaacctctgcgcaggaagatggacctacggccgttacatccgcagcgccttaagacaggagaaggctctgagtgccatcgcagatctcttaacaaatgaacatgaaagggttgtcaaggctgcatccggcgctctgaggaacctggccgtagacgcccgaaacaaggaacttatcggaaagcacgccattccaaatcttgtaaagaacttgccagggggtcagcagaatagcagttggaacttctcggaggacacggtgatcagcattctgaacacaatcaacgaagtgattgccgaaaacctagaggctgctaaaaagctcagagaaacacaggggattgaaaaactggtcctgataaacaagtcaggcaatcggtccgagaaagaggtcagagccgctgcgttggtgctgcaaacaatctgggggtacaaagaactgcgaaaaccacttgagaaagaggggtggaaaaaaagcgactttcaagtgaacctcaacaatgcctcaagaagccagtctagccactcttacgacgattccacactacccttaatagacagaaatcaaaagagtgataagaaacccgatagggaggaaattcagatgagcaatatgggcagcaacactaagtccttagataacaactattcgactcccaacgagcggggtgaccacaataggactctggataggagcggagatctgggcgacatggagcccttgaagggcactacacctctcatgcaaaaaatttag

SEQ ID NO: 38074 - DNA, 6135 bp, Artificial Sequence
  derived and/or modified sequence
ctgccagatcagtttgtcaccacccaggctcccttgcctttggctgggtgcaacttccattttaggtgttggatctgagggggaaaaaaaagagagagggagagagagagaaagaagagcaggaaagatcccgaaaggaggaagaggtggcgaaaaatcaactgccctgctggatttgtctttctcagcaccttggcgaagccttgggtttctttcttaaaggactgatttttagaactccacatttgagctctctccttcctgcttcctccttgctgtggtggctgggatgcttcttccatgattttttgaatctagactgggctgttctctgtgttaaaccaatcagttgcgaccttctcttaacagtgtgaagtgagggggtctctctccctccttctccttcctctgtgattcaccttcctttttaccctgccctgcggcggctccgccccttaccttcatggacgactcagaggtggagtcgaccgccagcatcttggcctctgtgaaggaacaagaggcccagtttgagaagctgacccgggcgctggaggaggaacggcgccacgtctcggcgcagctggaacgcgtccgggtctcaccacaagatgccaacccactcatggccaacggcacactcacccgccggcatcagaacggccggtttgtgggcgatgctgaccttgaaagacagaaattttcagatttgaaactcaacggaccccaggatcacagtcaccttctatatagcaccatccccaggatgcaggagccggggcagattgtggagacctacacggaggaggatcctgagggagccatgtctgtagtctctgtggagacctcagatgatgggaccactcggcgcacagagaccacggtcaagaaagtagtgaagactgtgacaacacggacagtacagccagtcgctatgggaccagacgggttgcctgtggatgcttcatcagtttctaacaactatatccagactttgggtcgtgatttccgcaagaatggcaatgggggacctggtccctatgtggggcaagctggcactgctacccttcctaggaacttccactaccctcctgatggttatagtcgccactatgaagatggttatccaggtggcagtgataactatggcagtctgtcccgggtgacccgcattgaggagcggtataggcccagcatggaaggctaccgggcacctagtagacaggatgtgtatgggccccaaccccaggttcgggtaggtgggagcagcgtggatctgcatcgctttcatccagagccttatgggctagaggatgaccagcgtagtatgggctatgatgacctggattatggtatgatgtctgattatggcactgcccgtcggactgggacaccctctgaccctcgtcggcgcctcaggagctatgaagacatgattggtgaggaggtgccatcggatcaatactactgggctcctttggcccagcatgagcgaggaagtttagcaagcttggatagcctgcgcaaaggagggcctccacctcctaattggagacagccagagctgccagaggtgatcgccatgcttggattccgcttggatgctgtcaagtccaatgcagctgcatacctgcaacacttatgctaccgcaatgacaaggtgaagactgacgtgcggaagctcaagggcatcccagtactggtgggattgttagaccatcccaaaaaggaagtgcaccttggagcctgtggagctctcaagaatatctcttttggacgtgaccaggataacaagattgccataaaaaactgtgatggtgtgcctgcccttgtgcgattgcttcgaaaggctcgtgatatggaccttactgaagttattaccggaaccctgtggaatctttcatcccatgactcaatcaaaatggagattgtggaccatgcactgcatgccttgacagatgaagtgatcattcctcattctggttgggagcgggaacctaatgaagactgtaagccacgccacattgagtgggaatcggtgctcaccaacacagctggctgccttaggaatgtaagctcagagaggagtgaagctcgccggaaacttcgggaatgtgatggtttagttgatgccctcattttcattgttcaggctgagattgggcagaaggattcagacagcaagcttgtagagaactgtgtttgccttcttcggaacttatcatatcaagttcaccgggagatcccacaggcagagcgttaccaagaggcagctcccaatgttgccaacaatactgggccacatgctgccagttgctttggggccaagaagggcaaagggaaaaaacctatagaggatccagcaaacgatacagtggatttccctaaaagaacgagtccagctcgaggctatgagctcttatttcagccagaggtggttcggatatacatctcacttcttaaggagagcaagactcctgccatcctagaagcctcagctggagctatccagaacttgtgtgctgggcgctggacgtatggtcgatacatccgctctgctctgcgtcaagagaaggctctttctgccatagctgacctcctgactaatgaacatgaacgggtggtgaaagctgcatctggagcactgagaaacctggctgtggatgctcgcaacaaagaattaattggtaaacatgctattcctaacttggtaaagaatctgccaggaggacagcagaactcctcttggaatttctctgaggacactgtcatctctattttgaacactatcaacgaggttatcgctgagaacttggaggctgccaaaaagcttcgagagacacagggtattgagaagctggtgttgatcaacaaatcagggaaccgctcagaaaaagaagttcgagcagcagcacttgtattacagacaatctggggatataaggaactgcggaagccactggaaaaagaaggatggaagaaatcagactttcaggtgaatctaaacaatgcttcccgaagccagagcagtcattcatatgatgatagtactctccctctcattgaccggaaccaaaaatcagataagaaacctgatcgggaagaaattcagatgagcaatatgggatcaaacacaaaatcactagataacaactattccacaccaaatgagagaggagaccacaatagaacactggatcgatcgggggatctaggcgacatggagccattgaagggaacaacacccttgatgcagaagatttagcaccactatctccgttccatctgggcttatatgtacttttattttttggtggtgaaattgactgatgattttcctttttcttcgctggactattgtgccaactgccaggctgcctcctgcccttacagccctaagtggctgccttctttccatcaactcccaacttcttcctgtgaagtttaattgtctcaacgcctccccctcccccattccctccatttttctcccaagaaacctgactcaattatttgcatattttgagaaactgctgcagattagttctttttgccagttttccctggaactcctggccttttgtggaggggagggatggagagaataggaatcttcactagaagccgtgggaagaattggaagttacatgctgtatatgcaatgtccagcagtctgataaactgacgattcttaatcaagatttttttcctgatggggaagggacttttattttcttttagagaggggaaagtgtgagctcttcccttattcctaatggctatttttgaagcaaagaaggccagcaacattggcacatgccacctggcaaaggacccttgagtaagtgaaggtctcctaaaactgggattaagaaaccttgctctcctcatctccaaggcagggaccatcaagaacctacagactccatctcttctgcaagcctcatgccaaccctgggctattgctgctgccccttaaacacaggctgtccttaacccacctctcctgccctgtgatatgtctgctgagttggcctggccatttccaagaggctgtagaaaggggagaatgtcaaggaagacttttggtagagaaggagcagaaagatgtgtttttgggaagaagaagacctctaggaggagctagtaggaatgtacatgaagcaattagtctgaaactggcttccccactcccccgtttctccttttcctatccttataggcctgtcccttgcctctgccctggattggttggcaaactaaaggacttgatgtacataactcctgtcccttttcccttacaaggtggggattgcccctggctttgcctcttctttgtgcctttggcctggggtgcatctcctcccgcccttccatgtgcctttctttgcctctgcagtctcatttctcataattttgcaaattatattttgttgctttcttacctactattggccctaaatagcagaaagaagagaagtgaccgagagaacctcagattcttcattgaggattggtatagccatgatttcagtcatagcaagcttttgctcaacagcatatgggtgggattttgcaaaaatcctattctgatgaatctcaaagtaaggctggtaagagaagtgagtggtgtgactcttactccttaggtgcccagaatttaccatcatctctgaaggagttacagggaagtggtctccccaattctcccctccctccagtattgccccctctcactttagcatatattaattagcaggttgggctagagaaatcagctgctatgcgggttgattattattattatttctaatccttttccttatttgccttctactccccttaatctaatctaaaagctctgttccatgcaactggagttccttatccctctcttccccttcccttatatattgaggctatggggtaggagaaaagtgcacaacccaccaccccctttactcgtgcattaaaatttcttatttacccttttcccccttcccatttcttcccactttcatctaccttttctggcaaaaaggagccttttgctctctgtgaccctaagagcacactgcacagggaaaattgccccatccagacctggctccactcttgatctctcttgtcctcttctgctcttttcctggtgctcttttttctcggtggggtgtgggtaatagaacagccgtgggcttttggggacctttaacttttttttctctcttttgtttataaaaaacactaaacattcaattccagagaaccaaaaatcccaccttcccaccgaacactactaaggggcttgtgttctgctccataccttttctcttttctttctgtcttgttaatgcttttaaaaacaaatgagttttttatataaataaagtttttaaagtgtgtatgtggggggtctgtgtcatttcttcacttcaagctgttatttcttccctgctttgcatctttgttacttccttatgtatcagtgtcctttccagagcaaccagaaggaggttataccaggatttattttgagctcagccccaactctttatcaagcaacattcttgttaactatatgtgaaacattttttcttctgaagattcttaaaaattgaatgtggctgaagttgaacatgggagcttattgctaatttagagataggaaactgaagcataaagaattaatgacttactttaattactggaattcttctgcaacatttgacaaaactaaccttgaataaggcccactgtaatacgtagctctcttaaatataacacttaggactagaagattagaaactaccaatcccaactacgtaataggaaaatgtaggatcaaaaggcccatgtatataagtactgaccactgggccataatgttgcttctcaggctatatgcagtcctttagtcagaagtcaataggcctatttattaatattttacagaccatattacctggattaccagggactatctttgctgcagagatcaagggttaagatctatgggaagatacttatttttctgaggtccttatgtcctgtcatataattaaagactcaagagaatttatgtgaaatgctttctgtatgcccaaatctttagattaaaattatatagctgctcct

SEQ ID NO: 38075 - DNA, 6244 bp, Artificial Sequence
  derived and/or modified sequence
ggctgacatcacttaggaaagcgaagggggtagggctgccagatcagtttgtcaccacccaggctcccttgcctttggctgggtgcaacttccattttaggtgttggatctgagggggaaaaaaaagagagagggagagagagagaaagaagagcaggaaagatcccgaaaggaggaagaggtggcgaaaaatcaactgccctgctggatttgtctttctcagcaccttggcgaagccttgggtttctttcttaaaggactgatttttagaactccacatttgaggtgtgtggcttttgaagaaaatgtatgtactgacgggaaaaggaggataagcaagtcgaatttttgtcttacgctctctccttcctgcttcctccttgctgtggtggctgggatgcttcttccatgattttttgaatctagactgggctgttctctgtgttaaaccaatcagttgcgaccttctcttaacagtgtgaagtgagggggtctctctccctccttctccttcctctgtgattcaccttcctttttaccctgccctgcggcggctccgccccttaccttcatggacgactcagaggtggagtcgaccgccagcatcttggcctctgtgaaggaacaagaggcccagtttgagaagctgacccgggcgctggaggaggaacggcgccacgtctcggcgcagctggaacgcgtccgggtctcaccacaagatgccaacccactcatggccaacggcacactcacccgccggcatcagaacggccggtttgtgggcgatgctgaccttgaaagacagaaattttcagatttgaaactcaacggaccccaggatcacagtcaccttctatatagcaccatccccaggatgcaggagccggggcagattgtggagacctacacggaggaggatcctgagggagccatgtctgtagtctctgtggagacctcagatgatgggaccactcggcgcacagagaccacggtcaagaaagtagtgaagactgtgacaacacggacagtacagccagtcgctatgggaccagacgggttgcctgtggatgcttcatcagtttctaacaactatatccagactttgggtcgtgatttccgcaagaatggcaatgggggacctggtccctatgtggggcaagctggcactgctacccttcctaggaacttccactaccctcctgatggttatagtcgccactatgaagatggttatccaggtggcagtgataactatggcagtctgtcccgggtgacccgcattgaggagcggtataggcccagcatggaaggctaccgggcacctagtagacaggatgtgtatgggccccaaccccaggttcgggtaggtgggagcagcgtggatctgcatcgctttcatccagagccttatgggctagaggatgaccagcgtagtatgggctatgatgacctggattatggtatgatgtctgattatggcactgcccgtcggactgggacaccctctgaccctcgtcggcgcctcaggagctatgaagacatgattggtgaggaggtgccatcggatcaatactactgggctcctttggcccagcatgagcgaggaagtttagcaagcttggatagcctgcgcaaaggagggcctccacctcctaattggagacagccagagctgccagaggtgatcgccatgcttggattccgcttggatgctgtcaagtccaatgcagctgcatacctgcaacacttatgctaccgcaatgacaaggtgaagactgacgtgcggaagctcaagggcatcccagtactggtgggattgttagaccatcccaaaaaggaagtgcaccttggagcctgtggagctctcaagaatatctcttttggacgtgaccaggataacaagattgccataaaaaactgtgatggtgtgcctgcccttgtgcgattgcttcgaaaggctcgtgatatggaccttactgaagttattaccggaaccctgtggaatctttcatcccatgactcaatcaaaatggagattgtggaccatgcactgcatgccttgacagatgaagtgatcattcctcattctggttgggagcgggaacctaatgaagactgtaagccacgccacattgagtgggaatcggtgctcaccaacacagctggctgccttaggaatgtaagctcagagaggagtgaagctcgccggaaacttcgggaatgtgatggtttagttgatgccctcattttcattgttcaggctgagattgggcagaaggattcagacagcaagcttgtagagaactgtgtttgccttcttcggaacttatcatatcaagttcaccgggagatcccacaggcagagcgttaccaagaggcagctcccaatgttgccaacaatactgggccacatgctgccagttgctttggggccaagaagggcaaagggaaaaaacctatagaggatccagcaaacgatacagtggatttccctaaaagaacgagtccagctcgaggctatgagctcttatttcagccagaggtggttcggatatacatctcacttcttaaggagagcaagactcctgccatcctagaagcctcagctggagctatccagaacttgtgtgctgggcgctggacgtatggtcgatacatccgctctgctctgcgtcaagagaaggctctttctgccatagctgacctcctgactaatgaacatgaacgggtggtgaaagctgcatctggagcactgagaaacctggctgtggatgctcgcaacaaagaattaattggtaaacatgctattcctaacttggtaaagaatctgccaggaggacagcagaactcctcttggaatttctctgaggacactgtcatctctattttgaacactatcaacgaggttatcgctgagaacttggaggctgccaaaaagcttcgagagacacagggtattgagaagctggtgttgatcaacaaatcagggaaccgctcagaaaaagaagttcgagcagcagcacttgtattacagacaatctggggatataaggaactgcggaagccactggaaaaagaaggatggaagaaatcagactttcaggtgaatctaaacaatgcttcccgaagccagagcagtcattcatatgatgatagtactctccctctcattgaccggaaccaaaaatcagataagaaacctgatcgggaagaaattcagatgagcaatatgggatcaaacacaaaatcactagataacaactattccacaccaaatgagagaggagaccacaatagaacactggatcgatcgggggatctaggcgacatggagccattgaagggaacaacacccttgatgcagaagatttagcaccactatctccgttccatctgggcttatatgtacttttattttttggtggtgaaattgactgatgattttcctttttcttcgctggactattgtgccaactgccaggctgcctcctgcccttacagccctaagtggctgccttctttccatcaactcccaacttcttcctgtgaagtttaattgtctcaacgcctccccctcccccattccctccatttttctcccaagaaacctgactcaattatttgcatattttgagaaactgctgcagattagttctttttgccagttttccctggaactcctggccttttgtggaggggagggatggagagaataggaatcttcactagaagccgtgggaagaattggaagttacatgctgtatatgcaatgtccagcagtctgataaactgacgattcttaatcaagatttttttcctgatggggaagggacttttattttcttttagagaggggaaagtgtgagctcttcccttattcctaatggctatttttgaagcaaagaaggccagcaacattggcacatgccacctggcaaaggacccttgagtaagtgaaggtctcctaaaactgggattaagaaaccttgctctcctcatctccaaggcagggaccatcaagaacctacagactccatctcttctgcaagcctcatgccaaccctgggctattgctgctgccccttaaacacaggctgtccttaacccacctctcctgccctgtgatatgtctgctgagttggcctggccatttccaagaggctgtagaaaggggagaatgtcaaggaagacttttggtagagaaggagcagaaagatgtgtttttgggaagaagaagacctctaggaggagctagtaggaatgtacatgaagcaattagtctgaaactggcttccccactcccccgtttctccttttcctatccttataggcctgtcccttgcctctgccctggattggttggcaaactaaaggacttgatgtacataactcctgtcccttttcccttacaaggtggggattgcccctggctttgcctcttctttgtgcctttggcctggggtgcatctcctcccgcccttccatgtgcctttctttgcctctgcagtctcatttctcataattttgcaaattatattttgttgctttcttacctactattggccctaaatagcagaaagaagagaagtgaccgagagaacctcagattcttcattgaggattggtatagccatgatttcagtcatagcaagcttttgctcaacagcatatgggtgggattttgcaaaaatcctattctgatgaatctcaaagtaaggctggtaagagaagtgagtggtgtgactcttactccttaggtgcccagaatttaccatcatctctgaaggagttacagggaagtggtctccccaattctcccctccctccagtattgccccctctcactttagcatatattaattagcaggttgggctagagaaatcagctgctatgcgggttgattattattattatttctaatccttttccttatttgccttctactccccttaatctaatctaaaagctctgttccatgcaactggagttccttatccctctcttccccttcccttatatattgaggctatggggtaggagaaaagtgcacaacccaccaccccctttactcgtgcattaaaatttcttatttacccttttcccccttcccatttcttcccactttcatctaccttttctggcaaaaaggagccttttgctctctgtgaccctaagagcacactgcacagggaaaattgccccatccagacctggctccactcttgatctctcttgtcctcttctgctcttttcctggtgctcttttttctcggtggggtgtgggtaatagaacagccgtgggcttttggggacctttaacttttttttctctcttttgtttataaaaaacactaaacattcaattccagagaaccaaaaatcccaccttcccaccgaacactactaaggggcttgtgttctgctccataccttttctcttttctttctgtcttgttaatgcttttaaaaacaaatgagttttttatataaataaagtttttaaagtgtgtatgtggggggtctgtgtcatttcttcacttcaagctgttatttcttccctgctttgcatctttgttacttccttatgtatcagtgtcctttccagagcaaccagaaggaggttataccaggatttattttgagctcagccccaactctttatcaagcaacattcttgttaactatatgtgaaacattttttcttctgaagattcttaaaaattgaatgtggctgaagttgaacatgggagcttattgctaatttagagataggaaactgaagcataaagaattaatgacttactttaattactggaattcttctgcaacatttgacaaaactaaccttgaataaggcccactgtaatacgtagctctcttaaatataacacttaggactagaagattagaaactaccaatcccaactacgtaataggaaaatgtaggatcaaaaggcccatgtatataagtactgaccactgggccataatgttgcttctcaggctatatgcagtcctttagtcagaagtcaataggcctatttattaatattttacagaccatattacctggattaccagggactatctttgctgcagagatcaagggttaagatctatgggaagatacttatttttctgaggtccttatgtcctgtcatataattaaagactcaagagaatttatgtgaaatgctttctgtatgcccaaatctttagattaaaattatatagctgctcctg

SEQ ID NO: 38076 - DNA, 5800 bp, Artificial Sequence
  derived and/or modified sequence
ctgccagatcagtttgtcaccacccaggctcccttgcctttggctgggtgcaacttccattttaggtgttggatctgagggggaaaaaaaagagagagggagagagagagaaagaagagcaggaaagatcccgaaaggaggaagaggtggcgaaaaatcaactgccctgctggatttgtctttctcagcaccttggcgaagccttgggtttctttcttaaaggactgatttttagaactccacatttgaggtgtgtggcttttgaagaaaatgtatgtactgacgggaaaaggaggataagcaagtcgaatttttgtcttacgaacggccggtttgtgggcgatgctgaccttgaaagacagaaattttcagatttgaaactcaacggaccccaggatcacagtcaccttctatatagcaccatccccaggatgcaggagccggggcagattgtggagacctacacggaggaggatcctgagggagccatgtctgtagtctctgtggagacctcagatgatgggaccactcggcgcacagagaccacggtcaagaaagtagtgaagactgtgacaacacggacagtacagccagtcgctatgggaccagacgggttgcctgtggatgcttcatcagtttctaacaactatatccagactttgggtcgtgatttccgcaagaatggcaatgggggacctggtccctatgtggggcaagctggcactgctacccttcctaggaacttccactaccctcctgatggttatagtcgccactatgaagatggttatccaggtggcagtgataactatggcagtctgtcccgggtgacccgcattgaggagcggtataggcccagcatggaaggctaccgggcacctagtagacaggatgtgtatgggccccaaccccaggttcgggtaggtgggagcagcgtggatctgcatcgctttcatccagagccttatgggctagaggatgaccagcgtagtatgggctatgatgacctggattatggtatgatgtctgattatggcactgcccgtcggactgggacaccctctgaccctcgtcggcgcctcaggagctatgaagacatgattggtgaggaggtgccatcggatcaatactactgggctcctttggcccagcatgagcgaggaagtttagcaagcttggatagcctgcgcaaaggagggcctccacctcctaattggagacagccagagctgccagaggtgatcgccatgcttggattccgcttggatgctgtcaagtccaatgcagctgcatacctgcaacacttatgctaccgcaatgacaaggtgaagactgacgtgcggaagctcaagggcatcccagtactggtgggattgttagaccatcccaaaaaggaagtgcaccttggagcctgtggagctctcaagaatatctcttttggacgtgaccaggataacaagattgccataaaaaactgtgatggtgtgcctgcccttgtgcgattgcttcgaaaggctcgtgatatggaccttactgaagttattaccggaaccctgtggaatctttcatcccatgactcaatcaaaatggagattgtggaccatgcactgcatgccttgacagatgaagtgatcattcctcattctggttgggagcgggaacctaatgaagactgtaagccacgccacattgagtgggaatcggtgctcaccaacacagctggctgccttaggaatgtaagctcagagaggagtgaagctcgccggaaacttcgggaatgtgatggtttagttgatgccctcattttcattgttcaggctgagattgggcagaaggattcagacagcaagcttgtagagaactgtgtttgccttcttcggaacttatcatatcaagttcaccgggagatcccacaggcagagcgttaccaagaggcagctcccaatgttgccaacaatactgggccacatgctgccagttgctttggggccaagaagggcaaagggaaaaaacctatagaggatccagcaaacgatacagtggatttccctaaaagaacgagtccagctcgaggctatgagctcttatttcagccagaggtggttcggatatacatctcacttcttaaggagagcaagactcctgccatcctagaagcctcagctggagctatccagaacttgtgtgctgggcgctggacgtatggtcgatacatccgctctgctctgcgtcaagagaaggctctttctgccatagctgacctcctgactaatgaacatgaacgggtggtgaaagctgcatctggagcactgagaaacctggctgtggatgctcgcaacaaagaattaattggtaaacatgctattcctaacttggtaaagaatctgccaggaggacagcagaactcctcttggaatttctctgaggacactgtcatctctattttgaacactatcaacgaggttatcgctgagaacttggaggctgccaaaaagcttcgagagacacagggtattgagaagctggtgttgatcaacaaatcagggaaccgctcagaaaaagaagttcgagcagcagcacttgtattacagacaatctggggatataaggaactgcggaagccactggaaaaagaaggatggaagaaatcagactttcaggtgaatctaaacaatgcttcccgaagccagagcagtcattcatatgatgatagtactctccctctcattgaccggaaccaaaaatcagataagaaacctgatcgggaagaaattcagatgagcaatatgggatcaaacacaaaatcactagataacaactattccacaccaaatgagagaggagaccacaatagaacactggatcgatcgggggatctaggcgacatggagccattgaagggaacaacacccttgatgcagaagatttagcaccactatctccgttccatctgggcttatatgtacttttattttttggtggtgaaattgactgatgattttcctttttcttcgctggactattgtgccaactgccaggctgcctcctgcccttacagccctaagtggctgccttctttccatcaactcccaacttcttcctgtgaagtttaattgtctcaacgcctccccctcccccattccctccatttttctcccaagaaacctgactcaattatttgcatattttgagaaactgctgcagattagttctttttgccagttttccctggaactcctggccttttgtggaggggagggatggagagaataggaatcttcactagaagccgtgggaagaattggaagttacatgctgtatatgcaatgtccagcagtctgataaactgacgattcttaatcaagatttttttcctgatggggaagggacttttattttcttttagagaggggaaagtgtgagctcttcccttattcctaatggctatttttgaagcaaagaaggccagcaacattggcacatgccacctggcaaaggacccttgagtaagtgaaggtctcctaaaactgggattaagaaaccttgctctcctcatctccaaggcagggaccatcaagaacctacagactccatctcttctgcaagcctcatgccaaccctgggctattgctgctgccccttaaacacaggctgtccttaacccacctctcctgccctgtgatatgtctgctgagttggcctggccatttccaagaggctgtagaaaggggagaatgtcaaggaagacttttggtagagaaggagcagaaagatgtgtttttgggaagaagaagacctctaggaggagctagtaggaatgtacatgaagcaattagtctgaaactggcttccccactcccccgtttctccttttcctatccttataggcctgtcccttgcctctgccctggattggttggcaaactaaaggacttgatgtacataactcctgtcccttttcccttacaaggtggggattgcccctggctttgcctcttctttgtgcctttggcctggggtgcatctcctcccgcccttccatgtgcctttctttgcctctgcagtctcatttctcataattttgcaaattatattttgttgctttcttacctactattggccctaaatagcagaaagaagagaagtgaccgagagaacctcagattcttcattgaggattggtatagccatgatttcagtcatagcaagcttttgctcaacagcatatgggtgggattttgcaaaaatcctattctgatgaatctcaaagtaaggctggtaagagaagtgagtggtgtgactcttactccttaggtgcccagaatttaccatcatctctgaaggagttacagggaagtggtctccccaattctcccctccctccagtattgccccctctcactttagcatatattaattagcaggttgggctagagaaatcagctgctatgcgggttgattattattattatttctaatccttttccttatttgccttctactccccttaatctaatctaaaagctctgttccatgcaactggagttccttatccctctcttccccttcccttatatattgaggctatggggtaggagaaaagtgcacaacccaccaccccctttactcgtgcattaaaatttcttatttacccttttcccccttcccatttcttcccactttcatctaccttttctggcaaaaaggagccttttgctctctgtgaccctaagagcacactgcacagggaaaattgccccatccagacctggctccactcttgatctctcttgtcctcttctgctcttttcctggtgctcttttttctcggtggggtgtgggtaatagaacagccgtgggcttttggggacctttaacttttttttctctcttttgtttataaaaaacactaaacattcaattccagagaaccaaaaatcccaccttcccaccgaacactactaaggggcttgtgttctgctccataccttttctcttttctttctgtcttgttaatgcttttaaaaacaaatgagttttttatataaataaagtttttaaagtgtgtatgtggggggtctgtgtcatttcttcacttcaagctgttatttcttccctgctttgcatctttgttacttccttatgtatcagtgtcctttccagagcaaccagaaggaggttataccaggatttattttgagctcagccccaactctttatcaagcaacattcttgttaactatatgtgaaacattttttcttctgaagattcttaaaaattgaatgtggctgaagttgaacatgggagcttattgctaatttagagataggaaactgaagcataaagaattaatgacttactttaattactggaattcttctgcaacatttgacaaaactaaccttgaataaggcccactgtaatacgtagctctcttaaatataacacttaggactagaagattagaaactaccaatcccaactacgtaataggaaaatgtaggatcaaaaggcccatgtatataagtactgaccactgggccataatgttgcttctcaggctatatgcagtcctttagtcagaagtcaataggcctatttattaatattttacagaccatattacctggattaccagggactatctttgctgcagagatcaagggttaagatctatgggaagatacttatttttctgaggtccttatgtcctgtcatataattaaagactcaagagaatttatgtgaaatgctttctgtatgcccaaatctttagattaaaattatatagctgctcct

SEQ ID NO: 38077 - DNA, 6016 bp, Artificial Sequence
  derived and/or modified sequence
ctgccagatcagtttgtcaccacccaggctcccttgcctttggctgggtgcaacttccattttaggtgttggatctgagggggaaaaaaaagagagagggagagagagagaaagaagagcaggaaagatcccgaaaggaggaagaggtggcgaaaaatcaactgccctgctggatttgtctttctcagcaccttggcgaagccttgggtttctttcttaaaggactgatttttagaactccacatttgagtgtgaagtgagggggtctctctccctccttctccttcctctgtgattcaccttcctttttaccctgccctgcggcggctccgccccttaccttcatggacgactcagaggtggagtcgaccgccagcatcttggcctctgtgaaggaacaagaggcccagtttgagaagctgacccgggcgctggaggaggaacggcgccacgtctcggcgcagctggaacgcgtccgggtctcaccacaagatgccaacccactcatggccaacggcacactcacccgccggcatcagaacggccggtttgtgggcgatgctgaccttgaaagacagaaattttcagatttgaaactcaacggaccccaggatcacagtcaccttctatatagcaccatccccaggatgcaggagccggggcagattgtggagacctacacggaggaggatcctgagggagccatgtctgtagtctctgtggagacctcagatgatgggaccactcggcgcacagagaccacggtcaagaaagtagtgaagactgtgacaacacggacagtacagccagtcgctatgggaccagacgggttgcctgtggatgcttcatcagtttctaacaactatatccagactttgggtcgtgatttccgcaagaatggcaatgggggacctggtccctatgtggggcaagctggcactgctacccttcctaggaacttccactaccctcctgatggttatagtcgccactatgaagatggttatccaggtggcagtgataactatggcagtctgtcccgggtgacccgcattgaggagcggtataggcccagcatggaaggctaccgggcacctagtagacaggatgtgtatgggccccaaccccaggttcgggtaggtgggagcagcgtggatctgcatcgctttcatccagagccttatgggctagaggatgaccagcgtagtatgggctatgatgacctggattatggtatgatgtctgattatggcactgcccgtcggactgggacaccctctgaccctcgtcggcgcctcaggagctatgaagacatgattggtgaggaggtgccatcggatcaatactactgggctcctttggcccagcatgagcgaggaagtttagcaagcttggatagcctgcgcaaaggagggcctccacctcctaattggagacagccagagctgccagaggtgatcgccatgcttggattccgcttggatgctgtcaagtccaatgcagctgcatacctgcaacacttatgctaccgcaatgacaaggtgaagactgacgtgcggaagctcaagggcatcccagtactggtgggattgttagaccatcccaaaaaggaagtgcaccttggagcctgtggagctctcaagaatatctcttttggacgtgaccaggataacaagattgccataaaaaactgtgatggtgtgcctgcccttgtgcgattgcttcgaaaggctcgtgatatggaccttactgaagttattaccggaaccctgtggaatctttcatcccatgactcaatcaaaatggagattgtggaccatgcactgcatgccttgacagatgaagtgatcattcctcattctggttgggagcgggaacctaatgaagactgtaagccacgccacattgagtgggaatcggtgctcaccaacacagctggctgccttaggaatgtaagctcagagaggagtgaagctcgccggaaacttcgggaatgtgatggtttagttgatgccctcattttcattgttcaggctgagattgggcagaaggattcagacagcaagcttgtagagaactgtgtttgccttcttcggaacttatcatatcaagttcaccgggagatcccacaggcagagcgttaccaagaggcagctcccaatgttgccaacaatactgggccacatgctgccagttgctttggggccaagaagggcaaagggaaaaaacctatagaggatccagcaaacgatacagtggatttccctaaaagaacgagtccagctcgaggctatgagctcttatttcagccagaggtggttcggatatacatctcacttcttaaggagagcaagactcctgccatcctagaagcctcagctggagctatccagaacttgtgtgctgggcgctggacgtatggtcgatacatccgctctgctctgcgtcaagagaaggctctttctgccatagctgacctcctgactaatgaacatgaacgggtggtgaaagctgcatctggagcactgagaaacctggctgtggatgctcgcaacaaagaattaattggtaaacatgctattcctaacttggtaaagaatctgccaggaggacagcagaactcctcttggaatttctctgaggacactgtcatctctattttgaacactatcaacgaggttatcgctgagaacttggaggctgccaaaaagcttcgagagacacagggtattgagaagctggtgttgatcaacaaatcagggaaccgctcagaaaaagaagttcgagcagcagcacttgtattacagacaatctggggatataaggaactgcggaagccactggaaaaagaaggatggaagaaatcagactttcaggtgaatctaaacaatgcttcccgaagccagagcagtcattcatatgatgatagtactctccctctcattgaccggaaccaaaaatcagataagaaacctgatcgggaagaaattcagatgagcaatatgggatcaaacacaaaatcactagataacaactattccacaccaaatgagagaggagaccacaatagaacactggatcgatcgggggatctaggcgacatggagccattgaagggaacaacacccttgatgcagaagatttagcaccactatctccgttccatctgggcttatatgtacttttattttttggtggtgaaattgactgatgattttcctttttcttcgctggactattgtgccaactgccaggctgcctcctgcccttacagccctaagtggctgccttctttccatcaactcccaacttcttcctgtgaagtttaattgtctcaacgcctccccctcccccattccctccatttttctcccaagaaacctgactcaattatttgcatattttgagaaactgctgcagattagttctttttgccagttttccctggaactcctggccttttgtggaggggagggatggagagaataggaatcttcactagaagccgtgggaagaattggaagttacatgctgtatatgcaatgtccagcagtctgataaactgacgattcttaatcaagatttttttcctgatggggaagggacttttattttcttttagagaggggaaagtgtgagctcttcccttattcctaatggctatttttgaagcaaagaaggccagcaacattggcacatgccacctggcaaaggacccttgagtaagtgaaggtctcctaaaactgggattaagaaaccttgctctcctcatctccaaggcagggaccatcaagaacctacagactccatctcttctgcaagcctcatgccaaccctgggctattgctgctgccccttaaacacaggctgtccttaacccacctctcctgccctgtgatatgtctgctgagttggcctggccatttccaagaggctgtagaaaggggagaatgtcaaggaagacttttggtagagaaggagcagaaagatgtgtttttgggaagaagaagacctctaggaggagctagtaggaatgtacatgaagcaattagtctgaaactggcttccccactcccccgtttctccttttcctatccttataggcctgtcccttgcctctgccctggattggttggcaaactaaaggacttgatgtacataactcctgtcccttttcccttacaaggtggggattgcccctggctttgcctcttctttgtgcctttggcctggggtgcatctcctcccgcccttccatgtgcctttctttgcctctgcagtctcatttctcataattttgcaaattatattttgttgctttcttacctactattggccctaaatagcagaaagaagagaagtgaccgagagaacctcagattcttcattgaggattggtatagccatgatttcagtcatagcaagcttttgctcaacagcatatgggtgggattttgcaaaaatcctattctgatgaatctcaaagtaaggctggtaagagaagtgagtggtgtgactcttactccttaggtgcccagaatttaccatcatctctgaaggagttacagggaagtggtctccccaattctcccctccctccagtattgccccctctcactttagcatatattaattagcaggttgggctagagaaatcagctgctatgcgggttgattattattattatttctaatccttttccttatttgccttctactccccttaatctaatctaaaagctctgttccatgcaactggagttccttatccctctcttccccttcccttatatattgaggctatggggtaggagaaaagtgcacaacccaccaccccctttactcgtgcattaaaatttcttatttacccttttcccccttcccatttcttcccactttcatctaccttttctggcaaaaaggagccttttgctctctgtgaccctaagagcacactgcacagggaaaattgccccatccagacctggctccactcttgatctctcttgtcctcttctgctcttttcctggtgctcttttttctcggtggggtgtgggtaatagaacagccgtgggcttttggggacctttaacttttttttctctcttttgtttataaaaaacactaaacattcaattccagagaaccaaaaatcccaccttcccaccgaacactactaaggggcttgtgttctgctccataccttttctcttttctttctgtcttgttaatgcttttaaaaacaaatgagttttttatataaataaagtttttaaagtgtgtatgtggggggtctgtgtcatttcttcacttcaagctgttatttcttccctgctttgcatctttgttacttccttatgtatcagtgtcctttccagagcaaccagaaggaggttataccaggatttattttgagctcagccccaactctttatcaagcaacattcttgttaactatatgtgaaacattttttcttctgaagattcttaaaaattgaatgtggctgaagttgaacatgggagcttattgctaatttagagataggaaactgaagcataaagaattaatgacttactttaattactggaattcttctgcaacatttgacaaaactaaccttgaataaggcccactgtaatacgtagctctcttaaatataacacttaggactagaagattagaaactaccaatcccaactacgtaataggaaaatgtaggatcaaaaggcccatgtatataagtactgaccactgggccataatgttgcttctcaggctatatgcagtcctttagtcagaagtcaataggcctatttattaatattttacagaccatattacctggattaccagggactatctttgctgcagagatcaagggttaagatctatgggaagatacttatttttctgaggtccttatgtcctgtcatataattaaagactcaagagaatttatgtgaaatgctttctgtatgcccaaatctttagattaaaattatatagctgctcct

SEQ ID NO: 38078 - DNA, 6553 bp, Artificial Sequence
  derived and/or modified sequence
agaacaggaggagcgctttgggcgggaggctaagtctcgagggacttgagggctgagggaagatggctgggctgcaagaggcagggggatgggcccgtcagggaggaattcttgtgaaagccgtcgtctgcctcagcacttgatgaaaacacaccgaaaaagagggtagggatgctgtagtagagcaggcgccaaggcggttaagggtcatgtccgtcttccctttgaagaggcagtagatgcccttggctctgcctggagcgctccatgtttcgtgatggaagtctctggatggctctgctctctccttcctgcttcctccttgctgtggtggctgggatgcttcttccatgattttttgaatctagactgggctgttctctgtgttaaaccaatcagttgcgaccttctcttaacagtgtgaagtgagggggtctctctccctccttctccttcctctgtgattcaccttcctttttaccctgccctgcggcggctccgccccttaccttcatggacgactcagaggtggagtcgaccgccagcatcttggcctctgtgaaggaacaagaggcccagtttgagaagctgacccgggcgctggaggaggaacggcgccacgtctcggcgcagctggaacgcgtccgggtctcaccacaagatgccaacccactcatggccaacggcacactcacccgccggcatcagaacggccggtttgtgggcgatgctgaccttgaaagacagaaattttcagatttgaaactcaacggaccccaggatcacagtcaccttctatatagcaccatccccaggatgcaggagccggggcagattgtggagacctacacggaggaggatcctgagggagccatgtctgtagtctctgtggagacctcagatgatgggaccactcggcgcacagagaccacggtcaagaaagtagtgaagactgtgacaacacggacagtacagccagtcgctatgggaccagacgggttgcctgtggatgcttcatcagtttctaacaactatatccagactttgggtcgtgatttccgcaagaatggcaatgggggacctggtccctatgtggggcaagctggcactgctacccttcctaggaacttccactaccctcctgatggttatagtcgccactatgaagatggttatccaggtggcagtgataactatggcagtctgtcccgggtgacccgcattgaggagcggtataggcccagcatggaaggctaccgggcacctagtagacaggatgtgtatgggccccaaccccaggttcgggtaggtgggagcagcgtggatctgcatcgctttcatccagagccttatgggctagaggatgaccagcgtagtatgggctatgatgacctggattatggtatgatgtctgattatggcactgcccgtcggactgggacaccctctgaccctcgtcggcgcctcaggagctatgaagacatgattggtgaggaggtgccatcggatcaatactactgggctcctttggcccagcatgagcgaggaagtttagcaagcttggatagcctgcgcaaaggagggcctccacctcctaattggagacagccagagctgccagaggtgatcgccatgcttggattccgcttggatgctgtcaagtccaatgcagctgcatacctgcaacacttatgctaccgcaatgacaaggtgaagactgacgtgcggaagctcaagggcatcccagtactggtgggattgttagaccatcccaaaaaggaagtgcaccttggagcctgtggagctctcaagaatatctcttttggacgtgaccaggataacaagattgccataaaaaactgtgatggtgtgcctgcccttgtgcgattgcttcgaaaggctcgtgatatggaccttactgaagttattaccggaaccctgtggaatctttcatcccatgactcaatcaaaatggagattgtggaccatgcactgcatgccttgacagatgaagtgatcattcctcattctggttgggagcgggaacctaatgaagactgtaagccacgccacattgagtgggaatcggtgctcaccaacacagctggctgccttaggaatgtaagctcagagaggagtgaagctcgccggaaacttcgggaatgtgatggtttagttgatgccctcattttcattgttcaggctgagattgggcagaaggattcagacagcaagcttgtagagaactgtgtttgccttcttcggaacttatcatatcaagttcaccgggagatcccacaggcagagcgttaccaagaggcagctcccaatgttgccaacaatactgggccacatgctgccagttgctttggggccaagaagggcaaagggaaaaaacctatagaggatccagcaaacgatacagtggatttccctaaaagaacgagtccagctcgaggctatgagctcttatttcagccagaggtggttcggatatacatctcacttcttaaggagagcaagactcctgccatcctagaagcctcagctggagctatccagaacttgtgtgctgggcgctggacgtatggtcgatacatccgctctgctctgcgtcaagagaaggctctttctgccatagctgacctcctgactaatgaacatgaacgggtggtgaaagctgcatctggagcactgagaaacctggctgtggatgctcgcaacaaagaattaattggtaaacatgctattcctaacttggtaaagaatctgccaggaggacagcagaactcctcttggaatttctctgaggacactgtcatctctattttgaacactatcaacgaggttatcgctgagaacttggaggctgccaaaaagcttcgagagacacagggtattgagaagctggtgttgatcaacaaatcagggaaccgctcagaaaaagaagttcgagcagcagcacttgtattacagacaatctggggatataaggaactgcggaagccactggaaaaagaaggatggaagaaatcagactttcaggtgaatctaaacaatgcttcccgaagccagagcagtcattcatatgatgatagtactctccctctcattgaccggaaccaaaaatcagataagaaacctgatcgggaagaaattcagatgagcaatatgggatcaaacacaaaatcactagataacaactattccacaccaaatgagagaggagaccacaatagaacactggatcgatcgggggatctaggcgacatggagccattgaagggaacaacacccttgatgcagaagatttagcaccactatctccgttccatctgggcttatatgtacttttattttttggtggtgaaattgactgatgattttcctttttcttcgctggactattgtgccaactgccaggctgcctcctgcccttacagccctaagtggctgccttctttccatcaactcccaacttcttcctgtgaagtttaattgtctcaacgcctccccctcccccattccctccatttttctcccaagaaacctgactcaattatttgcatattttgagaaactgctgcagattagttctttttgccagttttccctggaactcctggccttttgtggaggggagggatggagagaataggaatcttcactagaagccgtgggaagaattggaagttacatgctgtatatgcaatgtccagcagtctgataaactgacgattcttaatcaagatttttttcctgatggggaagggacttttattttcttttagagaggggaaagtgtgagctcttcccttattcctaatggctatttttgaagcaaagaaggccagcaacattggcacatgccacctggcaaaggacccttgagtaagtgaaggtctcctaaaactgggattaagaaaccttgctctcctcatctccaaggcagggaccatcaagaacctacagactccatctcttctgcaagcctcatgccaaccctgggctattgctgctgccccttaaacacaggctgtccttaacccacctctcctgccctgtgatatgtctgctgagttggcctggccatttccaagaggctgtagaaaggggagaatgtcaaggaagacttttggtagagaaggagcagaaagatgtgtttttgggaagaagaagacctctaggaggagctagtaggaatgtacatgaagcaattagtctgaaactggcttccccactcccccgtttctccttttcctatccttataggcctgtcccttgcctctgccctggattggttggcaaactaaaggacttgatgtacataactcctgtcccttttcccttacaaggtggggattgcccctggctttgcctcttctttgtgcctttggcctggggtgcatctcctcccgcccttccatgtgcctttctttgcctctgcagtctcatttctcataattttgcaaattatattttgttgctttcttacctactattggccctaaatagcagaaagaagagaagtgaccgagagaacctcagattcttcattgaggattggtatagccatgatttcagtcatagcaagcttttgctcaacagcatatgggtgggattttgcaaaaatcctattctgatgaatctcaaagtaaggctggtaagagaagtgagtggtgtgactcttactccttaggtgcccagaatttaccatcatctctgaaggagttacagggaagtggtctccccaattctcccctccctccagtattgccccctctcactttagcatatattaattagcaggttgggctagagaaatcagctgctatgcgggttgattattattattatttctaatccttttccttatttgccttctactccccttaatctaatctaaaagctctgttccatgcaactggagttccttatccctctcttccccttcccttatatattgaggctatggggtaggagaaaagtgcacaacccaccaccccctttactcgtgcattaaaatttcttatttacccttttcccccttcccatttcttcccactttcatctaccttttctggcaaaaaggagccttttgctctctgtgaccctaagagcacactgcacagggaaaattgccccatccagacctggctccactcttgatctctcttgtcctcttctgctcttttcctggtgctcttttttctcggtggggtgtgggtaatagaacagccgtgggcttttggggacctttaacttttttttctctcttttgtttataaaaaacactaaacattcaattccagagaaccaaaaatcccaccttcccaccgaacactactaaggggcttgtgttctgctccataccttttctcttttctttctgtcttgttaatgcttttaaaaacaaatgagttttttatataaataaagtttttaaagtgtgtatgtggggggtctgtgtcatttcttcacttcaagctgttatttcttccctgctttgcatctttgttacttccttatgtatcagtgtcctttccagagcaaccagaaggaggttataccaggatttattttgagctcagccccaactctttatcaagcaacattcttgttaactatatgtgaaacattttttcttctgaagattcttaaaaattgaatgtggctgaagttgaacatgggagcttattgctaatttagagataggaaactgaagcataaagaattaatgacttactttaattactggaattcttctgcaacatttgacaaaactaaccttgaataaggcccactgtaatacgtagctctcttaaatataacacttaggactagaagattagaaactaccaatcccaactacgtaataggaaaatgtaggatcaaaaggcccatgtatataagtactgaccactgggccataatgttgcttctcaggctatatgcagtcctttagtcagaagtcaataggcctatttattaatattttacagaccatattacctggattaccagggactatctttgctgcagagatcaagggttaagatctatgggaagatacttatttttctgaggtccttatgtcctgtcatataattaaagactcaagagaatttatgtgaaatgctttctgtatgcccaaatctttagattaaaattatatagctgctcctgatgatggtcctgtcttgttttattgaactaggacttgggtatgaaaactttcatgggctagtgagaccaggaaatcaactagcttttaaagcttgatttgtgtctaacaattgtagtgttagattagaggttgaagtacaaagccaaaaagctattaagagtttactttccaaagagttttgatagccctgcttgagatgatttttatctaaatagaaaagcctggctgcttgtcagcaacactttatttccctgttatgttcttatcctttggcattgagctagatacaaaccctactcttctctcttccttctggattggtccatttgtttatctcattcaataaatatttgccaagcacctcct

SEQ ID NO: 38079 - DNA, 5907 bp, Artificial Sequence
  derived and/or modified sequence
ctgccagatcagtttgtcaccacccaggctcccttgcctttggctgggtgcaacttccattttaggtgttggatctgagggggaaaaaaaagagagagggagagagagagaaagaagagcaggaaagatcccgaaaggaggaagaggtggcgaaaaatcaactgccctgctggatttgtctttctcagcaccttggcgaagccttgggtttctttcttaaaggactgatttttagaactccacatttgaggtggagtcgaccgccagcatcttggcctctgtgaaggaacaagaggcccagtttgagaagctgacccgggcgctggaggaggaacggcgccacgtctcggcgcagctggaacgcgtccgggtctcaccacaagatgccaacccactcatggccaacggcacactcacccgccggcatcagaacggccggtttgtgggcgatgctgaccttgaaagacagaaattttcagatttgaaactcaacggaccccaggatcacagtcaccttctatatagcaccatccccaggatgcaggagccggggcagattgtggagacctacacggaggaggatcctgagggagccatgtctgtagtctctgtggagacctcagatgatgggaccactcggcgcacagagaccacggtcaagaaagtagtgaagactgtgacaacacggacagtacagccagtcgctatgggaccagacgggttgcctgtggatgcttcatcagtttctaacaactatatccagactttgggtcgtgatttccgcaagaatggcaatgggggacctggtccctatgtggggcaagctggcactgctacccttcctaggaacttccactaccctcctgatggttatagtcgccactatgaagatggttatccaggtggcagtgataactatggcagtctgtcccgggtgacccgcattgaggagcggtataggcccagcatggaaggctaccgggcacctagtagacaggatgtgtatgggccccaaccccaggttcgggtaggtgggagcagcgtggatctgcatcgctttcatccagagccttatgggctagaggatgaccagcgtagtatgggctatgatgacctggattatggtatgatgtctgattatggcactgcccgtcggactgggacaccctctgaccctcgtcggcgcctcaggagctatgaagacatgattggtgaggaggtgccatcggatcaatactactgggctcctttggcccagcatgagcgaggaagtttagcaagcttggatagcctgcgcaaaggagggcctccacctcctaattggagacagccagagctgccagaggtgatcgccatgcttggattccgcttggatgctgtcaagtccaatgcagctgcatacctgcaacacttatgctaccgcaatgacaaggtgaagactgacgtgcggaagctcaagggcatcccagtactggtgggattgttagaccatcccaaaaaggaagtgcaccttggagcctgtggagctctcaagaatatctcttttggacgtgaccaggataacaagattgccataaaaaactgtgatggtgtgcctgcccttgtgcgattgcttcgaaaggctcgtgatatggaccttactgaagttattaccggaaccctgtggaatctttcatcccatgactcaatcaaaatggagattgtggaccatgcactgcatgccttgacagatgaagtgatcattcctcattctggttgggagcgggaacctaatgaagactgtaagccacgccacattgagtgggaatcggtgctcaccaacacagctggctgccttaggaatgtaagctcagagaggagtgaagctcgccggaaacttcgggaatgtgatggtttagttgatgccctcattttcattgttcaggctgagattgggcagaaggattcagacagcaagcttgtagagaactgtgtttgccttcttcggaacttatcatatcaagttcaccgggagatcccacaggcagagcgttaccaagaggcagctcccaatgttgccaacaatactgggccacatgctgccagttgctttggggccaagaagggcaaagggaaaaaacctatagaggatccagcaaacgatacagtggatttccctaaaagaacgagtccagctcgaggctatgagctcttatttcagccagaggtggttcggatatacatctcacttcttaaggagagcaagactcctgccatcctagaagcctcagctggagctatccagaacttgtgtgctgggcgctggacgtatggtcgatacatccgctctgctctgcgtcaagagaaggctctttctgccatagctgacctcctgactaatgaacatgaacgggtggtgaaagctgcatctggagcactgagaaacctggctgtggatgctcgcaacaaagaattaattggtaaacatgctattcctaacttggtaaagaatctgccaggaggacagcagaactcctcttggaatttctctgaggacactgtcatctctattttgaacactatcaacgaggttatcgctgagaacttggaggctgccaaaaagcttcgagagacacagggtattgagaagctggtgttgatcaacaaatcagggaaccgctcagaaaaagaagttcgagcagcagcacttgtattacagacaatctggggatataaggaactgcggaagccactggaaaaagaaggatggaagaaatcagactttcaggtgaatctaaacaatgcttcccgaagccagagcagtcattcatatgatgatagtactctccctctcattgaccggaaccaaaaatcagataagaaacctgatcgggaagaaattcagatgagcaatatgggatcaaacacaaaatcactagataacaactattccacaccaaatgagagaggagaccacaatagaacactggatcgatcgggggatctaggcgacatggagccattgaagggaacaacacccttgatgcagaagatttagcaccactatctccgttccatctgggcttatatgtacttttattttttggtggtgaaattgactgatgattttcctttttcttcgctggactattgtgccaactgccaggctgcctcctgcccttacagccctaagtggctgccttctttccatcaactcccaacttcttcctgtgaagtttaattgtctcaacgcctccccctcccccattccctccatttttctcccaagaaacctgactcaattatttgcatattttgagaaactgctgcagattagttctttttgccagttttccctggaactcctggccttttgtggaggggagggatggagagaataggaatcttcactagaagccgtgggaagaattggaagttacatgctgtatatgcaatgtccagcagtctgataaactgacgattcttaatcaagatttttttcctgatggggaagggacttttattttcttttagagaggggaaagtgtgagctcttcccttattcctaatggctatttttgaagcaaagaaggccagcaacattggcacatgccacctggcaaaggacccttgagtaagtgaaggtctcctaaaactgggattaagaaaccttgctctcctcatctccaaggcagggaccatcaagaacctacagactccatctcttctgcaagcctcatgccaaccctgggctattgctgctgccccttaaacacaggctgtccttaacccacctctcctgccctgtgatatgtctgctgagttggcctggccatttccaagaggctgtagaaaggggagaatgtcaaggaagacttttggtagagaaggagcagaaagatgtgtttttgggaagaagaagacctctaggaggagctagtaggaatgtacatgaagcaattagtctgaaactggcttccccactcccccgtttctccttttcctatccttataggcctgtcccttgcctctgccctggattggttggcaaactaaaggacttgatgtacataactcctgtcccttttcccttacaaggtggggattgcccctggctttgcctcttctttgtgcctttggcctggggtgcatctcctcccgcccttccatgtgcctttctttgcctctgcagtctcatttctcataattttgcaaattatattttgttgctttcttacctactattggccctaaatagcagaaagaagagaagtgaccgagagaacctcagattcttcattgaggattggtatagccatgatttcagtcatagcaagcttttgctcaacagcatatgggtgggattttgcaaaaatcctattctgatgaatctcaaagtaaggctggtaagagaagtgagtggtgtgactcttactccttaggtgcccagaatttaccatcatctctgaaggagttacagggaagtggtctccccaattctcccctccctccagtattgccccctctcactttagcatatattaattagcaggttgggctagagaaatcagctgctatgcgggttgattattattattatttctaatccttttccttatttgccttctactccccttaatctaatctaaaagctctgttccatgcaactggagttccttatccctctcttccccttcccttatatattgaggctatggggtaggagaaaagtgcacaacccaccaccccctttactcgtgcattaaaatttcttatttacccttttcccccttcccatttcttcccactttcatctaccttttctggcaaaaaggagccttttgctctctgtgaccctaagagcacactgcacagggaaaattgccccatccagacctggctccactcttgatctctcttgtcctcttctgctcttttcctggtgctcttttttctcggtggggtgtgggtaatagaacagccgtgggcttttggggacctttaacttttttttctctcttttgtttataaaaaacactaaacattcaattccagagaaccaaaaatcccaccttcccaccgaacactactaaggggcttgtgttctgctccataccttttctcttttctttctgtcttgttaatgcttttaaaaacaaatgagttttttatataaataaagtttttaaagtgtgtatgtggggggtctgtgtcatttcttcacttcaagctgttatttcttccctgctttgcatctttgttacttccttatgtatcagtgtcctttccagagcaaccagaaggaggttataccaggatttattttgagctcagccccaactctttatcaagcaacattcttgttaactatatgtgaaacattttttcttctgaagattcttaaaaattgaatgtggctgaagttgaacatgggagcttattgctaatttagagataggaaactgaagcataaagaattaatgacttactttaattactggaattcttctgcaacatttgacaaaactaaccttgaataaggcccactgtaatacgtagctctcttaaatataacacttaggactagaagattagaaactaccaatcccaactacgtaataggaaaatgtaggatcaaaaggcccatgtatataagtactgaccactgggccataatgttgcttctcaggctatatgcagtcctttagtcagaagtcaataggcctatttattaatattttacagaccatattacctggattaccagggactatctttgctgcagagatcaagggttaagatctatgggaagatacttatttttctgaggtccttatgtcctgtcatataattaaagactcaagagaatttatgtgaaatgctttctgtatgcccaaatctttagattaaaattatatagctgctcct

SEQ ID NO: 38080 - DNA, 6099 bp, Artificial Sequence
  derived and/or modified sequence
ctgccagatcagtttgtcaccacccaggctcccttgcctttggctgggtgcaacttccattttaggtgttggatctgagggggaaaaaaaagagagagggagagagagagaaagaagagcaggaaagatcccgaaaggaggaagaggtggcgaaaaatcaactgccctgctggatttgtctttctcagcaccttggcgaagccttgggtttctttcttaaaggactgatttttagaactccacatttgaggtgtgtggcttttgaagaaaatgtatgtactgacgggaaaaggaggataagcaagtcgaatttttgtcttacgctctctccttcctgcttcctccttgctgtggtggctgggatgcttcttccatgattttttgaatctagactgggctgttctctgtgttaaaccaatcagttgcgaccttctcttaacaggtggagtcgaccgccagcatcttggcctctgtgaaggaacaagaggcccagtttgagaagctgacccgggcgctggaggaggaacggcgccacgtctcggcgcagctggaacgcgtccgggtctcaccacaagatgccaacccactcatggccaacggcacactcacccgccggcatcagaacggccggtttgtgggcgatgctgaccttgaaagacagaaattttcagatttgaaactcaacggaccccaggatcacagtcaccttctatatagcaccatccccaggatgcaggagccggggcagattgtggagacctacacggaggaggatcctgagggagccatgtctgtagtctctgtggagacctcagatgatgggaccactcggcgcacagagaccacggtcaagaaagtagtgaagactgtgacaacacggacagtacagccagtcgctatgggaccagacgggttgcctgtggatgcttcatcagtttctaacaactatatccagactttgggtcgtgatttccgcaagaatggcaatgggggacctggtccctatgtggggcaagctggcactgctacccttcctaggaacttccactaccctcctgatggttatagtcgccactatgaagatggttatccaggtggcagtgataactatggcagtctgtcccgggtgacccgcattgaggagcggtataggcccagcatggaaggctaccgggcacctagtagacaggatgtgtatgggccccaaccccaggttcgggtaggtgggagcagcgtggatctgcatcgctttcatccagagccttatgggctagaggatgaccagcgtagtatgggctatgatgacctggattatggtatgatgtctgattatggcactgcccgtcggactgggacaccctctgaccctcgtcggcgcctcaggagctatgaagacatgattggtgaggaggtgccatcggatcaatactactgggctcctttggcccagcatgagcgaggaagtttagcaagcttggatagcctgcgcaaaggagggcctccacctcctaattggagacagccagagctgccagaggtgatcgccatgcttggattccgcttggatgctgtcaagtccaatgcagctgcatacctgcaacacttatgctaccgcaatgacaaggtgaagactgacgtgcggaagctcaagggcatcccagtactggtgggattgttagaccatcccaaaaaggaagtgcaccttggagcctgtggagctctcaagaatatctcttttggacgtgaccaggataacaagattgccataaaaaactgtgatggtgtgcctgcccttgtgcgattgcttcgaaaggctcgtgatatggaccttactgaagttattaccggaaccctgtggaatctttcatcccatgactcaatcaaaatggagattgtggaccatgcactgcatgccttgacagatgaagtgatcattcctcattctggttgggagcgggaacctaatgaagactgtaagccacgccacattgagtgggaatcggtgctcaccaacacagctggctgccttaggaatgtaagctcagagaggagtgaagctcgccggaaacttcgggaatgtgatggtttagttgatgccctcattttcattgttcaggctgagattgggcagaaggattcagacagcaagcttgtagagaactgtgtttgccttcttcggaacttatcatatcaagttcaccgggagatcccacaggcagagcgttaccaagaggcagctcccaatgttgccaacaatactgggccacatgctgccagttgctttggggccaagaagggcaaagggaaaaaacctatagaggatccagcaaacgatacagtggatttccctaaaagaacgagtccagctcgaggctatgagctcttatttcagccagaggtggttcggatatacatctcacttcttaaggagagcaagactcctgccatcctagaagcctcagctggagctatccagaacttgtgtgctgggcgctggacgtatggtcgatacatccgctctgctctgcgtcaagagaaggctctttctgccatagctgacctcctgactaatgaacatgaacgggtggtgaaagctgcatctggagcactgagaaacctggctgtggatgctcgcaacaaagaattaattggtaaacatgctattcctaacttggtaaagaatctgccaggaggacagcagaactcctcttggaatttctctgaggacactgtcatctctattttgaacactatcaacgaggttatcgctgagaacttggaggctgccaaaaagcttcgagagacacagggtattgagaagctggtgttgatcaacaaatcagggaaccgctcagaaaaagaagttcgagcagcagcacttgtattacagacaatctggggatataaggaactgcggaagccactggaaaaagaaggatggaagaaatcagactttcaggtgaatctaaacaatgcttcccgaagccagagcagtcattcatatgatgatagtactctccctctcattgaccggaaccaaaaatcagataagaaacctgatcgggaagaaattcagatgagcaatatgggatcaaacacaaaatcactagataacaactattccacaccaaatgagagaggagaccacaatagaacactggatcgatcgggggatctaggcgacatggagccattgaagggaacaacacccttgatgcagaagatttagcaccactatctccgttccatctgggcttatatgtacttttattttttggtggtgaaattgactgatgattttcctttttcttcgctggactattgtgccaactgccaggctgcctcctgcccttacagccctaagtggctgccttctttccatcaactcccaacttcttcctgtgaagtttaattgtctcaacgcctccccctcccccattccctccatttttctcccaagaaacctgactcaattatttgcatattttgagaaactgctgcagattagttctttttgccagttttccctggaactcctggccttttgtggaggggagggatggagagaataggaatcttcactagaagccgtgggaagaattggaagttacatgctgtatatgcaatgtccagcagtctgataaactgacgattcttaatcaagatttttttcctgatggggaagggacttttattttcttttagagaggggaaagtgtgagctcttcccttattcctaatggctatttttgaagcaaagaaggccagcaacattggcacatgccacctggcaaaggacccttgagtaagtgaaggtctcctaaaactgggattaagaaaccttgctctcctcatctccaaggcagggaccatcaagaacctacagactccatctcttctgcaagcctcatgccaaccctgggctattgctgctgccccttaaacacaggctgtccttaacccacctctcctgccctgtgatatgtctgctgagttggcctggccatttccaagaggctgtagaaaggggagaatgtcaaggaagacttttggtagagaaggagcagaaagatgtgtttttgggaagaagaagacctctaggaggagctagtaggaatgtacatgaagcaattagtctgaaactggcttccccactcccccgtttctccttttcctatccttataggcctgtcccttgcctctgccctggattggttggcaaactaaaggacttgatgtacataactcctgtcccttttcccttacaaggtggggattgcccctggctttgcctcttctttgtgcctttggcctggggtgcatctcctcccgcccttccatgtgcctttctttgcctctgcagtctcatttctcataattttgcaaattatattttgttgctttcttacctactattggccctaaatagcagaaagaagagaagtgaccgagagaacctcagattcttcattgaggattggtatagccatgatttcagtcatagcaagcttttgctcaacagcatatgggtgggattttgcaaaaatcctattctgatgaatctcaaagtaaggctggtaagagaagtgagtggtgtgactcttactccttaggtgcccagaatttaccatcatctctgaaggagttacagggaagtggtctccccaattctcccctccctccagtattgccccctctcactttagcatatattaattagcaggttgggctagagaaatcagctgctatgcgggttgattattattattatttctaatccttttccttatttgccttctactccccttaatctaatctaaaagctctgttccatgcaactggagttccttatccctctcttccccttcccttatatattgaggctatggggtaggagaaaagtgcacaacccaccaccccctttactcgtgcattaaaatttcttatttacccttttcccccttcccatttcttcccactttcatctaccttttctggcaaaaaggagccttttgctctctgtgaccctaagagcacactgcacagggaaaattgccccatccagacctggctccactcttgatctctcttgtcctcttctgctcttttcctggtgctcttttttctcggtggggtgtgggtaatagaacagccgtgggcttttggggacctttaacttttttttctctcttttgtttataaaaaacactaaacattcaattccagagaaccaaaaatcccaccttcccaccgaacactactaaggggcttgtgttctgctccataccttttctcttttctttctgtcttgttaatgcttttaaaaacaaatgagttttttatataaataaagtttttaaagtgtgtatgtggggggtctgtgtcatttcttcacttcaagctgttatttcttccctgctttgcatctttgttacttccttatgtatcagtgtcctttccagagcaaccagaaggaggttataccaggatttattttgagctcagccccaactctttatcaagcaacattcttgttaactatatgtgaaacattttttcttctgaagattcttaaaaattgaatgtggctgaagttgaacatgggagcttattgctaatttagagataggaaactgaagcataaagaattaatgacttactttaattactggaattcttctgcaacatttgacaaaactaaccttgaataaggcccactgtaatacgtagctctcttaaatataacacttaggactagaagattagaaactaccaatcccaactacgtaataggaaaatgtaggatcaaaaggcccatgtatataagtactgaccactgggccataatgttgcttctcaggctatatgcagtcctttagtcagaagtcaataggcctatttattaatattttacagaccatattacctggattaccagggactatctttgctgcagagatcaagggttaagatctatgggaagatacttatttttctgaggtccttatgtcctgtcatataattaaagactcaagagaatttatgtgaaatgctttctgtatgcccaaatctttagattaaaattatatagctgctcct

SEQ ID NO: 38081 - DNA, 5727 bp, Artificial Sequence
  derived and/or modified sequence
ctgccagatcagtttgtcaccacccaggctcccttgcctttggctgggtgcaacttccattttaggtgttggatctgagggggaaaaaaaagagagagggagagagagagaaagaagagcaggaaagatcccgaaaggaggaagaggtggcgaaaaatcaactgccctgctggatttgtctttctcagcaccttggcgaagccttgggtttctttcttaaaggactgatttttagaactccacatttgagaacggccggtttgtgggcgatgctgaccttgaaagacagaaattttcagatttgaaactcaacggaccccaggatcacagtcaccttctatatagcaccatccccaggatgcaggagccggggcagattgtggagacctacacggaggaggatcctgagggagccatgtctgtagtctctgtggagacctcagatgatgggaccactcggcgcacagagaccacggtcaagaaagtagtgaagactgtgacaacacggacagtacagccagtcgctatgggaccagacgggttgcctgtggatgcttcatcagtttctaacaactatatccagactttgggtcgtgatttccgcaagaatggcaatgggggacctggtccctatgtggggcaagctggcactgctacccttcctaggaacttccactaccctcctgatggttatagtcgccactatgaagatggttatccaggtggcagtgataactatggcagtctgtcccgggtgacccgcattgaggagcggtataggcccagcatggaaggctaccgggcacctagtagacaggatgtgtatgggccccaaccccaggttcgggtaggtgggagcagcgtggatctgcatcgctttcatccagagccttatgggctagaggatgaccagcgtagtatgggctatgatgacctggattatggtatgatgtctgattatggcactgcccgtcggactgggacaccctctgaccctcgtcggcgcctcaggagctatgaagacatgattggtgaggaggtgccatcggatcaatactactgggctcctttggcccagcatgagcgaggaagtttagcaagcttggatagcctgcgcaaaggagggcctccacctcctaattggagacagccagagctgccagaggtgatcgccatgcttggattccgcttggatgctgtcaagtccaatgcagctgcatacctgcaacacttatgctaccgcaatgacaaggtgaagactgacgtgcggaagctcaagggcatcccagtactggtgggattgttagaccatcccaaaaaggaagtgcaccttggagcctgtggagctctcaagaatatctcttttggacgtgaccaggataacaagattgccataaaaaactgtgatggtgtgcctgcccttgtgcgattgcttcgaaaggctcgtgatatggaccttactgaagttattaccggaaccctgtggaatctttcatcccatgactcaatcaaaatggagattgtggaccatgcactgcatgccttgacagatgaagtgatcattcctcattctggttgggagcgggaacctaatgaagactgtaagccacgccacattgagtgggaatcggtgctcaccaacacagctggctgccttaggaatgtaagctcagagaggagtgaagctcgccggaaacttcgggaatgtgatggtttagttgatgccctcattttcattgttcaggctgagattgggcagaaggattcagacagcaagcttgtagagaactgtgtttgccttcttcggaacttatcatatcaagttcaccgggagatcccacaggcagagcgttaccaagaggcagctcccaatgttgccaacaatactgggccacatgctgccagttgctttggggccaagaagggcaaagggaaaaaacctatagaggatccagcaaacgatacagtggatttccctaaaagaacgagtccagctcgaggctatgagctcttatttcagccagaggtggttcggatatacatctcacttcttaaggagagcaagactcctgccatcctagaagcctcagctggagctatccagaacttgtgtgctgggcgctggacgtatggtcgatacatccgctctgctctgcgtcaagagaaggctctttctgccatagctgacctcctgactaatgaacatgaacgggtggtgaaagctgcatctggagcactgagaaacctggctgtggatgctcgcaacaaagaattaattggtaaacatgctattcctaacttggtaaagaatctgccaggaggacagcagaactcctcttggaatttctctgaggacactgtcatctctattttgaacactatcaacgaggttatcgctgagaacttggaggctgccaaaaagcttcgagagacacagggtattgagaagctggtgttgatcaacaaatcagggaaccgctcagaaaaagaagttcgagcagcagcacttgtattacagacaatctggggatataaggaactgcggaagccactggaaaaagaaggatggaagaaatcagactttcaggtgaatctaaacaatgcttcccgaagccagagcagtcattcatatgatgatagtactctccctctcattgaccggaaccaaaaatcagataagaaacctgatcgggaagaaattcagatgagcaatatgggatcaaacacaaaatcactagataacaactattccacaccaaatgagagaggagaccacaatagaacactggatcgatcgggggatctaggcgacatggagccattgaagggaacaacacccttgatgcagaagatttagcaccactatctccgttccatctgggcttatatgtacttttattttttggtggtgaaattgactgatgattttcctttttcttcgctggactattgtgccaactgccaggctgcctcctgcccttacagccctaagtggctgccttctttccatcaactcccaacttcttcctgtgaagtttaattgtctcaacgcctccccctcccccattccctccatttttctcccaagaaacctgactcaattatttgcatattttgagaaactgctgcagattagttctttttgccagttttccctggaactcctggccttttgtggaggggagggatggagagaataggaatcttcactagaagccgtgggaagaattggaagttacatgctgtatatgcaatgtccagcagtctgataaactgacgattcttaatcaagatttttttcctgatggggaagggacttttattttcttttagagaggggaaagtgtgagctcttcccttattcctaatggctatttttgaagcaaagaaggccagcaacattggcacatgccacctggcaaaggacccttgagtaagtgaaggtctcctaaaactgggattaagaaaccttgctctcctcatctccaaggcagggaccatcaagaacctacagactccatctcttctgcaagcctcatgccaaccctgggctattgctgctgccccttaaacacaggctgtccttaacccacctctcctgccctgtgatatgtctgctgagttggcctggccatttccaagaggctgtagaaaggggagaatgtcaaggaagacttttggtagagaaggagcagaaagatgtgtttttgggaagaagaagacctctaggaggagctagtaggaatgtacatgaagcaattagtctgaaactggcttccccactcccccgtttctccttttcctatccttataggcctgtcccttgcctctgccctggattggttggcaaactaaaggacttgatgtacataactcctgtcccttttcccttacaaggtggggattgcccctggctttgcctcttctttgtgcctttggcctggggtgcatctcctcccgcccttccatgtgcctttctttgcctctgcagtctcatttctcataattttgcaaattatattttgttgctttcttacctactattggccctaaatagcagaaagaagagaagtgaccgagagaacctcagattcttcattgaggattggtatagccatgatttcagtcatagcaagcttttgctcaacagcatatgggtgggattttgcaaaaatcctattctgatgaatctcaaagtaaggctggtaagagaagtgagtggtgtgactcttactccttaggtgcccagaatttaccatcatctctgaaggagttacagggaagtggtctccccaattctcccctccctccagtattgccccctctcactttagcatatattaattagcaggttgggctagagaaatcagctgctatgcgggttgattattattattatttctaatccttttccttatttgccttctactccccttaatctaatctaaaagctctgttccatgcaactggagttccttatccctctcttccccttcccttatatattgaggctatggggtaggagaaaagtgcacaacccaccaccccctttactcgtgcattaaaatttcttatttacccttttcccccttcccatttcttcccactttcatctaccttttctggcaaaaaggagccttttgctctctgtgaccctaagagcacactgcacagggaaaattgccccatccagacctggctccactcttgatctctcttgtcctcttctgctcttttcctggtgctcttttttctcggtggggtgtgggtaatagaacagccgtgggcttttggggacctttaacttttttttctctcttttgtttataaaaaacactaaacattcaattccagagaaccaaaaatcccaccttcccaccgaacactactaaggggcttgtgttctgctccataccttttctcttttctttctgtcttgttaatgcttttaaaaacaaatgagttttttatataaataaagtttttaaagtgtgtatgtggggggtctgtgtcatttcttcacttcaagctgttatttcttccctgctttgcatctttgttacttccttatgtatcagtgtcctttccagagcaaccagaaggaggttataccaggatttattttgagctcagccccaactctttatcaagcaacattcttgttaactatatgtgaaacattttttcttctgaagattcttaaaaattgaatgtggctgaagttgaacatgggagcttattgctaatttagagataggaaactgaagcataaagaattaatgacttactttaattactggaattcttctgcaacatttgacaaaactaaccttgaataaggcccactgtaatacgtagctctcttaaatataacacttaggactagaagattagaaactaccaatcccaactacgtaataggaaaatgtaggatcaaaaggcccatgtatataagtactgaccactgggccataatgttgcttctcaggctatatgcagtcctttagtcagaagtcaataggcctatttattaatattttacagaccatattacctggattaccagggactatctttgctgcagagatcaagggttaagatctatgggaagatacttatttttctgaggtccttatgtcctgtcatataattaaagactcaagagaatttatgtgaaatgctttctgtatgcccaaatctttagattaaaattatatagctgctcct

SEQ ID NO: 38082 - DNA, 579 bp, Artificial Sequence
  derived and/or modified sequence
aaggctaggtgaggtgtctttggcaaggttgcacagggatccagaggtggagtcgaccgccagcatcttggcctctgtgaaggaacaagaggcccagtttgagaagctgacccgggcgctggaggaggaacggcgccacgtctcggcgcagctggaacgcgtccgggtctcaccacaagatgccaacccactcatggccaacggcacactcacccgccggcatcagaacggccggtttgtgggcgatgctgaccttgaaagacagaaattttcagatttgaaactcaacggaccccaggatcacagtcaccttctatatagcaccatccccaggatgcaggagccggggcagattgtggagacctacacggaggaggatcctgagggagccatgtctgtagtctctgtggagacctcagatgatgggaccactcggcgcacagagaccacggtcaagaaagtagtgaagactgtgacaacacggacagtacagccagtcgctatgggaccagacgggttgcctgtggatgcttcatcagtttctaacaactatatccagactttgggtcgtgatttccg

SEQ ID NO: 38083 - DNA, 5655 bp, Artificial Sequence
  derived and/or modified sequence
ctgccagatcagtttgtcaccacccaggctcccttgcctttggctgggtgcaacttccattttaggtgttggatctgagggggaaaaaaaagagagagggagagagagagaaagaagagcaggaaagatcccgaaaggaggaagaggtggcgaaaaatcaactgccctgctggatttgtctttctcagcaccttggcgaagccttgggtttctttcttaaaggactgatttttagaactccacatttgaggatcacagtcaccttctatatagcaccatccccaggatgcaggagccggggcagattgtggagacctacacggaggaggatcctgagggagccatgtctgtagtctctgtggagacctcagatgatgggaccactcggcgcacagagaccacggtcaagaaagtagtgaagactgtgacaacacggacagtacagccagtcgctatgggaccagacgggttgcctgtggatgcttcatcagtttctaacaactatatccagactttgggtcgtgatttccgcaagaatggcaatgggggacctggtccctatgtggggcaagctggcactgctacccttcctaggaacttccactaccctcctgatggttatagtcgccactatgaagatggttatccaggtggcagtgataactatggcagtctgtcccgggtgacccgcattgaggagcggtataggcccagcatggaaggctaccgggcacctagtagacaggatgtgtatgggccccaaccccaggttcgggtaggtgggagcagcgtggatctgcatcgctttcatccagagccttatgggctagaggatgaccagcgtagtatgggctatgatgacctggattatggtatgatgtctgattatggcactgcccgtcggactgggacaccctctgaccctcgtcggcgcctcaggagctatgaagacatgattggtgaggaggtgccatcggatcaatactactgggctcctttggcccagcatgagcgaggaagtttagcaagcttggatagcctgcgcaaaggagggcctccacctcctaattggagacagccagagctgccagaggtgatcgccatgcttggattccgcttggatgctgtcaagtccaatgcagctgcatacctgcaacacttatgctaccgcaatgacaaggtgaagactgacgtgcggaagctcaagggcatcccagtactggtgggattgttagaccatcccaaaaaggaagtgcaccttggagcctgtggagctctcaagaatatctcttttggacgtgaccaggataacaagattgccataaaaaactgtgatggtgtgcctgcccttgtgcgattgcttcgaaaggctcgtgatatggaccttactgaagttattaccggaaccctgtggaatctttcatcccatgactcaatcaaaatggagattgtggaccatgcactgcatgccttgacagatgaagtgatcattcctcattctggttgggagcgggaacctaatgaagactgtaagccacgccacattgagtgggaatcggtgctcaccaacacagctggctgccttaggaatgtaagctcagagaggagtgaagctcgccggaaacttcgggaatgtgatggtttagttgatgccctcattttcattgttcaggctgagattgggcagaaggattcagacagcaagcttgtagagaactgtgtttgccttcttcggaacttatcatatcaagttcaccgggagatcccacaggcagagcgttaccaagaggcagctcccaatgttgccaacaatactgggccacatgctgccagttgctttggggccaagaagggcaaagggaaaaaacctatagaggatccagcaaacgatacagtggatttccctaaaagaacgagtccagctcgaggctatgagctcttatttcagccagaggtggttcggatatacatctcacttcttaaggagagcaagactcctgccatcctagaagcctcagctggagctatccagaacttgtgtgctgggcgctggacgtatggtcgatacatccgctctgctctgcgtcaagagaaggctctttctgccatagctgacctcctgactaatgaacatgaacgggtggtgaaagctgcatctggagcactgagaaacctggctgtggatgctcgcaacaaagaattaattggtaaacatgctattcctaacttggtaaagaatctgccaggaggacagcagaactcctcttggaatttctctgaggacactgtcatctctattttgaacactatcaacgaggttatcgctgagaacttggaggctgccaaaaagcttcgagagacacagggtattgagaagctggtgttgatcaacaaatcagggaaccgctcagaaaaagaagttcgagcagcagcacttgtattacagacaatctggggatataaggaactgcggaagccactggaaaaagaaggatggaagaaatcagactttcaggtgaatctaaacaatgcttcccgaagccagagcagtcattcatatgatgatagtactctccctctcattgaccggaaccaaaaatcagataagaaacctgatcgggaagaaattcagatgagcaatatgggatcaaacacaaaatcactagataacaactattccacaccaaatgagagaggagaccacaatagaacactggatcgatcgggggatctaggcgacatggagccattgaagggaacaacacccttgatgcagaagatttagcaccactatctccgttccatctgggcttatatgtacttttattttttggtggtgaaattgactgatgattttcctttttcttcgctggactattgtgccaactgccaggctgcctcctgcccttacagccctaagtggctgccttctttccatcaactcccaacttcttcctgtgaagtttaattgtctcaacgcctccccctcccccattccctccatttttctcccaagaaacctgactcaattatttgcatattttgagaaactgctgcagattagttctttttgccagttttccctggaactcctggccttttgtggaggggagggatggagagaataggaatcttcactagaagccgtgggaagaattggaagttacatgctgtatatgcaatgtccagcagtctgataaactgacgattcttaatcaagatttttttcctgatggggaagggacttttattttcttttagagaggggaaagtgtgagctcttcccttattcctaatggctatttttgaagcaaagaaggccagcaacattggcacatgccacctggcaaaggacccttgagtaagtgaaggtctcctaaaactgggattaagaaaccttgctctcctcatctccaaggcagggaccatcaagaacctacagactccatctcttctgcaagcctcatgccaaccctgggctattgctgctgccccttaaacacaggctgtccttaacccacctctcctgccctgtgatatgtctgctgagttggcctggccatttccaagaggctgtagaaaggggagaatgtcaaggaagacttttggtagagaaggagcagaaagatgtgtttttgggaagaagaagacctctaggaggagctagtaggaatgtacatgaagcaattagtctgaaactggcttccccactcccccgtttctccttttcctatccttataggcctgtcccttgcctctgccctggattggttggcaaactaaaggacttgatgtacataactcctgtcccttttcccttacaaggtggggattgcccctggctttgcctcttctttgtgcctttggcctggggtgcatctcctcccgcccttccatgtgcctttctttgcctctgcagtctcatttctcataattttgcaaattatattttgttgctttcttacctactattggccctaaatagcagaaagaagagaagtgaccgagagaacctcagattcttcattgaggattggtatagccatgatttcagtcatagcaagcttttgctcaacagcatatgggtgggattttgcaaaaatcctattctgatgaatctcaaagtaaggctggtaagagaagtgagtggtgtgactcttactccttaggtgcccagaatttaccatcatctctgaaggagttacagggaagtggtctccccaattctcccctccctccagtattgccccctctcactttagcatatattaattagcaggttgggctagagaaatcagctgctatgcgggttgattattattattatttctaatccttttccttatttgccttctactccccttaatctaatctaaaagctctgttccatgcaactggagttccttatccctctcttccccttcccttatatattgaggctatggggtaggagaaaagtgcacaacccaccaccccctttactcgtgcattaaaatttcttatttacccttttcccccttcccatttcttcccactttcatctaccttttctggcaaaaaggagccttttgctctctgtgaccctaagagcacactgcacagggaaaattgccccatccagacctggctccactcttgatctctcttgtcctcttctgctcttttcctggtgctcttttttctcggtggggtgtgggtaatagaacagccgtgggcttttggggacctttaacttttttttctctcttttgtttataaaaaacactaaacattcaattccagagaaccaaaaatcccaccttcccaccgaacactactaaggggcttgtgttctgctccataccttttctcttttctttctgtcttgttaatgcttttaaaaacaaatgagttttttatataaataaagtttttaaagtgtgtatgtggggggtctgtgtcatttcttcacttcaagctgttatttcttccctgctttgcatctttgttacttccttatgtatcagtgtcctttccagagcaaccagaaggaggttataccaggatttattttgagctcagccccaactctttatcaagcaacattcttgttaactatatgtgaaacattttttcttctgaagattcttaaaaattgaatgtggctgaagttgaacatgggagcttattgctaatttagagataggaaactgaagcataaagaattaatgacttactttaattactggaattcttctgcaacatttgacaaaactaaccttgaataaggcccactgtaatacgtagctctcttaaatataacacttaggactagaagattagaaactaccaatcccaactacgtaataggaaaatgtaggatcaaaaggcccatgtatataagtactgaccactgggccataatgttgcttctcaggctatatgcagtcctttagtcagaagtcaataggcctatttattaatattttacagaccatattacctggattaccagggactatctttgctgcagagatcaagggttaagatctatgggaagatacttatttttctgaggtccttatgtcctgtcatataattaaagactcaagagaatttatgtgaaatgctttctgtatgcccaaatctttagattaaaattatatagctgctcct

SEQ ID NO: 38084 - DNA, 5749 bp, Artificial Sequence
  derived and/or modified sequence
ctgccagatcagtttgtcaccacccaggctcccttgcctttggctgggtgcaacttccattttaggtgttggatctgagggggaaaaaaaagagagagggagagagagagaaagaagagcaggaaagatcccgaaaggaggaagaggtggcgaaaaatcaactgccctgctggatttgtctttctcagcaccttggcgaagccttgggtttctttcttaaaggactgatttttagaactccacatttgaggtgtgtggcttttgaagaaaataacggccggtttgtgggcgatgctgaccttgaaagacagaaattttcagatttgaaactcaacggaccccaggatcacagtcaccttctatatagcaccatccccaggatgcaggagccggggcagattgtggagacctacacggaggaggatcctgagggagccatgtctgtagtctctgtggagacctcagatgatgggaccactcggcgcacagagaccacggtcaagaaagtagtgaagactgtgacaacacggacagtacagccagtcgctatgggaccagacgggttgcctgtggatgcttcatcagtttctaacaactatatccagactttgggtcgtgatttccgcaagaatggcaatgggggacctggtccctatgtggggcaagctggcactgctacccttcctaggaacttccactaccctcctgatggttatagtcgccactatgaagatggttatccaggtggcagtgataactatggcagtctgtcccgggtgacccgcattgaggagcggtataggcccagcatggaaggctaccgggcacctagtagacaggatgtgtatgggccccaaccccaggttcgggtaggtgggagcagcgtggatctgcatcgctttcatccagagccttatgggctagaggatgaccagcgtagtatgggctatgatgacctggattatggtatgatgtctgattatggcactgcccgtcggactgggacaccctctgaccctcgtcggcgcctcaggagctatgaagacatgattggtgaggaggtgccatcggatcaatactactgggctcctttggcccagcatgagcgaggaagtttagcaagcttggatagcctgcgcaaaggagggcctccacctcctaattggagacagccagagctgccagaggtgatcgccatgcttggattccgcttggatgctgtcaagtccaatgcagctgcatacctgcaacacttatgctaccgcaatgacaaggtgaagactgacgtgcggaagctcaagggcatcccagtactggtgggattgttagaccatcccaaaaaggaagtgcaccttggagcctgtggagctctcaagaatatctcttttggacgtgaccaggataacaagattgccataaaaaactgtgatggtgtgcctgcccttgtgcgattgcttcgaaaggctcgtgatatggaccttactgaagttattaccggaaccctgtggaatctttcatcccatgactcaatcaaaatggagattgtggaccatgcactgcatgccttgacagatgaagtgatcattcctcattctggttgggagcgggaacctaatgaagactgtaagccacgccacattgagtgggaatcggtgctcaccaacacagctggctgccttaggaatgtaagctcagagaggagtgaagctcgccggaaacttcgggaatgtgatggtttagttgatgccctcattttcattgttcaggctgagattgggcagaaggattcagacagcaagcttgtagagaactgtgtttgccttcttcggaacttatcatatcaagttcaccgggagatcccacaggcagagcgttaccaagaggcagctcccaatgttgccaacaatactgggccacatgctgccagttgctttggggccaagaagggcaaagggaaaaaacctatagaggatccagcaaacgatacagtggatttccctaaaagaacgagtccagctcgaggctatgagctcttatttcagccagaggtggttcggatatacatctcacttcttaaggagagcaagactcctgccatcctagaagcctcagctggagctatccagaacttgtgtgctgggcgctggacgtatggtcgatacatccgctctgctctgcgtcaagagaaggctctttctgccatagctgacctcctgactaatgaacatgaacgggtggtgaaagctgcatctggagcactgagaaacctggctgtggatgctcgcaacaaagaattaattggtaaacatgctattcctaacttggtaaagaatctgccaggaggacagcagaactcctcttggaatttctctgaggacactgtcatctctattttgaacactatcaacgaggttatcgctgagaacttggaggctgccaaaaagcttcgagagacacagggtattgagaagctggtgttgatcaacaaatcagggaaccgctcagaaaaagaagttcgagcagcagcacttgtattacagacaatctggggatataaggaactgcggaagccactggaaaaagaaggatggaagaaatcagactttcaggtgaatctaaacaatgcttcccgaagccagagcagtcattcatatgatgatagtactctccctctcattgaccggaaccaaaaatcagataagaaacctgatcgggaagaaattcagatgagcaatatgggatcaaacacaaaatcactagataacaactattccacaccaaatgagagaggagaccacaatagaacactggatcgatcgggggatctaggcgacatggagccattgaagggaacaacacccttgatgcagaagatttagcaccactatctccgttccatctgggcttatatgtacttttattttttggtggtgaaattgactgatgattttcctttttcttcgctggactattgtgccaactgccaggctgcctcctgcccttacagccctaagtggctgccttctttccatcaactcccaacttcttcctgtgaagtttaattgtctcaacgcctccccctcccccattccctccatttttctcccaagaaacctgactcaattatttgcatattttgagaaactgctgcagattagttctttttgccagttttccctggaactcctggccttttgtggaggggagggatggagagaataggaatcttcactagaagccgtgggaagaattggaagttacatgctgtatatgcaatgtccagcagtctgataaactgacgattcttaatcaagatttttttcctgatggggaagggacttttattttcttttagagaggggaaagtgtgagctcttcccttattcctaatggctatttttgaagcaaagaaggccagcaacattggcacatgccacctggcaaaggacccttgagtaagtgaaggtctcctaaaactgggattaagaaaccttgctctcctcatctccaaggcagggaccatcaagaacctacagactccatctcttctgcaagcctcatgccaaccctgggctattgctgctgccccttaaacacaggctgtccttaacccacctctcctgccctgtgatatgtctgctgagttggcctggccatttccaagaggctgtagaaaggggagaatgtcaaggaagacttttggtagagaaggagcagaaagatgtgtttttgggaagaagaagacctctaggaggagctagtaggaatgtacatgaagcaattagtctgaaactggcttccccactcccccgtttctccttttcctatccttataggcctgtcccttgcctctgccctggattggttggcaaactaaaggacttgatgtacataactcctgtcccttttcccttacaaggtggggattgcccctggctttgcctcttctttgtgcctttggcctggggtgcatctcctcccgcccttccatgtgcctttctttgcctctgcagtctcatttctcataattttgcaaattatattttgttgctttcttacctactattggccctaaatagcagaaagaagagaagtgaccgagagaacctcagattcttcattgaggattggtatagccatgatttcagtcatagcaagcttttgctcaacagcatatgggtgggattttgcaaaaatcctattctgatgaatctcaaagtaaggctggtaagagaagtgagtggtgtgactcttactccttaggtgcccagaatttaccatcatctctgaaggagttacagggaagtggtctccccaattctcccctccctccagtattgccccctctcactttagcatatattaattagcaggttgggctagagaaatcagctgctatgcgggttgattattattattatttctaatccttttccttatttgccttctactccccttaatctaatctaaaagctctgttccatgcaactggagttccttatccctctcttccccttcccttatatattgaggctatggggtaggagaaaagtgcacaacccaccaccccctttactcgtgcattaaaatttcttatttacccttttcccccttcccatttcttcccactttcatctaccttttctggcaaaaaggagccttttgctctctgtgaccctaagagcacactgcacagggaaaattgccccatccagacctggctccactcttgatctctcttgtcctcttctgctcttttcctggtgctcttttttctcggtggggtgtgggtaatagaacagccgtgggcttttggggacctttaacttttttttctctcttttgtttataaaaaacactaaacattcaattccagagaaccaaaaatcccaccttcccaccgaacactactaaggggcttgtgttctgctccataccttttctcttttctttctgtcttgttaatgcttttaaaaacaaatgagttttttatataaataaagtttttaaagtgtgtatgtggggggtctgtgtcatttcttcacttcaagctgttatttcttccctgctttgcatctttgttacttccttatgtatcagtgtcctttccagagcaaccagaaggaggttataccaggatttattttgagctcagccccaactctttatcaagcaacattcttgttaactatatgtgaaacattttttcttctgaagattcttaaaaattgaatgtggctgaagttgaacatgggagcttattgctaatttagagataggaaactgaagcataaagaattaatgacttactttaattactggaattcttctgcaacatttgacaaaactaaccttgaataaggcccactgtaatacgtagctctcttaaatataacacttaggactagaagattagaaactaccaatcccaactacgtaataggaaaatgtaggatcaaaaggcccatgtatataagtactgaccactgggccataatgttgcttctcaggctatatgcagtcctttagtcagaagtcaataggcctatttattaatattttacagaccatattacctggattaccagggactatctttgctgcagagatcaagggttaagatctatgggaagatacttatttttctgaggtccttatgtcctgtcatataattaaagactcaagagaatttatgtgaaatgctttctgtatgcccaaatctttagattaaaattatatagctgctcct

SEQ ID NO: 38085 - DNA, 6026 bp, Artificial Sequence
  derived and/or modified sequence
ctgccagatcagtttgtcaccacccaggctcccttgcctttggctgggtgcaacttccattttaggtgttggatctgagggggaaaaaaaagagagagggagagagagagaaagaagagcaggaaagatcccgaaaggaggaagaggtggcgaaaaatcaactgccctgctggatttgtctttctcagcaccttggcgaagccttgggtttctttcttaaaggactgatttttagaactccacatttgagctctctccttcctgcttcctccttgctgtggtggctgggatgcttcttccatgattttttgaatctagactgggctgttctctgtgttaaaccaatcagttgcgaccttctcttaacaggtggagtcgaccgccagcatcttggcctctgtgaaggaacaagaggcccagtttgagaagctgacccgggcgctggaggaggaacggcgccacgtctcggcgcagctggaacgcgtccgggtctcaccacaagatgccaacccactcatggccaacggcacactcacccgccggcatcagaacggccggtttgtgggcgatgctgaccttgaaagacagaaattttcagatttgaaactcaacggaccccaggatcacagtcaccttctatatagcaccatccccaggatgcaggagccggggcagattgtggagacctacacggaggaggatcctgagggagccatgtctgtagtctctgtggagacctcagatgatgggaccactcggcgcacagagaccacggtcaagaaagtagtgaagactgtgacaacacggacagtacagccagtcgctatgggaccagacgggttgcctgtggatgcttcatcagtttctaacaactatatccagactttgggtcgtgatttccgcaagaatggcaatgggggacctggtccctatgtggggcaagctggcactgctacccttcctaggaacttccactaccctcctgatggttatagtcgccactatgaagatggttatccaggtggcagtgataactatggcagtctgtcccgggtgacccgcattgaggagcggtataggcccagcatggaaggctaccgggcacctagtagacaggatgtgtatgggccccaaccccaggttcgggtaggtgggagcagcgtggatctgcatcgctttcatccagagccttatgggctagaggatgaccagcgtagtatgggctatgatgacctggattatggtatgatgtctgattatggcactgcccgtcggactgggacaccctctgaccctcgtcggcgcctcaggagctatgaagacatgattggtgaggaggtgccatcggatcaatactactgggctcctttggcccagcatgagcgaggaagtttagcaagcttggatagcctgcgcaaaggagggcctccacctcctaattggagacagccagagctgccagaggtgatcgccatgcttggattccgcttggatgctgtcaagtccaatgcagctgcatacctgcaacacttatgctaccgcaatgacaaggtgaagactgacgtgcggaagctcaagggcatcccagtactggtgggattgttagaccatcccaaaaaggaagtgcaccttggagcctgtggagctctcaagaatatctcttttggacgtgaccaggataacaagattgccataaaaaactgtgatggtgtgcctgcccttgtgcgattgcttcgaaaggctcgtgatatggaccttactgaagttattaccggaaccctgtggaatctttcatcccatgactcaatcaaaatggagattgtggaccatgcactgcatgccttgacagatgaagtgatcattcctcattctggttgggagcgggaacctaatgaagactgtaagccacgccacattgagtgggaatcggtgctcaccaacacagctggctgccttaggaatgtaagctcagagaggagtgaagctcgccggaaacttcgggaatgtgatggtttagttgatgccctcattttcattgttcaggctgagattgggcagaaggattcagacagcaagcttgtagagaactgtgtttgccttcttcggaacttatcatatcaagttcaccgggagatcccacaggcagagcgttaccaagaggcagctcccaatgttgccaacaatactgggccacatgctgccagttgctttggggccaagaagggcaaagggaaaaaacctatagaggatccagcaaacgatacagtggatttccctaaaagaacgagtccagctcgaggctatgagctcttatttcagccagaggtggttcggatatacatctcacttcttaaggagagcaagactcctgccatcctagaagcctcagctggagctatccagaacttgtgtgctgggcgctggacgtatggtcgatacatccgctctgctctgcgtcaagagaaggctctttctgccatagctgacctcctgactaatgaacatgaacgggtggtgaaagctgcatctggagcactgagaaacctggctgtggatgctcgcaacaaagaattaattggtaaacatgctattcctaacttggtaaagaatctgccaggaggacagcagaactcctcttggaatttctctgaggacactgtcatctctattttgaacactatcaacgaggttatcgctgagaacttggaggctgccaaaaagcttcgagagacacagggtattgagaagctggtgttgatcaacaaatcagggaaccgctcagaaaaagaagttcgagcagcagcacttgtattacagacaatctggggatataaggaactgcggaagccactggaaaaagaaggatggaagaaatcagactttcaggtgaatctaaacaatgcttcccgaagccagagcagtcattcatatgatgatagtactctccctctcattgaccggaaccaaaaatcagataagaaacctgatcgggaagaaattcagatgagcaatatgggatcaaacacaaaatcactagataacaactattccacaccaaatgagagaggagaccacaatagaacactggatcgatcgggggatctaggcgacatggagccattgaagggaacaacacccttgatgcagaagatttagcaccactatctccgttccatctgggcttatatgtacttttattttttggtggtgaaattgactgatgattttcctttttcttcgctggactattgtgccaactgccaggctgcctcctgcccttacagccctaagtggctgccttctttccatcaactcccaacttcttcctgtgaagtttaattgtctcaacgcctccccctcccccattccctccatttttctcccaagaaacctgactcaattatttgcatattttgagaaactgctgcagattagttctttttgccagttttccctggaactcctggccttttgtggaggggagggatggagagaataggaatcttcactagaagccgtgggaagaattggaagttacatgctgtatatgcaatgtccagcagtctgataaactgacgattcttaatcaagatttttttcctgatggggaagggacttttattttcttttagagaggggaaagtgtgagctcttcccttattcctaatggctatttttgaagcaaagaaggccagcaacattggcacatgccacctggcaaaggacccttgagtaagtgaaggtctcctaaaactgggattaagaaaccttgctctcctcatctccaaggcagggaccatcaagaacctacagactccatctcttctgcaagcctcatgccaaccctgggctattgctgctgccccttaaacacaggctgtccttaacccacctctcctgccctgtgatatgtctgctgagttggcctggccatttccaagaggctgtagaaaggggagaatgtcaaggaagacttttggtagagaaggagcagaaagatgtgtttttgggaagaagaagacctctaggaggagctagtaggaatgtacatgaagcaattagtctgaaactggcttccccactcccccgtttctccttttcctatccttataggcctgtcccttgcctctgccctggattggttggcaaactaaaggacttgatgtacataactcctgtcccttttcccttacaaggtggggattgcccctggctttgcctcttctttgtgcctttggcctggggtgcatctcctcccgcccttccatgtgcctttctttgcctctgcagtctcatttctcataattttgcaaattatattttgttgctttcttacctactattggccctaaatagcagaaagaagagaagtgaccgagagaacctcagattcttcattgaggattggtatagccatgatttcagtcatagcaagcttttgctcaacagcatatgggtgggattttgcaaaaatcctattctgatgaatctcaaagtaaggctggtaagagaagtgagtggtgtgactcttactccttaggtgcccagaatttaccatcatctctgaaggagttacagggaagtggtctccccaattctcccctccctccagtattgccccctctcactttagcatatattaattagcaggttgggctagagaaatcagctgctatgcgggttgattattattattatttctaatccttttccttatttgccttctactccccttaatctaatctaaaagctctgttccatgcaactggagttccttatccctctcttccccttcccttatatattgaggctatggggtaggagaaaagtgcacaacccaccaccccctttactcgtgcattaaaatttcttatttacccttttcccccttcccatttcttcccactttcatctaccttttctggcaaaaaggagccttttgctctctgtgaccctaagagcacactgcacagggaaaattgccccatccagacctggctccactcttgatctctcttgtcctcttctgctcttttcctggtgctcttttttctcggtggggtgtgggtaatagaacagccgtgggcttttggggacctttaacttttttttctctcttttgtttataaaaaacactaaacattcaattccagagaaccaaaaatcccaccttcccaccgaacactactaaggggcttgtgttctgctccataccttttctcttttctttctgtcttgttaatgcttttaaaaacaaatgagttttttatataaataaagtttttaaagtgtgtatgtggggggtctgtgtcatttcttcacttcaagctgttatttcttccctgctttgcatctttgttacttccttatgtatcagtgtcctttccagagcaaccagaaggaggttataccaggatttattttgagctcagccccaactctttatcaagcaacattcttgttaactatatgtgaaacattttttcttctgaagattcttaaaaattgaatgtggctgaagttgaacatgggagcttattgctaatttagagataggaaactgaagcataaagaattaatgacttactttaattactggaattcttctgcaacatttgacaaaactaaccttgaataaggcccactgtaatacgtagctctcttaaatataacacttaggactagaagattagaaactaccaatcccaactacgtaataggaaaatgtaggatcaaaaggcccatgtatataagtactgaccactgggccataatgttgcttctcaggctatatgcagtcctttagtcagaagtcaataggcctatttattaatattttacagaccatattacctggattaccagggactatctttgctgcagagatcaagggttaagatctatgggaagatacttatttttctgaggtccttatgtcctgtcatataattaaagactcaagagaatttatgtgaaatgctttctgtatgcccaaatctttagattaaaattatatagctgctcct

SEQ ID NO: 38086 - DNA, 6024 bp, Artificial Sequence
  derived and/or modified sequence
cagatcagtttgtcaccacccaggctcccttgcctttggctgggtgcaacttccattttaggtgttggatctgagggggaaaaaaaagagagagggagagagagagaaagaagagcaggaaagatcccgaaaggaggaagaggtggcgaaaaatcaactgccctgctggatttgtctttctcagcaccttggcgaagccttgggtttctttcttaaaggactgatttttagaactccacatttgagctctctccttcctgcttcctccttgctgtggtggctgggatgcttcttccatgattttttgaatctagactgggctgttctctgtgttaaaccaatcagttgcgaccttctcttaacagaggtggagtcgaccgccagcatcttggcctctgtgaaggaacaagaggcccagtttgagaagctgacccgggcgctggaggaggaacggcgccacgtctcggcgcagctggaacgcgtccgggtctcaccacaagatgccaacccactcatggccaacggcacactcacccgccggcatcagaacggccggtttgtgggcgatgctgaccttgaaagacagaaattttcagatttgaaactcaacggaccccaggatcacagtcaccttctatatagcaccatccccaggatgcaggagccggggcagattgtggagacctacacggaggaggatcctgagggagccatgtctgtagtctctgtggagacctcagatgatgggaccactcggcgcacagagaccacggtcaagaaagtagtgaagactgtgacaacacggacagtacagccagtcgctatgggaccagacgggttgcctgtggatgcttcatcagtttctaacaactatatccagactttgggtcgtgatttccgcaagaatggcaatgggggacctggtccctatgtggggcaagctggcactgctacccttcctaggaacttccactaccctcctgatggttatagtcgccactatgaagatggttatccaggtggcagtgataactatggcagtctgtcccgggtgacccgcattgaggagcggtataggcccagcatggaaggctaccgggcacctagtagacaggatgtgtatgggccccaaccccaggttcgggtaggtgggagcagcgtggatctgcatcgctttcatccagagccttatgggctagaggatgaccagcgtagtatgggctatgatgacctggattatggtatgatgtctgattatggcactgcccgtcggactgggacaccctctgaccctcgtcggcgcctcaggagctatgaagacatgattggtgaggaggtgccatcggatcaatactactgggctcctttggcccagcatgagcgaggaagtttagcaagcttggatagcctgcgcaaaggagggcctccacctcctaattggagacagccagagctgccagaggtgatcgccatgcttggattccgcttggatgctgtcaagtccaatgcagctgcatacctgcaacacttatgctaccgcaatgacaaggtgaagactgacgtgcggaagctcaagggcatcccagtactggtgggattgttagaccatcccaaaaaggaagtgcaccttggagcctgtggagctctcaagaatatctcttttggacgtgaccaggataacaagattgccataaaaaactgtgatggtgtgcctgcccttgtgcgattgcttcgaaaggctcgtgatatggaccttactgaagttattaccggaaccctgtggaatctttcatcccatgactcaatcaaaatggagattgtggaccatgcactgcatgccttgacagatgaagtgatcattcctcattctggttgggagcgggaacctaatgaagactgtaagccacgccacattgagtgggaatcggtgctcaccaacacagctggctgccttaggaatgtaagctcagagaggagtgaagctcgccggaaacttcgggaatgtgatggtttagttgatgccctcattttcattgttcaggctgagattgggcagaaggattcagacagcaagcttgtagagaactgtgtttgccttcttcggaacttatcatatcaagttcaccgggagatcccacaggcagagcgttaccaagaggcagctcccaatgttgccaacaatactgggccacatgctgccagttgctttggggccaagaagggcaaagggaaaaaacctatagaggatccagcaaacgatacagtggatttccctaaaagaacgagtccagctcgaggctatgagctcttatttcagccagaggtggttcggatatacatctcacttcttaaggagagcaagactcctgccatcctagaagcctcagctggagctatccagaacttgtgtgctgggcgctggacgtatggtcgatacatccgctctgctctgcgtcaagagaaggctctttctgccatagctgacctcctgactaatgaacatgaacgggtggtgaaagctgcatctggagcactgagaaacctggctgtggatgctcgcaacaaagaattaattggtaaacatgctattcctaacttggtaaagaatctgccaggaggacagcagaactcctcttggaatttctctgaggacactgtcatctctattttgaacactatcaacgaggttatcgctgagaacttggaggctgccaaaaagcttcgagagacacagggtattgagaagctggtgttgatcaacaaatcagggaaccgctcagaaaaagaagttcgagcagcagcacttgtattacagacaatctggggatataaggaactgcggaagccactggaaaaagaaggatggaagaaatcagactttcaggtgaatctaaacaatgcttcccgaagccagagcagtcattcatatgatgatagtactctccctctcattgaccggaaccaaaaatcagataagaaacctgatcgggaagaaattcagatgagcaatatgggatcaaacacaaaatcactagataacaactattccacaccaaatgagagaggagaccacaatagaacactggatcgatcgggggatctaggcgacatggagccattgaagggaacaacacccttgatgcagaagatttagcaccactatctccgttccatctgggcttatatgtacttttattttttggtggtgaaattgactgatgattttcctttttcttcgctggactattgtgccaactgccaggctgcctcctgcccttacagccctaagtggctgccttctttccatcaactcccaacttcttcctgtgaagtttaattgtctcaacgcctccccctcccccattccctccatttttctcccaagaaacctgactcaattatttgcatattttgagaaactgctgcagattagttctttttgccagttttccctggaactcctggccttttgtggaggggagggatggagagaataggaatcttcactagaagccgtgggaagaattggaagttacatgctgtatatgcaatgtccagcagtctgataaactgacgattcttaatcaagatttttttcctgatggggaagggacttttattttcttttagagaggggaaagtgtgagctcttcccttattcctaatggctatttttgaagcaaagaaggccagcaacattggcacatgccacctggcaaaggacccttgagtaagtgaaggtctcctaaaactgggattaagaaaccttgctctcctcatctccaaggcagggaccatcaagaacctacagactccatctcttctgcaagcctcatgccaaccctgggctattgctgctgccccttaaacacaggctgtccttaacccacctctcctgccctgtgatatgtctgctgagttggcctggccatttccaagaggctgtagaaaggggagaatgtcaaggaagacttttggtagagaaggagcagaaagatgtgtttttgggaagaagaagacctctaggaggagctagtaggaatgtacatgaagcaattagtctgaaactggcttccccactcccccgtttctccttttcctatccttataggcctgtcccttgcctctgccctggattggttggcaaactaaaggacttgatgtacataactcctgtcccttttcccttacaaggtggggattgcccctggctttgcctcttctttgtgcctttggcctggggtgcatctcctcccgcccttccatgtgcctttctttgcctctgcagtctcatttctcataattttgcaaattatattttgttgctttcttacctactattggccctaaatagcagaaagaagagaagtgaccgagagaacctcagattcttcattgaggattggtatagccatgatttcagtcatagcaagcttttgctcaacagcatatgggtgggattttgcaaaaatcctattctgatgaatctcaaagtaaggctggtaagagaagtgagtggtgtgactcttactccttaggtgcccagaatttaccatcatctctgaaggagttacagggaagtggtctccccaattctcccctccctccagtattgccccctctcactttagcatatattaattagcaggttgggctagagaaatcagctgctatgcgggttgattattattattatttctaatccttttccttatttgccttctactccccttaatctaatctaaaagctctgttccatgcaactggagttccttatccctctcttccccttcccttatatattgaggctatggggtaggagaaaagtgcacaacccaccaccccctttactcgtgcattaaaatttcttatttacccttttcccccttcccatttcttcccactttcatctaccttttctggcaaaaaggagccttttgctctctgtgaccctaagagcacactgcacagggaaaattgccccatccagacctggctccactcttgatctctcttgtcctcttctgctcttttcctggtgctcttttttctcggtggggtgtgggtaatagaacagccgtgggcttttggggacctttaacttttttttctctcttttgtttataaaaaacactaaacattcaattccagagaaccaaaaatcccaccttcccaccgaacactactaaggggcttgtgttctgctccataccttttctcttttctttctgtcttgttaatgcttttaaaaacaaatgagttttttatataaataaagtttttaaagtgtgtatgtggggggtctgtgtcatttcttcacttcaagctgttatttcttccctgctttgcatctttgttacttccttatgtatcagtgtcctttccagagcaaccagaaggaggttataccaggatttattttgagctcagccccaactctttatcaagcaacattcttgttaactatatgtgaaacattttttcttctgaagattcttaaaaattgaatgtggctgaagttgaacatgggagcttattgctaatttagagataggaaactgaagcataaagaattaatgacttactttaattactggaattcttctgcaacatttgacaaaactaaccttgaataaggcccactgtaatacgtagctctcttaaatataacacttaggactagaagattagaaactaccaatcccaactacgtaataggaaaatgtaggatcaaaaggcccatgtatataagtactgaccactgggccataatgttgcttctcaggctatatgcagtcctttagtcagaagtcaataggcctatttattaatattttacagaccatattacctggattaccagggactatctttgctgcagagatcaagggttaagatctatgggaagatacttatttttctgaggtccttatgtcctgtcatataattaaagactcaagagaatttatgtgaaatgctttctgtatgcccaaatctttagattaaaattatatagctgctcct

SEQ ID NO: 38087 - DNA, 2802 bp, Artificial Sequence
  derived and/or modified sequence
atggacgacagcgaggtggagagcaccgccagcatcctggccagcgtgaaggagcaggaggcccagttcgagaagctgaccagagccctggaggaggagagaagacacgtgagcgcccagctggagagagtgagagtgagcccccaggacgccaaccccctgatggccaacggcaccctgaccagaagacaccagaacggcagattcgtgggcgacgccgacctggagagacagaagttcagcgacctgaagctgaacggcccccaggaccacagccacctgctgtacagcaccatccccagaatgcaggagcccggccagatcgtggagacctacaccgaggaggaccccgagggcgccatgagcgtggtgagcgtggagaccagcgacgacggcaccaccagaagaaccgagaccaccgtgaagaaggtggtgaagaccgtgaccaccagaaccgtgcagcccgtggccatgggccccgacggcctgcccgtggacgccagcagcgtgagcaacaactacatccagaccctgggcagagacttcagaaagaacggcaacggcggccccggcccctacgtgggccaggccggcaccgccaccctgcccagaaacttccactacccccccgacggctacagcagacactacgaggacggctaccccggcggcagcgacaactacggcagcctgagcagagtgaccagaatcgaggagagatacagacccagcatggagggctacagagcccccagcagacaggacgtgtacggcccccagccccaggtgagagtgggcggcagcagcgtggacctgcacagattccaccccgagccctacggcctggaggacgaccagagaagcatgggctacgacgacctggactacggcatgatgagcgactacggcaccgccagaagaaccggcacccccagcgaccccagaagaagactgagaagctacgaggacatgatcggcgaggaggtgcccagcgaccagtactactgggcccccctggcccagcacgagagaggcagcctggccagcctggacagcctgagaaagggcggcccccccccccccaactggagacagcccgagctgcccgaggtgatcgccatgctgggcttcagactggacgccgtgaagagcaacgccgccgcctacctgcagcacctgtgctacagaaacgacaaggtgaagaccgacgtgagaaagctgaagggcatccccgtgctggtgggcctgctggaccaccccaagaaggaggtgcacctgggcgcctgcggcgccctgaagaacatcagcttcggcagagaccaggacaacaagatcgccatcaagaactgcgacggcgtgcccgccctggtgagactgctgagaaaggccagagacatggacctgaccgaggtgatcaccggcaccctgtggaacctgagcagccacgacagcatcaagatggagatcgtggaccacgccctgcacgccctgaccgacgaggtgatcatcccccacagcggctgggagagagagcccaacgaggactgcaagcccagacacatcgagtgggagagcgtgctgaccaacaccgccggctgcctgagaaacgtgagcagcgagagaagcgaggccagaagaaagctgagagagtgcgacggcctggtggacgccctgatcttcatcgtgcaggccgagatcggccagaaggacagcgacagcaagctggtggagaactgcgtgtgcctgctgagaaacctgagctaccaggtgcacagagagatcccccaggccgagagataccaggaggccgcccccaacgtggccaacaacaccggcccccacgccgccagctgcttcggcgccaagaagggcaagggcaagaagcccatcgaggaccccgccaacgacaccgtggacttccccaagagaaccagccccgccagaggctacgagctgctgttccagcccgaggtggtgagaatctacatcagcctgctgaaggagagcaagacccccgccatcctggaggccagcgccggcgccatccagaacctgtgcgccggcagatggacctacggcagatacatcagaagcgccctgagacaggagaaggccctgagcgccatcgccgacctgctgaccaacgagcacgagagagtggtgaaggccgccagcggcgccctgagaaacctggccgtggacgccagaaacaaggagctgatcggcaagcacgccatccccaacctggtgaagaacctgcccggcggccagcagaacagcagctggaacttcagcgaggacaccgtgatcagcatcctgaacaccatcaacgaggtgatcgccgagaacctggaggccgccaagaagctgagagagacccagggcatcgagaagctggtgctgatcaacaagagcggcaacagaagcgagaaggaggtgagagccgccgccctggtgctgcagaccatctggggctacaaggagctgagaaagcccctggagaaggagggctggaagaagagcgacttccaggtgaacctgaacaacgccagcagaagccagagcagccacagctacgacgacagcaccctgcccctgatcgacagaaaccagaagagcgacaagaagcccgacagagaggagatccagatgagcaacatgggcagcaacaccaagagcctggacaacaactacagcacccccaacgagagaggcgaccacaacagaaccctggacagaagcggcgacctgggcgacatggagcccctgaagggcaccacccccctgatgcagaagatctag

SEQ ID NO: 38088 - DNA, 2640 bp, Artificial Sequence
  derived and/or modified sequence
atggccaacggcaccctgaccagaagacaccagaacggcagattcgtgggcgacgccgacctggagagacagaagttcagcgacctgaagctgaacggcccccaggaccacagccacctgctgtacagcaccatccccagaatgcaggagcccggccagatcgtggagacctacaccgaggaggaccccgagggcgccatgagcgtggtgagcgtggagaccagcgacgacggcaccaccagaagaaccgagaccaccgtgaagaaggtggtgaagaccgtgaccaccagaaccgtgcagcccgtggccatgggccccgacggcctgcccgtggacgccagcagcgtgagcaacaactacatccagaccctgggcagagacttcagaaagaacggcaacggcggccccggcccctacgtgggccaggccggcaccgccaccctgcccagaaacttccactacccccccgacggctacagcagacactacgaggacggctaccccggcggcagcgacaactacggcagcctgagcagagtgaccagaatcgaggagagatacagacccagcatggagggctacagagcccccagcagacaggacgtgtacggcccccagccccaggtgagagtgggcggcagcagcgtggacctgcacagattccaccccgagccctacggcctggaggacgaccagagaagcatgggctacgacgacctggactacggcatgatgagcgactacggcaccgccagaagaaccggcacccccagcgaccccagaagaagactgagaagctacgaggacatgatcggcgaggaggtgcccagcgaccagtactactgggcccccctggcccagcacgagagaggcagcctggccagcctggacagcctgagaaagggcggcccccccccccccaactggagacagcccgagctgcccgaggtgatcgccatgctgggcttcagactggacgccgtgaagagcaacgccgccgcctacctgcagcacctgtgctacagaaacgacaaggtgaagaccgacgtgagaaagctgaagggcatccccgtgctggtgggcctgctggaccaccccaagaaggaggtgcacctgggcgcctgcggcgccctgaagaacatcagcttcggcagagaccaggacaacaagatcgccatcaagaactgcgacggcgtgcccgccctggtgagactgctgagaaaggccagagacatggacctgaccgaggtgatcaccggcaccctgtggaacctgagcagccacgacagcatcaagatggagatcgtggaccacgccctgcacgccctgaccgacgaggtgatcatcccccacagcggctgggagagagagcccaacgaggactgcaagcccagacacatcgagtgggagagcgtgctgaccaacaccgccggctgcctgagaaacgtgagcagcgagagaagcgaggccagaagaaagctgagagagtgcgacggcctggtggacgccctgatcttcatcgtgcaggccgagatcggccagaaggacagcgacagcaagctggtggagaactgcgtgtgcctgctgagaaacctgagctaccaggtgcacagagagatcccccaggccgagagataccaggaggccgcccccaacgtggccaacaacaccggcccccacgccgccagctgcttcggcgccaagaagggcaagggcaagaagcccatcgaggaccccgccaacgacaccgtggacttccccaagagaaccagccccgccagaggctacgagctgctgttccagcccgaggtggtgagaatctacatcagcctgctgaaggagagcaagacccccgccatcctggaggccagcgccggcgccatccagaacctgtgcgccggcagatggacctacggcagatacatcagaagcgccctgagacaggagaaggccctgagcgccatcgccgacctgctgaccaacgagcacgagagagtggtgaaggccgccagcggcgccctgagaaacctggccgtggacgccagaaacaaggagctgatcggcaagcacgccatccccaacctggtgaagaacctgcccggcggccagcagaacagcagctggaacttcagcgaggacaccgtgatcagcatcctgaacaccatcaacgaggtgatcgccgagaacctggaggccgccaagaagctgagagagacccagggcatcgagaagctggtgctgatcaacaagagcggcaacagaagcgagaaggaggtgagagccgccgccctggtgctgcagaccatctggggctacaaggagctgagaaagcccctggagaaggagggctggaagaagagcgacttccaggtgaacctgaacaacgccagcagaagccagagcagccacagctacgacgacagcaccctgcccctgatcgacagaaaccagaagagcgacaagaagcccgacagagaggagatccagatgagcaacatgggcagcaacaccaagagcctggacaacaactacagcacccccaacgagagaggcgaccacaacagaaccctggacagaagcggcgacctgggcgacatggagcccctgaagggcaccacccccctgatgcagaagatctag

SEQ ID NO: 38089 - DNA, 2604 bp, Artificial Sequence
  derived and/or modified sequence
atgcaggagccgggtcaaatcgtggagacctacacagaggaggacccggagggcgcaatgtctgtcgtgtccgtggagacttccgacgacggcactacacggcgcacagaaacaactgttaagaaggtggttaagactgtgaccactcgaacagtgcagcccgtggcgatggggccagatgggctccccgtggacgcctcaagcgtgtctaacaactatattcagacgctcggacgggacttcaggaagaatggtaacggggggcctggcccatacgtggggcaagctggtaccgcgacactgccgcggaattttcactatccccccgatggctacagtcgccactatgaggacgggtaccctggcggctctgataactacggtagcctgtcccgtgtaacccgaattgaggaaagatatcgcccatccatggagggatatcgggccccatctaggcaggatgtgtatggcccccaaccccaagtgagggtggggggcagcagcgtcgacctccaccgatttcacccagaaccatacggattagaggacgaccaacgaagcatggggtacgacgatcttgactatggaatgatgtccgactacggcacagcgcgtcgtaccgggacacctagcgaccctagaaggagattgaggtcctacgaagacatgatcggcgaggaagtaccttccgaccagtactattgggcccccttggcacagcacgaaagaggctccctcgcctctctcgactctttgcggaaaggaggaccacccccccctaactggagacagcccgaattgccagaggtaatcgcaatgctgggttttcggcttgatgcagtgaagtcaaatgccgctgcctacctgcagcacctgtgttaccgcaatgacaaagtgaaaaccgacgttcgtaagttaaagggcataccagtcctggtcggccttctagatcatcctaagaaggaagtccatttaggggcctgcggggcactcaaaaatatatcctttggcagagaccaggacaacaaaatagctattaagaactgcgatggcgtgcccgcgttggttcggctgctgcgtaaggcgagggacatggatctgactgaagtgattaccgggacgctctggaatctgtcatctcatgattcgataaaaatggaaattgtggaccatgccttacacgccctgactgacgaagtcataattcctcatagtggctgggaaagagagcctaatgaggattgcaaaccgcggcatatagaatgggagagcgttcttacgaacaccgccgggtgcctgcggaatgtgtcctctgagcgctctgaggctaggcgaaagctaagagaatgcgacggcctggtcgacgctttgatctttatcgtgcaggccgaaataggacaaaaggactcagactccaagcttgtggagaactgtgtatgcctgttgcgcaatttgtcctaccaagtgcatcgggagatcccccaggccgagaggtatcaggaagcagcgccgaacgttgcaaacaatacgggtcctcacgcagcttcttgcttcggtgctaagaaaggaaaggacgaatggttctcgagggggaaaaagcccattgaggaccccgcaaacgacactgtcgactttcctaagagaactagccccgccaggggctatgagttgttgttccaacccgaggtggttagaatatacatcagcctcctgaaagaatccaagacgcctgccatattggaggcctctgcaggcgcgattcagaacttgtgcgccggccggtggacatatggtaggtatatccgcagtgcactgcgacaagaaaaagcactgtcagccattgcagacctgttaaccaacgaacatgaaagggttgtaaaggccgcaagcggggctctccgcaatctggctgtggacgcccgcaacaaagaactaatcggaaagcatgccattccaaaccttgttaaaaatttgcccggagggcagcaaaactcaagctggaattttagtgaggacacggttatcagtattctaaacacaattaatgaggttatcgcggaaaacctggaggctgccaagaagcttagggagacacagggcatcgagaaacttgtgctcatcaataagtcaggtaaccgatctgaaaaagaagtaagggccgctgcgcttgtgcttcagaccatttggggttacaaagagttaaggaagcccttggagaaagagggttggaaaaagagcgacttccaggttaatctgaacaacgcctcacgatcccagagctcgcattcttatgacgactctacattgcccctaatcgatcgcaaccaaaagtctgacaaaaagcctgatcgggaagagattcagatgagtaacatggggtccaatacaaaatcattagacaacaattacagtaccccgaacgagcgcggtgaccataaccgcacacttgataggagtggggacctgggcgatatggagcccctgaaaggcaccaccccactcatgcaagatgaggggcaagaatccctagaggaggaacttgatgtcctggtgcttgacgacgaaggaggacaggtgtcctatccgagcatgcaaaaaatttag

SEQ ID NO: 38090 - DNA, 1938 bp, Artificial Sequence
  derived and/or modified sequence
atgatcggggaagaagttccatccgatcagtactactgggcacctcttgctcagcacgagagggggtcactcgcgagtttggatagtctcagaaaagggggtccccccccgcctaactggcggcagcccgagctgccagaggtgatcgccatgctcgggttcaggctcgacgcagtgaagtcaaacgctgcagcctaccttcagcatctatgttataggaacgacaaggtgaaaaccgacgtacggaagctgaaaggcattcccgttctagtcgggctgctcgatcatccaaagaaggaggtgcacctcggagcatgcggagcactgaagaatatctctttcgggagggatcaagacaacaaaatcgccatcaagaactgcgacggagtcccagctctggtgagacttctgagaaaggcacgggatatggatttaactgaggtcattactggaacactgtggaacctgagctcccacgatagcattaaaatggaaattgtggatcatgccctgcatgctctcacggatgaagtcattataccacacagcgggtgggaacgcgagcccaatgaggactgcaagccgcgccacatcgaatgggagtccgtgctaactaacaccgcagggtgcctaagaaacgtttctagcgaacggagcgaagctcggcgcaagctgagagagtgcgatggtttggtggatgcactcattttcatcgtgcaagctgagatcggccagaaggactccgacagcaagctggtggagaactgcgtttgccttctccgcaatctgtcttaccaggtccatagggagattccacaggccgaacggtatcaggaggctgcccccaacgtggccaacaatactggaccccatgccgcatcttgctttggagccaagaaaggcaaagacgagtggtttagtagggggaaaaaacctatcgaggatccagctaacgatactgtagattttccaaagaggacatccccagccaggggctacgaacttctgttccagcctgaagtggtaagaatttatatttctcttctgaaggagagcaagacccctgccattctcgaagcaagcgccggcgccatccagaacctatgcgcgggccgatggacctatgggagatacatcaggagcgcgctgcgccaggagaaggcactgtctgccattgctgacctactaaccaacgaacatgagagagtggtaaaggcagcgtcaggcgcgctgaggaacctggctgtggatgccagaaacaaagagctcattggcaagcatgcaatcccaaatctagtcaagaaccttcccggtggacagcagaatagtagttggaatttcagtgaggacactgtaatctccatcctgaacacgatcaacgaggttatagcagaaaacctggaggccgctaaaaaactgagagagacacagggcatcgaaaaactggtcctgatcaataaatccgggaacagatctgagaaagaagtgagagccgcagctctcgtcctgcagaccatctggggctataaggagctgagaaagccgcttgagaaagaaggctggaaaaagtcagacttccaggtaaatctaaacaatgcctctcgttcccaaagctctcactcctatgatgactccacactccctttaatagatagaaatcaaaaaagcgacaagaagcccgaccgcgaagagatacagatgagcaatatgggatctaacaccaagagtctggacaacaattattctacccctaacgaaagaggcgaccataatcggacactcgaccgtagcggggatctaggggacatggagcccctcaagggtaccacgcctctgatgcaagacgagggccaagaatctctcgaggaagaattggatgtgctagtgctcgacgatgaaggcgggcaggtctcatatccaagcatgcagaagatctag

SEQ ID NO: 38091 - DNA, 2604 bp, Artificial Sequence
  derived and/or modified sequence
atgcaggagcccggccagatcgtggagacctacacagaggaggaccctgagggcgccatgtctgtggtgtctgtggagaccagtgatgatggcaccaccaggagaacagagaccaccgtgaagaaggtggtgaagacagtgaccaccaggacagtgcagcctgtggccatgggcccagatggcctgcctgtggatgccagctctgtgagcaacaactacatccagaccctgggccgggacttcaggaagaatggaaatggaggccctggcccctacgtgggccaggccggcacagccaccctgcccaggaacttccactaccccccagatggctacagccgccactatgaagatggctacccaggcggcagtgacaactacggcagcctgagccgggtgacccgcatcgaggagcgctaccggcccagcatggagggctaccgggcccccagccggcaggatgtgtatggcccccagccccaggtgcgggtgggcggcagctctgtggacctgcaccgcttccaccctgagccctacggcctggaggatgaccagaggtccatgggctatgatgacctggactatggcatgatgtctgactatggaacagccaggagaacaggcacccccagcgacccccggcggcggctgcggagctatgaggacatgattggagaggaggtgcccagcgaccagtactactgggcccccctggcccagcacgagcggggcagcctggccagcctggacagcctgaggaagggcggccccccaccacccaactggaggcagcctgagctgcctgaggtgattgccatgctgggcttccggctggatgctgtgaagagcaatgctgctgcctacctgcagcacctgtgctacagaaatgacaaggtgaagacagatgtgaggaagctgaagggcatccctgtgctggtgggcctgctggaccaccccaagaaggaggtgcacctgggcgcctgtggggccctgaagaacatcagctttggccgggaccaggacaacaagatcgccatcaagaactgtgatggagtgcctgccctggtgcggctgctgaggaaggcccgggacatggacctgacagaggtgatcaccggcaccctgtggaacctgagcagccatgacagcatcaagatggagatcgtggaccacgccctgcacgccctgacagatgaggtgatcatcccccacagcggctgggagcgggagcccaatgaagactgcaagcccaggcacatcgagtgggagagcgtgctgaccaacacagctggctgcctgagaaatgtgagcagcgagaggtctgaggcccggaggaagctgagagaatgtgatggcctggtggatgccctgatcttcatcgtgcaggccgagatcggccagaaggacagcgacagcaagctggtggagaactgtgtgtgcctgctgaggaacctgagctaccaggtgcaccgggagatcccccaggccgagcgctaccaggaggccgccccaaatgtggccaacaacacaggcccccacgccgccagctgcttcggggccaagaagggcaaggatgagtggttcagccggggcaagaagcccatcgaggaccctgccaatgacacagtggacttccccaagaggaccagccctgcccggggctatgagctgctcttccagcctgaggtggtgcgcatctacatcagcctgctgaaggagagcaagaccccagccatcctggaggccagcgctggggccatccagaacctgtgtgccggccgctggacctacggccgctacatccgcagcgccctgcggcaggagaaggccctgagcgccatcgctgacctgctgaccaatgagcacgagcgggtggtgaaggccgccagcggggccctgaggaacctggccgtggatgccaggaacaaggagctgattggcaagcacgccatccccaacctggtgaagaacctgcccggcggccagcagaacagctcctggaacttctctgaagatactgtcatcagcatcctgaacaccatcaatgaggtgattgctgagaacctggaggccgccaagaagctgcgggagacccagggcatcgagaagctggtgctgatcaacaagagcggcaacagaagtgagaaggaggtgcgggctgctgccctggtgctgcagaccatctggggctacaaggagctgaggaagcccctggagaaggagggctggaagaagagtgacttccaggtgaacctgaacaatgccagccgcagccagagcagccacagctatgatgacagcaccctgcccctgattgacaggaaccagaagagtgacaagaagccagaccgggaggagatccagatgagcaacatgggcagcaacaccaagagcctggacaacaactacagcaccccaaatgaaagaggagaccacaacagaaccctggacagaagtggggacctgggggacatggagcccctgaagggcaccacccccctgatgcaggatgagggccaggagagcctggaggaggagctggatgtgctggtgctggatgatgagggcggccaggtgtcctaccccagcatgcagaagatctag

SEQ ID NO: 38092 - DNA, 1938 bp, Artificial Sequence
  derived and/or modified sequence
atgattggagaggaggtgcccagcgaccagtactactgggcccccctggcccagcacgagcggggcagcctggccagcctggacagcctgaggaagggcggccccccaccacccaactggaggcagcctgagctgcctgaggtgattgccatgctgggcttccggctggatgctgtgaagagcaatgctgctgcctacctgcagcacctgtgctacagaaatgacaaggtgaagacagatgtgaggaagctgaagggcatccctgtgctggtgggcctgctggaccaccccaagaaggaggtgcacctgggcgcctgtggggccctgaagaacatcagctttggccgggaccaggacaacaagatcgccatcaagaactgtgatggagtgcctgccctggtgcggctgctgaggaaggcccgggacatggacctgacagaggtgatcaccggcaccctgtggaacctgagcagccatgacagcatcaagatggagatcgtggaccacgccctgcacgccctgacagatgaggtgatcatcccccacagcggctgggagcgggagcccaatgaagactgcaagcccaggcacatcgagtgggagagcgtgctgaccaacacagctggctgcctgagaaatgtgagcagcgagaggtctgaggcccggaggaagctgagagaatgtgatggcctggtggatgccctgatcttcatcgtgcaggccgagatcggccagaaggacagcgacagcaagctggtggagaactgtgtgtgcctgctgaggaacctgagctaccaggtgcaccgggagatcccccaggccgagcgctaccaggaggccgccccaaatgtggccaacaacacaggcccccacgccgccagctgcttcggggccaagaagggcaaggatgagtggttcagccggggcaagaagcccatcgaggaccctgccaatgacacagtggacttccccaagaggaccagccctgcccggggctatgagctgctcttccagcctgaggtggtgcgcatctacatcagcctgctgaaggagagcaagaccccagccatcctggaggccagcgctggggccatccagaacctgtgtgccggccgctggacctacggccgctacatccgcagcgccctgcggcaggagaaggccctgagcgccatcgctgacctgctgaccaatgagcacgagcgggtggtgaaggccgccagcggggccctgaggaacctggccgtggatgccaggaacaaggagctgattggcaagcacgccatccccaacctggtgaagaacctgcccggcggccagcagaacagctcctggaacttctctgaagatactgtcatcagcatcctgaacaccatcaatgaggtgattgctgagaacctggaggccgccaagaagctgcgggagacccagggcatcgagaagctggtgctgatcaacaagagcggcaacagaagtgagaaggaggtgcgggctgctgccctggtgctgcagaccatctggggctacaaggagctgaggaagcccctggagaaggagggctggaagaagagtgacttccaggtgaacctgaacaatgccagccgcagccagagcagccacagctatgatgacagcaccctgcccctgattgacaggaaccagaagagtgacaagaagccagaccgggaggagatccagatgagcaacatgggcagcaacaccaagagcctggacaacaactacagcaccccaaatgaaagaggagaccacaacagaaccctggacagaagtggggacctgggggacatggagcccctgaagggcaccacccccctgatgcaggatgagggccaggagagcctggaggaggagctggatgtgctggtgctggatgatgagggcggccaggtgtcctaccccagcatgcagaagatctag

SEQ ID NO: 38093 - DNA, 2604 bp, Artificial Sequence
  derived and/or modified sequence
atgcaggagcccggccagatcgtggagacctacaccgaggaggacccagagggggcaatgtcggtggtttctgttgagacgtcagacgatgggactacgcggagaactgaaaccactgtcaagaaggtcgtaaagaccgtcaccacccgaactgtgcagcctgtagcgatgggtccagacggcctgccggtcgacgccagttccgtctctaataattacatccagacactcggcagagatttcaggaaaaatgggaacggtggacctggaccatatgtggggcaggcgggaaccgccaccctgccaagaaatttccactatccacccgatgggtattctagacactatgaagatggatatccaggtggatccgataattacggctctctgtcaagagtgacgcgtatcgaggagcgttaccgtccctcaatggaaggctatagagcacctagtcgacaggacgtatatgggccacagccacaggttcgggttggaggatcctcagtggacctgcaccggttccacccggaaccatatgggctggaagacgatcaaaggagcatgggctacgatgatctagactacggaatgatgtccgactatggaacagcaagaagaacaggcactccctctgatccacgccggaggttgagatcatacgaggacatgattggggaggaggtgcccagtgaccagtattattgggccccactcgcacaacacgaacgagggtccttagcttccctcgattcactccggaaggggggccccccccctcctaattggcggcagccagaattgcccgaagtgattgccatgctagggtttcgcctggacgcagttaaatccaatgctgccgcctatctccaacatctctgctacagaaacgataaggtgaaaacagatgtgagaaagttaaagggaattcctgtgctggtgggtttgctggatcatccgaaaaaggaagtccacctgggtgcctgtggcgccctgaaaaatatctctttcggacgcgaccaggacaataagattgcaattaagaactgcgacggggtgccagctctggtgagactgctaaggaaggccagagatatggatctcaccgaggtgataaccggaacactgtggaatctgtcctcccacgacagtattaagatggagatagtcgatcacgcactgcacgcgcttactgacgaggtaataataccacacagcggatgggagcgcgagcccaatgaggattgcaaaccgagacatatagagtgggaaagcgtcctgacgaataccgcaggctgccttagaaatgtgagttccgagcggagcgaggcgcgccggaaattacgggagtgcgatgggctggtggatgccctaattttcatcgtgcaggccgagatcggacaaaaagacagtgacagtaagctagtcgagaactgcgtgtgtctgctgcggaacctgtcttaccaagtacaccgcgagatccctcaggcagagagataccaggaggcggcacctaacgtggctaataacactggcccccacgccgcctcttgctttggggctaagaaaggcaaggacgaatggttcagcagaggcaagaaacctattgaggacccggccaacgatacggttgattttccgaagcgaacgtcacctgctcgcggttatgagctgttattccagccagaagttgtgcggatctacatctctctcctcaaagagagcaaaacgccagctatcttagaggcaagcgcaggcgctatccaaaacctgtgcgcggggcggtggacgtacgggaggtatataaggagcgcgctgaggcaagagaaagctttgtctgcgatcgcagatttgttgacgaacgagcatgaaagggtagtgaaggctgcatcaggggcactgcgcaacttagctgtggacgctcgcaataaggaattgattggcaagcacgccataccaaatctggtcaagaacctgcctggaggccagcagaactctagctggaacttcagtgaagacacggtgatcagcatcctcaataccattaacgaggttatagccgagaatctcgaggctgccaaaaagctgagagaaactcaggggatcgagaaattggtgctcatcaacaaatctggtaatagaagtgagaaagaagtgcgcgccgccgccctggtcctacagactatatggggctacaaagagctgagaaagccactggaaaaagaaggctggaagaaatctgatttccaggtgaatctgaacaacgcctctcgaagccagtcaagtcacagctacgacgattctacactgccccttatcgatcgcaaccagaaaagtgataagaaaccagatagggaggaaatacagatgtccaacatgggatctaacaccaagagcctagataacaactacagtacccctaacgaaagaggggatcacaatagaaccctcgacaggagcggtgacctcggggacatggagccgttgaagggaacaacacccttgatgcaagacgagggacaggaatctctcgaggaggaactcgacgtactcgtgcttgatgacgaaggcggccaggtgtcatacccttcaatgcagaaaatctag

SEQ ID NO: 38094 - DNA, 1938 bp, Artificial Sequence
  derived and/or modified sequence
atgatcggcgaggaggtgcccagcgaccagtactactgggcccccttagcgcagcatgagagaggttcactggcatccttagattcactgaggaaaggaggtccccccccccctaattggagacagccagagcttcccgaggtgatcgctatgcttggctttaggttggatgcagtgaagtccaacgctgctgcctatcttcagcacctctgctataggaatgataaggtgaaaaccgacgttaggaaactgaagggaatcccagtcctggtcgggctgctggaccatcccaagaaagaggtgcacttaggcgcttgtggggcactcaagaacatctccttcggcagggaccaggacaataagatagccatcaaaaactgcgacggggtgccagccctcgttcgattactccgtaaggcccgagacatggacctcacagaagtgatcacaggcaccttatggaacctgtcttctcacgactcaatcaaaatggagatcgtggaccatgccctgcatgccctcacagacgaggtaatcatacctcacagtgggtgggagagagagcctaacgaggactgtaagcccaggcatatcgaatgggagtccgtacttacaaataccgccgggtgcttgagaaatgtgtcaagcgaacggtcagaagccaggcgaaaactccgagagtgtgatggcctagtcgatgccctgatttttatagtgcaggccgaaatcgggcagaaggattcggatagcaagctggtggaaaactgcgtgtgcctgttgcgtaacctgtcatatcaagtacatcgtgaaattccacaagccgagcgttatcaagaagcagcacccaatgtggcaaataacactggcccccacgctgcctcttgtttcggtgccaagaaagggaaggatgagtggttcagtcggggaaagaaacctattgaagacccagccaacgacacagtagactttcccaaacggaccagtcctgcacggggatacgaacttctctttcagcccgaagtcgttagaatctacatctccttgttgaaagaaagcaaaacacctgcaattctggaagcgtcagcaggggccatacaaaatctgtgtgccggcaggtggacatatgggaggtacattaggtcagccctcaggcaggaaaaggcactgtccgccatcgccgatctgctcacaaatgagcatgaaagagtcgtgaaggctgctagcggtgcactccgcaacctggctgttgatgctaggaataaggagctgattgggaagcacgcaatcccaaatctggtgaagaatctgcctggcggacagcagaactctagttggaactttagcgaggacaccgtgatttctatactcaacactattaatgaggtgattgccgagaatcttgaggccgctaagaagctgcgggagacccagggcatcgagaagttggttctgattaataagagtggaaatcgaagtgaaaaggaagttcgtgccgctgctctggtcctacagacaatatggggatacaaggagctgagaaagccattggaaaaggagggctggaagaaatctgattttcaggttaatctgaacaacgctagccggagccagagttcacacagctatgatgattccaccttgccactgatcgatagaaatcagaaatcagacaaaaagcctgatcgcgaagagatccaaatgtcaaacatgggatctaacactaaaagcctagataacaactactcaacacccaatgagaggggcgaccacaaccgcaccctcgaccgatccggagacttaggagacatggagccactgaaggggactacaccactaatgcaggacgaaggacaggagagcctagaggaggaactggacgtgctagttctcgatgacgaaggcggccaagtttcctacccatcgatgcagaagatatag

SEQ ID NO: 38095 - DNA, 2604 bp, Artificial Sequence
  derived and/or modified sequence
atgcaggaaccaggacagatagtagaaacgtacacagaggaggaccctgagggagctatgtctgtggttagtgtggaaacatctgatgacgggaccacccgtcggacagaaaccactgtgaaaaaggtggtgaaaactgttaccacaaggaccgttcagccagtggctatgggtcccgacggactgccagtggacgccagtagcgtctccaataactacattcagacattaggccgtgacttccgtaaaaacggaaacggtggccctggaccctacgttggccaggccggaactgcaacactaccccgtaacttccactatcctccagacgggtacagtaggcactatgaggacggataccccggaggatccgacaattatgggagcttaagcagagtgacccggatcgaagagcggtataggccctccatggagggataccgggcacctagcagacaggatgtctacgggcctcagccccaggtccgtgtgggtggatctagcgtcgaccttcatcgatttcatccggagccatacggtctagaggatgatcaacgttcaatgggttacgacgacctggattacgggatgatgtcagactatggaaccgctcggagaaccgggactccgtctgacccaagacggaggctgcgctcttacgaagatatgatcggggaagaagtgccttctgaccaatactactgggcccctcttgcgcagcacgagcgcggtagcctcgcaagcttggattcgctgcggaagggcggaccccctccccctaattggcggcaacccgaacttcccgaggtgatcgctatgcttggctttcgccttgacgccgtgaagtctaacgctgccgcttaccttcagcacctttgttatcgtaacgacaaagtgaagaccgatgtgagaaaattgaaagggattccagtcctcgtcgggcttcttgaccatcccaaaaaggaggtacacttaggggcttgtggtgcactgaagaatatctcctttggtagggatcaggataacaagatcgctattaaaaattgcgacggcgtgcccgctttggtgcgccttctacgaaaagcccgagacatggatttgactgaagtgatcacaggtaccctgtggaatctttcttcgcacgattccatcaagatggagattgtggatcacgccttacatgcccttactgatgaagtcataatcccccatagcggctgggagagagagccaaacgaggattgtaaacccagacatatcgagtgggagagtgtgctgacaaacaccgctgggtgcctgcgcaatgtgagctccgagcggtcagaggccaggaggaaattgcgggaatgcgacggccttgtcgacgccctgatctttatagtgcaagctgaaattggccaaaaagactccgattcaaagctcgtggagaactgcgtgtgtctgctccggaacctctcatatcaggtccatagagagatcccacaggctgaacggtaccaggaggctgcacccaacgtggccaataataccggacctcacgcggcaagctgtttcggggcaaagaagggtaaagatgaatggttcagccggggaaagaagcccatcgaagaccccgctaatgatacagtcgattttcccaagcgcactagccctgcgaggggatacgaactgctttttcagcctgaagtagtaaggatttacatatcactgctgaaagagtctaaaactcccgctattcttgaggcctctgctggggctatccagaatctgtgtgccggacggtggacatacggacgctatatcagaagtgccctgaggcaggaaaaagccctgtcagcaatagcagatctgctgactaatgaacacgagcgggtggtgaaggccgcttctggggctcttaggaacctggccgtggacgctagaaataaggagttaatcgggaagcacgcgatcccgaatctggttaagaatctgcccggaggacagcagaattcttcctggaatttctccgaggacaccgttatctccatcctgaacaccattaacgaggttattgcagagaacctcgaggcagcaaagaaactcagagagacccaggggatcgaaaaactggtgcttatcaacaagtccggcaaccgatcagaaaaagaagtacgcgctgcagctctggttctgcagaccatctgggggtacaaggagctgcggaaacctctggaaaaagagggttggaaaaagagtgactttcaggtgaacctgaacaatgcttctcgatcccaatcctcgcatagttatgacgattccacgctgcctcttattgaccgcaatcagaaaagcgacaagaaacctgaccgggaggaaatccagatgtctaacatggggtcaaataccaagagtctggacaacaactactccacacctaatgaacggggtgaccacaatcggaccctggatagaagcggtgatctgggagatatggaaccgctaaaggggacaacgcctctgatgcaggacgaggggcaggaatccctcgaagaggaattagatgtacttgtactcgatgatgaaggaggccaggtgtcttacccaagcatgcagaaaatctag

SEQ ID NO: 38096 - DNA, 1938 bp, Artificial Sequence
  derived and/or modified sequence
atgataggcgaggaggtgccttcagatcagtattattgggctccccttgctcagcacgagcgcggtagtctggcctcacttgattctctgcgaaaaggaggtccaccccctcccaactggagacaaccggagctgcctgaagtgatcgccatgctggggtttcgcctggacgctgttaaatccaacgctgcagcctatctgcaacacctctgttatcgcaatgacaaagtaaagaccgatgtgaggaagctgaagggcattcccgtccttgttggactcctggaccaccctaagaaagaagttcaccttggagcctgcggggctctaaagaatatatcattcgggagggaccaggataacaagatagctatcaagaactgtgacggggtgcccgctctggtccgcttgctgaggaaggcacgggatatggatctcaccgaagtgatcacaggtaccctctggaacctctcctcacacgattccatcaaaatggaaatcgtcgaccacgccttgcatgcactgaccgatgaagttatcatcccgcattccggctgggaacgagagcctaatgaggattgcaagcctcgtcacatcgaatgggaaagcgtgttgacgaataccgccggatgtttgcgcaacgtctcctctgagaggagcgaagcaaggcggaagctgagggagtgcgatggtcttgttgatgccctgatattcatcgtgcaggcggagatcggtcaaaaggactccgattccaagttggttgagaactgtgtatgtctgctgagaaatcttagctaccaggtgcatcgagaaattcctcaggccgagagataccaggaggccgctcccaatgtcgcgaataatactggccctcacgctgccagctgtttcggagctaaaaaaggaaaggacgaatggttctcgcgcggaaaaaagccaatcgaggaccctgcaaacgatacagttgatttccctaagagaacgtccccagcaaggggctacgagctcctgtttcaaccggaggtcgtcagaatctatatctcgttacttaaagaatccaaaactcctgccatcctggaagcgtccgccggagcgatccagaacctgtgcgccggtaggtggacatatggcagatacatacgttccgccctgcgccaggaaaaagctctcagcgccatcgcagacctcctaacaaacgagcatgaaagggtggttaaggccgcaagcggggcattgaggaatctcgccgtggacgctcgtaataaagagctgattggaaaacatgcgattccaaacttagtcaaaaatctcccgggtggacagcagaattcatcctggaatttctcagaagacaccgtaataagcatcctgaacactatcaacgaagtgatcgccgagaatcttgaagccgcaaaaaaattacgggagacccaaggcatagaaaagctggtgttgatcaacaagtctggtaatcgctctgagaaagaggtgcgagccgctgctctggtgcttcagactatttggggatacaaagagctgcgaaaaccactcgagaaggagggctggaagaagagtgacttccaggttaacctgaataacgcatcaagatcccagtctagccactcatacgacgatagcaccctccctttaatcgataggaatcagaagtcagacaagaaacccgacagagaggagatccagatgagtaacatgggctcaaatacaaagtccctagacaataattatagcacacctaatgaacgaggcgatcacaatcgaaccctggacagaagtggcgaccttggcgatatggagccgctcaagggtacgaccccactcatgcaggacgaggggcaggagtctcttgaggaggagttggacgtcctggtgctggacgatgaagggggtcaagttagctacccatccatgcagaagatatag

SEQ ID NO: 38097 - DNA, 5071 bp, Artificial Sequence
  derived and/or modified sequence
ctgccagatcagtttgtcaccacccaggctcccttgcctttggctgggtgcaacttccattttaggtgttggatctgagggggaaaaaaaagagagagggagagagagagaaagaagagcaggaaagatcccgaaaggaggaagaggtggcgaaaaatcaactgccctgctggatttgtctttctcagcaccttggcgaagccttgggtttctttcttaaaggactgatttttagaactccacatttgaggagctatgaagacatgattggtgaggaggtgccatcggatcaatactactgggctcctttggcccagcatgagcgaggaagtttagcaagcttggatagcctgcgcaaaggagggcctccacctcctaattggagacagccagagctgccagaggtgatcgccatgcttggattccgcttggatgctgtcaagtccaatgcagctgcatacctgcaacacttatgctaccgcaatgacaaggtgaagactgacgtgcggaagctcaagggcatcccagtactggtgggattgttagaccatcccaaaaaggaagtgcaccttggagcctgtggagctctcaagaatatctcttttggacgtgaccaggataacaagattgccataaaaaactgtgatggtgtgcctgcccttgtgcgattgcttcgaaaggctcgtgatatggaccttactgaagttattaccggaaccctgtggaatctttcatcccatgactcaatcaaaatggagattgtggaccatgcactgcatgccttgacagatgaagtgatcattcctcattctggttgggagcgggaacctaatgaagactgtaagccacgccacattgagtgggaatcggtgctcaccaacacagctggctgccttaggaatgtaagctcagagaggagtgaagctcgccggaaacttcgggaatgtgatggtttagttgatgccctcattttcattgttcaggctgagattgggcagaaggattcagacagcaagcttgtagagaactgtgtttgccttcttcggaacttatcatatcaagttcaccgggagatcccacaggcagagcgttaccaagaggcagctcccaatgttgccaacaatactgggccacatgctgccagttgctttggggccaagaagggcaaagatgagtggttctccagagggaaaaaacctatagaggatccagcaaacgatacagtggatttccctaaaagaacgagtccagctcgaggctatgagctcttatttcagccagaggtggttcggatatacatctcacttcttaaggagagcaagactcctgccatcctagaagcctcagctggagctatccagaacttgtgtgctgggcgctggacgtatggtcgatacatccgctctgctctgcgtcaagagaaggctctttctgccatagctgacctcctgactaatgaacatgaacgggtggtgaaagctgcatctggagcactgagaaacctggctgtggatgctcgcaacaaagaattaattggtaaacatgctattcctaacttggtaaagaatctgccaggaggacagcagaactcctcttggaatttctctgaggacactgtcatctctattttgaacactatcaacgaggttatcgctgagaacttggaggctgccaaaaagcttcgagagacacagggtattgagaagctggtgttgatcaacaaatcagggaaccgctcagaaaaagaagttcgagcagcagcacttgtattacagacaatctggggatataaggaactgcggaagccactggaaaaagaaggatggaagaaatcagactttcaggtgaatctaaacaatgcttcccgaagccagagcagtcattcatatgatgatagtactctccctctcattgaccggaaccaaaaatcagataagaaacctgatcgggaagaaattcagatgagcaatatgggatcaaacacaaaatcactagataacaactattccacaccaaatgagagaggagaccacaatagaacactggatcgatcgggggatctaggcgacatggagccattgaagggaacaacacccttgatgcaggacgaggggcaggaatctctggaggaagagttggatgtgttggttttggatgatgaggggggccaagtgtcttacccctccatgcagaagatttagcaccactatctccgttccatctgggcttatatgtacttttattttttggtggtgaaattgactgatgattttcctttttcttcgctggactattgtgccaactgccaggctgcctcctgcccttacagccctaagtggctgccttctttccatcaactcccaacttcttcctgtgaagtttaattgtctcaacgcctccccctcccccattccctccatttttctcccaagaaacctgactcaattatttgcatattttgagaaactgctgcagattagttctttttgccagttttccctggaactcctggccttttgtggaggggagggatggagagaataggaatcttcactagaagccgtgggaagaattggaagttacatgctgtatatgcaatgtccagcagtctgataaactgacgattcttaatcaagatttttttcctgatggggaagggacttttattttcttttagagaggggaaagtgtgagctcttcccttattcctaatggctatttttgaagcaaagaaggccagcaacattggcacatgccacctggcaaaggacccttgagtaagtgaaggtctcctaaaactgggattaagaaaccttgctctcctcatctccaaggcagggaccatcaagaacctacagactccatctcttctgcaagcctcatgccaaccctgggctattgctgctgccccttaaacacaggctgtccttaacccacctctcctgccctgtgatatgtctgctgagttggcctggccatttccaagaggctgtagaaaggggagaatgtcaaggaagacttttggtagagaaggagcagaaagatgtgtttttgggaagaagaagacctctaggaggagctagtaggaatgtacatgaagcaattagtctgaaactggcttccccactcccccgtttctccttttcctatccttataggcctgtcccttgcctctgccctggattggttggcaaactaaaggacttgatgtacataactcctgtcccttttcccttacaaggtggggattgcccctggctttgcctcttctttgtgcctttggcctggggtgcatctcctcccgcccttccatgtgcctttctttgcctctgcagtctcatttctcataattttgcaaattatattttgttgctttcttacctactattggccctaaatagcagaaagaagagaagtgaccgagagaacctcagattcttcattgaggattggtatagccatgatttcagtcatagcaagcttttgctcaacagcatatgggtgggattttgcaaaaatcctattctgatgaatctcaaagtaaggctggtaagagaagtgagtggtgtgactcttactccttaggtgcccagaatttaccatcatctctgaaggagttacagggaagtggtctccccaattctcccctccctccagtattgccccctctcactttagcatatattaattagcaggttgggctagagaaatcagctgctatgcgggttgattattattattatttctaatccttttccttatttgccttctactccccttaatctaatctaaaagctctgttccatgcaactggagttccttatccctctcttccccttcccttatatattgaggctatggggtaggagaaaagtgcacaacccaccaccccctttactcgtgcattaaaatttcttatttacccttttcccccttcccatttcttcccactttcatctaccttttctggcaaaaaggagccttttgctctctgtgaccctaagagcacactgcacagggaaaattgccccatccagacctggctccactcttgatctctcttgtcctcttctgctcttttcctggtgctcttttttctcggtggggtgtgggtaatagaacagccgtgggcttttggggacctttaacttttttttctctcttttgtttataaaaaacactaaacattcaattccagagaaccaaaaatcccaccttcccaccgaacactactaaggggcttgtgttctgctccataccttttctcttttctttctgtcttgttaatgcttttaaaaacaaatgagttttttatataaataaagtttttaaagtgtgtatgtggggggtctgtgtcatttcttcacttcaagctgttatttcttccctgctttgcatctttgttacttccttatgtatcagtgtcctttccagagcaaccagaaggaggttataccaggatttattttgagctcagccccaactctttatcaagcaacattcttgttaactatatgtgaaacattttttcttctgaagattcttaaaaattgaatgtggctgaagttgaacatgggagcttattgctaatttagagataggaaactgaagcataaagaattaatgacttactttaattactggaattcttctgcaacatttgacaaaactaaccttgaataaggcccactgtaatacgtagctctcttaaatataacacttaggactagaagattagaaactaccaatcccaactacgtaataggaaaatgtaggatcaaaaggcccatgtatataagtactgaccactgggccataatgttgcttctcaggctatatgcagtcctttagtcagaagtcaataggcctatttattaatattttacagaccatattacctggattaccagggactatctttgctgcagagatcaagggttaagatctatgggaagatacttatttttctgaggtccttatgtcctgtcatataattaaagactcaagagaatttatgtgaaatgctttctgtatgcccaaatctttagattaaaattatatagctgctcct

SEQ ID NO: 38098 - DNA, 2604 bp, Artificial Sequence
  derived and/or modified sequence
atgcaggagcccggccagatcgtggagacctacaccgaggaggaccccgagggcgccatgagcgtggtgagcgtggagaccagcgacgacggcaccaccagaagaaccgagaccaccgtgaagaaggtggtgaagaccgtgaccaccagaaccgtgcagcccgtggccatgggccccgacggcctgcccgtggacgccagcagcgtgagcaacaactacatccagaccctgggcagagacttcagaaagaacggcaacggcggccccggcccctacgtgggccaggccggcaccgccaccctgcccagaaacttccactacccccccgacggctacagcagacactacgaggacggctaccccggcggcagcgacaactacggcagcctgagcagagtgaccagaatcgaggagagatacagacccagcatggagggctacagagcccccagcagacaggacgtgtacggcccccagccccaggtgagagtgggcggcagcagcgtggacctgcacagattccaccccgagccctacggcctggaggacgaccagagaagcatgggctacgacgacctggactacggcatgatgagcgactacggcaccgccagaagaaccggcacccccagcgaccccagaagaagactgagaagctacgaggacatgatcggcgaggaggtgcccagcgaccagtactactgggcccccctggcccagcacgagagaggcagcctggccagcctggacagcctgagaaagggcggcccccccccccccaactggagacagcccgagctgcccgaggtgatcgccatgctgggcttcagactggacgccgtgaagagcaacgccgccgcctacctgcagcacctgtgctacagaaacgacaaggtgaagaccgacgtgagaaagctgaagggcatccccgtgctggtgggcctgctggaccaccccaagaaggaggtgcacctgggcgcctgcggcgccctgaagaacatcagcttcggcagagaccaggacaacaagatcgccatcaagaactgcgacggcgtgcccgccctggtgagactgctgagaaaggccagagacatggacctgaccgaggtgatcaccggcaccctgtggaacctgagcagccacgacagcatcaagatggagatcgtggaccacgccctgcacgccctgaccgacgaggtgatcatcccccacagcggctgggagagagagcccaacgaggactgcaagcccagacacatcgagtgggagagcgtgctgaccaacaccgccggctgcctgagaaacgtgagcagcgagagaagcgaggccagaagaaagctgagagagtgcgacggcctggtggacgccctgatcttcatcgtgcaggccgagatcggccagaaggacagcgacagcaagctggtggagaactgcgtgtgcctgctgagaaacctgagctaccaggtgcacagagagatcccccaggccgagagataccaggaggccgcccccaacgtggccaacaacaccggcccccacgccgccagctgcttcggcgccaagaagggcaaggacgagtggttcagcagaggcaagaagcccatcgaggaccccgccaacgacaccgtggacttccccaagagaaccagccccgccagaggctacgagctgctgttccagcccgaggtggtgagaatctacatcagcctgctgaaggagagcaagacccccgccatcctggaggccagcgccggcgccatccagaacctgtgcgccggcagatggacctacggcagatacatcagaagcgccctgagacaggagaaggccctgagcgccatcgccgacctgctgaccaacgagcacgagagagtggtgaaggccgccagcggcgccctgagaaacctggccgtggacgccagaaacaaggagctgatcggcaagcacgccatccccaacctggtgaagaacctgcccggcggccagcagaacagcagctggaacttcagcgaggacaccgtgatcagcatcctgaacaccatcaacgaggtgatcgccgagaacctggaggccgccaagaagctgagagagacccagggcatcgagaagctggtgctgatcaacaagagcggcaacagaagcgagaaggaggtgagagccgccgccctggtgctgcagaccatctggggctacaaggagctgagaaagcccctggagaaggagggctggaagaagagcgacttccaggtgaacctgaacaacgccagcagaagccagagcagccacagctacgacgacagcaccctgcccctgatcgacagaaaccagaagagcgacaagaagcccgacagagaggagatccagatgagcaacatgggcagcaacaccaagagcctggacaacaactacagcacccccaacgagagaggcgaccacaacagaaccctggacagaagcggcgacctgggcgacatggagcccctgaagggcaccacccccctgatgcaggacgagggccaggagagcctggaggaggagctggacgtgctggtgctggacgacgagggcggccaggtgagctaccccagcatgcagaagatctag

SEQ ID NO: 38099 - DNA, 1938 bp, Artificial Sequence
  derived and/or modified sequence
atgatcggcgaggaggtgcccagcgaccagtactactgggcccccctggcccagcacgagagaggcagcctggccagcctggacagcctgagaaagggcggcccccccccccccaactggagacagcccgagctgcccgaggtgatcgccatgctgggcttcagactggacgccgtgaagagcaacgccgccgcctacctgcagcacctgtgctacagaaacgacaaggtgaagaccgacgtgagaaagctgaagggcatccccgtgctggtgggcctgctggaccaccccaagaaggaggtgcacctgggcgcctgcggcgccctgaagaacatcagcttcggcagagaccaggacaacaagatcgccatcaagaactgcgacggcgtgcccgccctggtgagactgctgagaaaggccagagacatggacctgaccgaggtgatcaccggcaccctgtggaacctgagcagccacgacagcatcaagatggagatcgtggaccacgccctgcacgccctgaccgacgaggtgatcatcccccacagcggctgggagagagagcccaacgaggactgcaagcccagacacatcgagtgggagagcgtgctgaccaacaccgccggctgcctgagaaacgtgagcagcgagagaagcgaggccagaagaaagctgagagagtgcgacggcctggtggacgccctgatcttcatcgtgcaggccgagatcggccagaaggacagcgacagcaagctggtggagaactgcgtgtgcctgctgagaaacctgagctaccaggtgcacagagagatcccccaggccgagagataccaggaggccgcccccaacgtggccaacaacaccggcccccacgccgccagctgcttcggcgccaagaagggcaaggacgagtggttcagcagaggcaagaagcccatcgaggaccccgccaacgacaccgtggacttccccaagagaaccagccccgccagaggctacgagctgctgttccagcccgaggtggtgagaatctacatcagcctgctgaaggagagcaagacccccgccatcctggaggccagcgccggcgccatccagaacctgtgcgccggcagatggacctacggcagatacatcagaagcgccctgagacaggagaaggccctgagcgccatcgccgacctgctgaccaacgagcacgagagagtggtgaaggccgccagcggcgccctgagaaacctggccgtggacgccagaaacaaggagctgatcggcaagcacgccatccccaacctggtgaagaacctgcccggcggccagcagaacagcagctggaacttcagcgaggacaccgtgatcagcatcctgaacaccatcaacgaggtgatcgccgagaacctggaggccgccaagaagctgagagagacccagggcatcgagaagctggtgctgatcaacaagagcggcaacagaagcgagaaggaggtgagagccgccgccctggtgctgcagaccatctggggctacaaggagctgagaaagcccctggagaaggagggctggaagaagagcgacttccaggtgaacctgaacaacgccagcagaagccagagcagccacagctacgacgacagcaccctgcccctgatcgacagaaaccagaagagcgacaagaagcccgacagagaggagatccagatgagcaacatgggcagcaacaccaagagcctggacaacaactacagcacccccaacgagagaggcgaccacaacagaaccctggacagaagcggcgacctgggcgacatggagcccctgaagggcaccacccccctgatgcaggacgagggccaggagagcctggaggaggagctggacgtgctggtgctggacgacgagggcggccaggtgagctaccccagcatgcagaagatctag

SEQ ID NO: 38100 - DNA, 2586 bp, Artificial Sequence
  derived and/or modified sequence
atgcaagagccaggccagatcgtcgaaacatacaccgaggaagaccccgagggggccatgagcgtggtatccgtagaaacaagcgacgacgggactaccagaagaaccgagaccaccgtgaagaaagtggttaagaccgtcacgacccggacagtccagcctgtggccatgggaccagatggactgcccgtggatgcaagtagcgtgagcaataactacattcagacactgggccgagacttccggaagaatggcaacggagggcccggtccgtacgtggggcaagctggaactgcaaccctgccacgaaatttccattatccccctgacggttacagcagacattacgaagatggctacccggggggcagcgacaactacggctccctgagcagggtgacaaggatcgaggagcgatatcgcccttccatggaaggatatcgagcccccagtcgtcaggacgtgtacggcccacagccccaggttcgcgttggtggttcctctgtggacttacatcgcttccaccccgaaccctacggactggaagatgatcagcgttctatgggctacgacgatctggactacgggatgatgagtgactacggtactgccaggcgcacagggactccctctgacccgcgaagacgcctgcgctcttatgaggacatgattggcgaggaggtccccagcgaccaatattattgggccccgttggcccaacatgagcgggggtccttggcgtctctcgattcactgcgcaaagggggtccgccacccccaaattggcgtcagccggaacttcctgaggtgattgcgatgcttgggttccggcttgacgcagtcaagagcaacgcggccgcgtacctccagcatttgtgctataggaatgataaggtgaaaacagacgttcggaaactgaagggcattcccgtgctggttggacttttagaccatccgaagaaagaggtacacctgggagcttgtggcgctttaaagaatattagttttggccgggaccaggataataagatcgctattaaaaattgtgacggcgtgcctgctctcgtacgactgctgcgcaaggctcgtgacatggacctgacggaagtgatcactgggacgctgtggaacctttcatctcatgactctatcaaaatggaaatcgtggatcacgcactgcatgcactgaccgacgaggtaataattccccattctggttgggagagggagccaaatgaagactgtaagccacggcacattgagtgggaatctgtgcttacgaatactgctggatgtcttcggaatgttagctctgaacgctctgaggcccggagaaagttgcgggaatgtgatggactggtcgacgcactgatattcattgtgcaggccgagattggacagaaggattctgattccaagctcgtggagaactgtgtgtgcctgctaagaaacctttcgtaccaggtccacagagagattccacaggctgagaggtatcaggaagcagcacctaatgtggcaaataatactgggccacacgccgcaagttgttttggggccaagaaggggaaagggaagaaaccaattgaagacccagcaaatgacaccgttgactttcctaagcggacctcacccgcccgggggtatgagctgctgtttcagccggaagtggtaaggatatatattagcctgctgaaggaaagcaaaacacccgctatactcgaagcctcagccggggcaatccagaatctgtgcgctggacgctggacctacgggcgctacattaggtcagctttgaggcaggagaaggctctatctgctatagctgatctccttaccaacgaacacgagagagtggttaaggccgctagcggtgccctacggaacctggccgtcgacgccaggaacaaggagcttattggtaagcacgccatccccaacttggtgaagaacctgccaggcggacaacaaaattcatcctggaacttttccgaagatacggtgataagcattctgaacactatcaatgaggtgatcgccgaaaatttggaagccgccaagaaactgcgggagacacaagggatagagaaactggtgttaatcaataagtcgggaaaccggtcggaaaaagaggtgcgggccgctgcgctcgtccttcagaccatctgggggtataaggagctccgtaagccgctggaaaaagaaggttggaagaagagcgattttcaggtcaatctgaacaatgcttcaaggagtcaatcatctcattcttacgacgactctaccctgccactgattgatagaaaccagaaatcagacaaaaaacccgacagggaggagattcaaatgagcaatatgggctcaaataccaagtcgctggataacaattacagcacccccaacgaacggggtgatcataaccggacattagatcgaagcggagacctcggggacatggaacctctgaaaggaacaacccctctgatgcaggatgaaggccaggagtctctggaggaggagctggatgtgttggtactggacgacgaggggggtcaggtctcctaccctagcatgcaaaagatctag

SEQ ID NO: 38101 - DNA, 1920 bp, Artificial Sequence
  derived and/or modified sequence
atgattggagaggaagtgccatctgaccagtactactgggccccactggcccagcacgagcgtggctccttggcgagtctcgactctctgcggaagggcgggccgccgccccctaactggaggcagccggaattgccggaagtaatagccatgctcggcttccgcctcgatgcagtgaagtccaatgccgctgcttacttacagcatttatgctaccgcaacgacaaggttaagaccgacgttagaaagctcaagggaatacctgtgctcgttggacttctggaccaccccaagaaggaggttcaccttggagcttgtggagccctgaaaaacattagttttggaagagaccaggataataaaattgcaataaagaactgtgacggcgtacccgcgctggtcaggttacttcgcaaggcaagggatatggacctaacggaggtcattactggaactctgtggaatctttccagccatgatagtatcaaaatggagatagtcgaccatgccctgcacgccctgactgacgaggtgataattccacacagtggatgggagagggagcccaacgaggactgcaaacctcgtcacatcgagtgggagagcgtgctcacgaatacagccggctgcttgcgcaacgtcagctcagaaaggagtgaggctcgacggaagttgcgggagtgcgatggactcgtggacgccctgatcttcatcgtacaagccgaaattggccagaaagactctgactctaagctggttgagaactgtgtgtgccttttgaggaatctgtcttaccaggtccaccgggaaatacctcaagctgaaagataccaagaggccgcgcccaacgtggccaacaacaccgggccacatgctgcctcctgtttcggggccaaaaagggtaaaggaaagaaacctatcgaggatcccgctaatgataccgtcgatttccccaaacgaactagcccagcacggggctacgaactgctgttccagcctgaggtcgttcggatctacatctcccttttaaaagaaagcaaaacccctgcaatcctggaggcttccgcaggagcaattcagaatctgtgtgcagggagatggacatatggcaggtatatcaggtctgctcttcgtcaggagaaggcactgagtgccatagccgacttgctcactaatgagcacgagagggtggtgaaggctgccagtggagccttaagaaatctggcagtggatgcccggaataaggagttgattggcaagcacgctatccccaatctcgttaaaaacctgccaggaggccagcagaacagctcttggaacttttccgaagataccgtgataagcattctgaataccatcaatgaggtgattgccgagaacctagaggccgctaaaaagctgcgtgagacccaggggatcgaaaaattagttctaattaacaaatccggcaacagaagtgagaaggaggtgcgcgctgcagccctggtgttgcagacaatctggggatacaaggagctccgcaagccactggagaaggagggctggaagaagtccgactttcaggtcaacttgaacaatgcttccaggagccagtcctctcatagctatgatgactcaaccctgccactcatcgataggaatcagaaatcagataaaaagccagacagagaggagatccaaatgtccaatatgggtagcaacacaaaatcattggataataactacagcacgcctaatgagcgcggagaccacaaccgcaccctggaccggtctggcgacctaggggacatggagcctctgaaaggcaccacccctctgatgcaagatgaaggccaggagtctctagaagaagagttggacgtgctcgtcctcgacgatgaggggggacaagtaagttaccctagcatgcagaagatttag

SEQ ID NO: 38102 - DNA, 2586 bp, Artificial Sequence
  derived and/or modified sequence
atgcaggagcccggccagatcgtggagacctacacagaggaggaccctgagggcgccatgtctgtggtgtctgtggagaccagtgatgatggcaccaccaggagaacagagaccaccgtgaagaaggtggtgaagacagtgaccaccaggacagtgcagcctgtggccatgggcccagatggcctgcctgtggatgccagctctgtgagcaacaactacatccagaccctgggccgggacttcaggaagaatggaaatggaggccctggcccctacgtgggccaggccggcacagccaccctgcccaggaacttccactaccccccagatggctacagccgccactatgaagatggctacccaggcggcagtgacaactacggcagcctgagccgggtgacccgcatcgaggagcgctaccggcccagcatggagggctaccgggcccccagccggcaggatgtgtatggcccccagccccaggtgcgggtgggcggcagctctgtggacctgcaccgcttccaccctgagccctacggcctggaggatgaccagaggtccatgggctatgatgacctggactatggcatgatgtctgactatggaacagccaggagaacaggcacccccagcgacccccggcggcggctgcggagctatgaggacatgattggagaggaggtgcccagcgaccagtactactgggcccccctggcccagcacgagcggggcagcctggccagcctggacagcctgaggaagggcggccccccaccacccaactggaggcagcctgagctgcctgaggtgattgccatgctgggcttccggctggatgctgtgaagagcaatgctgctgcctacctgcagcacctgtgctacagaaatgacaaggtgaagacagatgtgaggaagctgaagggcatccctgtgctggtgggcctgctggaccaccccaagaaggaggtgcacctgggcgcctgtggggccctgaagaacatcagctttggccgggaccaggacaacaagatcgccatcaagaactgtgatggagtgcctgccctggtgcggctgctgaggaaggcccgggacatggacctgacagaggtgatcaccggcaccctgtggaacctgagcagccatgacagcatcaagatggagatcgtggaccacgccctgcacgccctgacagatgaggtgatcatcccccacagcggctgggagcgggagcccaatgaagactgcaagcccaggcacatcgagtgggagagcgtgctgaccaacacagctggctgcctgagaaatgtgagcagcgagaggtctgaggcccggaggaagctgagagaatgtgatggcctggtggatgccctgatcttcatcgtgcaggccgagatcggccagaaggacagcgacagcaagctggtggagaactgtgtgtgcctgctgaggaacctgagctaccaggtgcaccgggagatcccccaggccgagcgctaccaggaggccgccccaaatgtggccaacaacacaggcccccacgccgccagctgcttcggggccaagaagggcaagggcaagaagcccatcgaggaccctgccaatgacacagtggacttccccaagaggaccagccctgcccggggctatgagctgctcttccagcctgaggtggtgcgcatctacatcagcctgctgaaggagagcaagaccccagccatcctggaggccagcgctggggccatccagaacctgtgtgccggccgctggacctacggccgctacatccgcagcgccctgcggcaggagaaggccctgagcgccatcgctgacctgctgaccaatgagcacgagcgggtggtgaaggccgccagcggggccctgaggaacctggccgtggatgccaggaacaaggagctgattggcaagcacgccatccccaacctggtgaagaacctgcccggcggccagcagaacagctcctggaacttctctgaagatactgtcatcagcatcctgaacaccatcaatgaggtgattgctgagaacctggaggccgccaagaagctgcgggagacccagggcatcgagaagctggtgctgatcaacaagagcggcaacagaagtgagaaggaggtgcgggctgctgccctggtgctgcagaccatctggggctacaaggagctgaggaagcccctggagaaggagggctggaagaagagtgacttccaggtgaacctgaacaatgccagccgcagccagagcagccacagctatgatgacagcaccctgcccctgattgacaggaaccagaagagtgacaagaagccagaccgggaggagatccagatgagcaacatgggcagcaacaccaagagcctggacaacaactacagcaccccaaatgaaagaggagaccacaacagaaccctggacagaagtggggacctgggggacatggagcccctgaagggcaccacccccctgatgcaggatgagggccaggagagcctggaggaggagctggatgtgctggtgctggatgatgagggcggccaggtgtcctaccccagcatgcagaagatctag

SEQ ID NO: 38103 - DNA, 1920 bp, Artificial Sequence
  derived and/or modified sequence
atgattggagaggaggtgcccagcgaccagtactactgggcccccctggcccagcacgagcggggcagcctggccagcctggacagcctgaggaagggcggccccccaccacccaactggaggcagcctgagctgcctgaggtgattgccatgctgggcttccggctggatgctgtgaagagcaatgctgctgcctacctgcagcacctgtgctacagaaatgacaaggtgaagacagatgtgaggaagctgaagggcatccctgtgctggtgggcctgctggaccaccccaagaaggaggtgcacctgggcgcctgtggggccctgaagaacatcagctttggccgggaccaggacaacaagatcgccatcaagaactgtgatggagtgcctgccctggtgcggctgctgaggaaggcccgggacatggacctgacagaggtgatcaccggcaccctgtggaacctgagcagccatgacagcatcaagatggagatcgtggaccacgccctgcacgccctgacagatgaggtgatcatcccccacagcggctgggagcgggagcccaatgaagactgcaagcccaggcacatcgagtgggagagcgtgctgaccaacacagctggctgcctgagaaatgtgagcagcgagaggtctgaggcccggaggaagctgagagaatgtgatggcctggtggatgccctgatcttcatcgtgcaggccgagatcggccagaaggacagcgacagcaagctggtggagaactgtgtgtgcctgctgaggaacctgagctaccaggtgcaccgggagatcccccaggccgagcgctaccaggaggccgccccaaatgtggccaacaacacaggcccccacgccgccagctgcttcggggccaagaagggcaagggcaagaagcccatcgaggaccctgccaatgacacagtggacttccccaagaggaccagccctgcccggggctatgagctgctcttccagcctgaggtggtgcgcatctacatcagcctgctgaaggagagcaagaccccagccatcctggaggccagcgctggggccatccagaacctgtgtgccggccgctggacctacggccgctacatccgcagcgccctgcggcaggagaaggccctgagcgccatcgctgacctgctgaccaatgagcacgagcgggtggtgaaggccgccagcggggccctgaggaacctggccgtggatgccaggaacaaggagctgattggcaagcacgccatccccaacctggtgaagaacctgcccggcggccagcagaacagctcctggaacttctctgaagatactgtcatcagcatcctgaacaccatcaatgaggtgattgctgagaacctggaggccgccaagaagctgcgggagacccagggcatcgagaagctggtgctgatcaacaagagcggcaacagaagtgagaaggaggtgcgggctgctgccctggtgctgcagaccatctggggctacaaggagctgaggaagcccctggagaaggagggctggaagaagagtgacttccaggtgaacctgaacaatgccagccgcagccagagcagccacagctatgatgacagcaccctgcccctgattgacaggaaccagaagagtgacaagaagccagaccgggaggagatccagatgagcaacatgggcagcaacaccaagagcctggacaacaactacagcaccccaaatgaaagaggagaccacaacagaaccctggacagaagtggggacctgggggacatggagcccctgaagggcaccacccccctgatgcaggatgagggccaggagagcctggaggaggagctggatgtgctggtgctggatgatgagggcggccaggtgtcctaccccagcatgcagaagatctag

SEQ ID NO: 38104 - DNA, 2586 bp, Artificial Sequence
  derived and/or modified sequence
atgcaggagcccggccagatcgtggagacctacaccgaggaggaccctgaaggtgccatgagcgtagtatcagtggagacgagcgacgacggcacaacacggaggacggagacaaccgtgaaaaaggtggtgaagacggtgacaacaaggacggtgcaaccagtagcaatgggaccagacggacttcccgtggacgcttccagcgtatctaataactacatacaaaccctcggaagggattttagaaaaaacggaaacggaggtcctggaccgtatgtcggacaagccgggaccgccacactccccagaaatttccactacccacccgacggctactcacggcactacgaggatggctacccaggcgggtccgataattatgggtcactcagcagggtgactcggatcgaagagcggtatagacccagtatggaaggctaccgcgccccctcgcgccaggacgtttacggaccccagcctcaagtccgagtcggagggagctccgtagacttacatcgcttccaccccgagccttatggtctggaggacgaccagcggagcatggggtatgacgacctggattacgggatgatgagcgactacggcacagccaggagaacagggaccccaagcgaccctaggagaagactgcgttcttatgaggatatgatcggggaagaagtcccctcggatcagtactattgggctcccttagcgcagcacgagcgcgggtccctcgcctcactcgactccctgcgaaagggggggcctccccctcctaactggcgccaacccgagctaccagaagtgatcgccatgttaggattccggctcgacgccgtcaagtccaatgcggcagcctacctgcagcacctgtgttatcgtaatgacaaagttaagaccgacgttcggaaactgaagggcataccggttttagtaggactgttggaccacccaaaaaaagaggtccacctgggagcctgcggagcccttaagaatatctcatttggcagggaccaggacaacaaaatcgcaataaaaaattgtgatggtgtgccagcacttgtcagactgctgaggaaggcgcgagatatggacctcaccgaggtgatcactggtacactgtggaacctgagttcccacgactccattaagatggaaatagtagatcatgctctccacgcactgactgatgaagtcatcattccacattcaggatgggagagagagcctaacgaggattgcaagcctcgtcacatagagtgggaaagcgtactgacaaataccgctgggtgtctcagaaacgtctctagcgaaagatccgaagcccggaggaagctgcgcgaatgtgacggactggttgacgcactaatctttatagttcaggccgagattgggcagaaggacagcgacagtaaactggttgagaactgcgtgtgtctgctgcgcaaccttagctatcaggtgcaccgggaaatcccccaggccgaacggtatcaggaagccgctccgaacgttgccaacaatactggcccgcacgctgcatcctgctttggggcgaaaaagggtaagggtaaaaagccgatcgaggacccggccaacgacactgtggattttcctaaacggacctctccagctcgtgggtacgaacttttgtttcagcccgaggtggttcgaatttacatatcattactcaaggagtctaagacgcctgcaatcctcgaggcctccgcaggcgccatccaaaacctgtgtgctggcaggtggacctatggcaggtatattagaagcgcgctgcgtcaggagaaagctttgagcgctatcgctgaccttcttaccaacgaacacgaacgcgtggtaaaggcagccagcggtgctcttcggaacctggctgttgacgcccgaaataaggaactcattggcaagcacgctattcctaacctagtgaagaacctgcctggtgggcagcagaactcatcatggaacttttcggaggacacggtgatatctattttgaacacaattaacgaggtgattgccgagaacctggaagcagcaaagaaacttagggagacacagggcattgagaaactcgtcctgataaacaagagcgggaaccggtctgaaaaggaggtccgggccgccgctttggtattgcaaactatatggggctataaggagctgcggaagcccctcgaaaaagaaggttggaagaaaagcgattttcaagtgaacctgaacaatgcttctagatcccagtcttctcattcttatgatgattcaaccctccccctgattgaccgaaaccaaaaaagcgacaaaaaacccgatcgtgaagaaattcagatgagtaacatggggtccaatacaaagtctctggataataattattcaactcctaacgagagaggtgatcataacaggaccctggatcgctcaggagacctgggagatatggaaccacttaaaggcacaactccactcatgcaggacgaaggccaggaatcactggaggaagagctcgacgtgctggttctggacgatgaaggaggccaggtgtcttacccttcgatgcagaagatatag

SEQ ID NO: 38105 - DNA, 1920 bp, Artificial Sequence
  derived and/or modified sequence
atgatcggcgaggaggtgcccagcgaccagtactactgggcccccttagctcagcacgagcggggatctctggcctctctcgactccctgcgaaaaggcgggccaccacctcccaattggcgacaacccgagctgccggaggtgatcgccatgcttggcttcaggctggatgccgtcaagtccaatgccgcggcatatctgcagcatctttgctataggaatgataaggtcaaaacggatgtgcgcaaactcaaagggatcccggtgctggtcggacttttggatcatccgaagaaggaggtccacctcggcgcttgcggcgccctgaaaaacatctcatttggtagagaccaggataacaaaattgcaatcaagaactgtgatggcgtgcccgcactcgtcaggctgctcagaaaggcccgagacatggaccttacggaggtcattaccggtaccctgtggaacctcagctcacacgattccataaaaatggaaattgtcgaccacgccctgcacgctttgacagacgaagtcatcatccctcacagcggctgggagcgagaacccaatgaagattgcaagccaaggcacatcgaatgggagtccgtgctcaccaacacagccggttgtctgcggaacgtaagttccgagaggagcgaagccaggcgaaagcttcgtgaatgtgatggccttgttgatgccctcatattcatagtacaggccgagatcggtcaaaaggacagcgactctaaactggtcgagaactgcgtctgtctgctccggaacctgagctatcaggtgcatcgggaaatcccacaggcagaaaggtaccaagaagccgcacctaatgtggcaaataataccggtccacacgccgctagttgttttggggctaagaagggcaaagggaagaaaccaatcgaagaccctgcgaacgatactgtcgatttccccaaacgaacgagtcccgctagaggatatgagctgctgttccagcctgaggtagttcggatttatatctcactactgaaggagtctaaaacccccgccatcttggaggctagcgctggcgccatccagaacctgtgtgctggacgctggacatacggccggtatatccgcagcgctcttagacaagagaaggctttgtccgccatcgccgaccttctcactaatgagcatgaaagagtggtcaaggcagcctccggcgcactgaggaacctggctgtggatgccagaaataaggagcttatcggcaaacacgccattccgaacctggtgaagaacctgcccggcggccagcagaactctagctggaacttcagcgaagacaccgttatttctatccttaacacaattaacgaggtaatagccgagaaccttgaagcagccaagaagctgcgtgaaacccagggaatcgagaaactagtgttgatcaacaaatctggaaatagatctgagaaagaagtccgcgccgctgccctggtgcttcagaccatctggggctataaggagcttaggaagccactggagaaggaagggtggaaaaagtccgactttcaggttaatcttaataacgcttctcgctcccagagctcacatagctacgatgactctaccttacctttgattgatcggaatcagaagagtgataaaaaacccgatcgcgaagagatccagatgtccaatatgggaagcaataccaagtctttggataacaactactccacccctaacgaacggggcgaccacaataggactttggaccgcagtggcgacctcggagatatggaacccctcaaagggacaacacccctcatgcaagatgagggacaagaaagcctggaagaagaactcgacgtcctggtgctggatgacgaaggcgggcaggtttcctatccctcaatgcagaaaatatag

SEQ ID NO: 38106 - DNA, 2586 bp, Artificial Sequence
  derived and/or modified sequence
atgcaggaacctggccagatcgtggaaacatataccgaagaagacccagagggagccatgtccgtcgtatctgtggagacttccgatgatggaaccaccaggcggactgaaactaccgtgaagaaggtcgttaaaacggtcaccacccggaccgtccagcccgtggccatgggcccagatggtttgcccgtcgatgcctcgtctgtatcaaacaactatatccagactttaggacgggactttcggaagaacggaaacgggggtcccggaccatacgtgggccaggcaggcaccgctacgctgcccaggaattttcattatcctccagatggttactcccggcattatgaggacggatatcctggcggtagcgacaattatggcagtctttctcgagtgactagaatcgaggagaggtaccgaccttctatggaaggatatcgtgcgcctagccggcaggatgtgtatgggcctcagccccaagtgagggttgggggttcatctgtcgatctgcaccgctttcatccagagccttacgggctggaagacgatcagaggagcatgggatacgatgacctagactacggcatgatgagcgattacggcaccgccaggaggacaggtacaccctccgacccacggaggaggctgaggtcctatgaggatatgatcggcgaagaggtaccctcagatcagtattactgggcaccacttgcccaacacgagaggggatctctggccagcctggatagtctcagaaagggtggccctcccccaccaaactggcgtcagcctgagctaccagaggttattgccatgttaggctttcgtctcgacgcagtgaaatcgaacgctgcagcctacttgcagcatctgtgttatcgcaacgacaaggtgaaaacggacgttagaaagttgaagggaatccccgtgctcgttgggctgctggatcatcccaaaaaggaggtgcatttaggggcatgcggggctttgaagaatataagcttcggacgagatcaggacaacaaaatcgcaataaagaattgcgacggggtgcctgcactggtaagactccttcggaaggccagggatatggacctcaccgaagtgatcacaggaactctgtggaatctcagttcccacgacagtattaaaatggaaatagtggaccacgcactgcatgccttaactgatgaggttatcatcccgcactccggctgggagcgtgagcctaatgaggattgtaaacctcgtcacattgagtgggaaagcgtgttaaccaatactgcaggttgccttcggaacgtaagttcagaaaggagcgaagcaaggcgcaagttgagagaatgtgacggtctggtggatgccctgatttttatcgtgcaggccgagattggtcaaaaggactccgattctaaactcgttgagaactgcgtgtgcttgctcaggaacctgagctaccaggttcatagggagatcccacaagccgaacgctaccaagaggcagcacctaatgtggcgaataatacagggcctcatgccgcttcgtgtttcggcgctaagaagggcaagggcaaaaagcccatcgaagaccccgctaacgatactgtcgacttccccaagcgcaccagcccagctcgtggttacgagctgctgttccagccagaagtggtgcggatatatatttccctgctcaaagagagcaagacccctgcgatcctggaggccagtgctggagcaattcagaatctttgtgcagggaggtggacctacggacgatatatcaggtccgccttaagacaagagaaggctttgagcgccatcgctgacctcctgactaacgaacacgagcgggtggtgaaggcagccagcggagctctgagaaacctggccgtggacgcacgaaacaaggaactaatcggtaagcatgccatcccgaatctcgtgaaaaacctacccggtggccaacaaaacagttcttggaatttttccgaggataccgtcataagtattctaaatactatcaatgaggttatagctgagaatctcgaagctgcaaagaagctccgcgaaacacagggcattgaaaagctggtcctaatcaataaatctggcaacaggtctgaaaaggaagtgcgcgcagccgctttagtactccagacaatttggggctacaaagaactgcgcaaaccccttgagaaggaggggtggaagaagtctgattttcaagttaacctgaacaatgcttcacgaagccagagttcccactcctatgatgattctacgctgccgctgatcgaccgcaaccaaaagagtgataagaaacctgacagagaagaaattcagatgtcaaacatggggagcaatactaaatcattggataacaactactcaacccccaacgagaggggggatcacaaccgaactcttgacaggtctggagaccttggcgacatggaacccctgaagggaacaactcccttgatgcaggacgaggggcaagaatctctagaggaagaactggatgtcctggttctcgatgatgagggaggccaggttagctatccaagtatgcagaagatctag

SEQ ID NO: 38107 - DNA, 1920 bp, Artificial Sequence
  derived and/or modified sequence
atgatcggagaagaagtcccgagcgaccagtattactgggctcccttagcccagcacgagagggggtcactggcctcactggacagcttgaggaaagggggacctcctcctcccaattggagacagcctgaactgcctgaggtgatcgccatgctgggctttaggcttgacgcagtgaaaagcaacgcggcagcctatctgcagcatctctgctatcgcaatgacaaggtgaaaaccgatgtgcggaagttaaagggcatccctgtgctggtgggccttctggaccatcccaaaaaagaggtgcatctcggggcttgcggcgcactgaaaaacatctcctttggaagagatcaggacaataaaatcgccattaaaaattgtgacggggtgcctgccctggtacggctgctgcggaaagccagagatatggacctcaccgaggtaattacgggcaccttatggaatctgtcgtcacatgatagcatcaaaatggagatcgtagaccacgcccttcacgccctgacagacgaagtcattatccctcactccgggtgggaacgcgaaccaaatgaagactgcaaaccaagacatattgaatgggagtctgtgctgacgaacactgctggctgtctccggaatgtgagtagcgagagatccgaagctaggcgaaaactgcgggagtgcgatgggctggtggatgccctgatctttattgttcaagccgaaatagggcagaaggactctgattccaaacttgtcgagaattgcgtgtgccttttgcgcaatctgtcataccaagtacacagggaaatcccccaggctgagcggtaccaggaagcagcgcctaatgtagcgaataataccggacctcatgcagcatcttgcttcggggcaaaaaagggcaaggggaagaaacccatcgaggacccagcgaacgatacagtcgactttccaaaaagaacaagccctgcacgtgggtacgaacttctgttccagccggaagtcgtgcgtatatacatatcacttctcaaggaaagcaaaacacctgccatcctggaggccagtgccggagcgatccaaaacctgtgtgcaggacggtggacttatggacgctacatcagaagtgctctgagacaggaaaaggctctgagcgctattgccgatcttctcaccaacgaacacgaacgcgtcgtgaaagccgcttctggcgctctgcggaatctagcagtagacgcgagaaacaaggagttgataggcaagcacgccatacccaatttagttaaaaaccttcccggagggcagcagaattcatcatggaatttctctgaagatactgtaatttccatactaaacacaatcaacgaagtgatcgcggagaatctggaggccgcaaagaaactccgggagacccaaggaatagagaagttggtcctcataaacaagtccggcaaccgctccgaaaaggaggtgcgagctgcggcactggtgctgcaaacaatttggggatataaagaactcaggaagcctctcgagaaggaaggatggaagaaaagtgatttccaggtgaacctcaacaatgccagccgctctcagtctagccactcttatgatgattcaacattacctctgattgacagaaatcagaagagtgataaaaagcccgatcgtgaggaaatccagatgtctaacatggggtccaatacaaagtccctagataacaactacagtactccaaatgagcgaggcgatcataatcggaccttggaccggagtggcgatctgggcgatatggaaccattaaagggtacgacacccctcatgcaggatgaggggcaagagtcactcgaggaggagctcgatgtgctggtgctagatgatgaggggggtcaggtgtcttacccctccatgcagaagatctag

SEQ ID NO: 38108 - DNA, 5053 bp, Artificial Sequence
  derived and/or modified sequence
ctgccagatcagtttgtcaccacccaggctcccttgcctttggctgggtgcaacttccattttaggtgttggatctgagggggaaaaaaaagagagagggagagagagagaaagaagagcaggaaagatcccgaaaggaggaagaggtggcgaaaaatcaactgccctgctggatttgtctttctcagcaccttggcgaagccttgggtttctttcttaaaggactgatttttagaactccacatttgaggagctatgaagacatgattggtgaggaggtgccatcggatcaatactactgggctcctttggcccagcatgagcgaggaagtttagcaagcttggatagcctgcgcaaaggagggcctccacctcctaattggagacagccagagctgccagaggtgatcgccatgcttggattccgcttggatgctgtcaagtccaatgcagctgcatacctgcaacacttatgctaccgcaatgacaaggtgaagactgacgtgcggaagctcaagggcatcccagtactggtgggattgttagaccatcccaaaaaggaagtgcaccttggagcctgtggagctctcaagaatatctcttttggacgtgaccaggataacaagattgccataaaaaactgtgatggtgtgcctgcccttgtgcgattgcttcgaaaggctcgtgatatggaccttactgaagttattaccggaaccctgtggaatctttcatcccatgactcaatcaaaatggagattgtggaccatgcactgcatgccttgacagatgaagtgatcattcctcattctggttgggagcgggaacctaatgaagactgtaagccacgccacattgagtgggaatcggtgctcaccaacacagctggctgccttaggaatgtaagctcagagaggagtgaagctcgccggaaacttcgggaatgtgatggtttagttgatgccctcattttcattgttcaggctgagattgggcagaaggattcagacagcaagcttgtagagaactgtgtttgccttcttcggaacttatcatatcaagttcaccgggagatcccacaggcagagcgttaccaagaggcagctcccaatgttgccaacaatactgggccacatgctgccagttgctttggggccaagaagggcaaagggaaaaaacctatagaggatccagcaaacgatacagtggatttccctaaaagaacgagtccagctcgaggctatgagctcttatttcagccagaggtggttcggatatacatctcacttcttaaggagagcaagactcctgccatcctagaagcctcagctggagctatccagaacttgtgtgctgggcgctggacgtatggtcgatacatccgctctgctctgcgtcaagagaaggctctttctgccatagctgacctcctgactaatgaacatgaacgggtggtgaaagctgcatctggagcactgagaaacctggctgtggatgctcgcaacaaagaattaattggtaaacatgctattcctaacttggtaaagaatctgccaggaggacagcagaactcctcttggaatttctctgaggacactgtcatctctattttgaacactatcaacgaggttatcgctgagaacttggaggctgccaaaaagcttcgagagacacagggtattgagaagctggtgttgatcaacaaatcagggaaccgctcagaaaaagaagttcgagcagcagcacttgtattacagacaatctggggatataaggaactgcggaagccactggaaaaagaaggatggaagaaatcagactttcaggtgaatctaaacaatgcttcccgaagccagagcagtcattcatatgatgatagtactctccctctcattgaccggaaccaaaaatcagataagaaacctgatcgggaagaaattcagatgagcaatatgggatcaaacacaaaatcactagataacaactattccacaccaaatgagagaggagaccacaatagaacactggatcgatcgggggatctaggcgacatggagccattgaagggaacaacacccttgatgcaggacgaggggcaggaatctctggaggaagagttggatgtgttggttttggatgatgaggggggccaagtgtcttacccctccatgcagaagatttagcaccactatctccgttccatctgggcttatatgtacttttattttttggtggtgaaattgactgatgattttcctttttcttcgctggactattgtgccaactgccaggctgcctcctgcccttacagccctaagtggctgccttctttccatcaactcccaacttcttcctgtgaagtttaattgtctcaacgcctccccctcccccattccctccatttttctcccaagaaacctgactcaattatttgcatattttgagaaactgctgcagattagttctttttgccagttttccctggaactcctggccttttgtggaggggagggatggagagaataggaatcttcactagaagccgtgggaagaattggaagttacatgctgtatatgcaatgtccagcagtctgataaactgacgattcttaatcaagatttttttcctgatggggaagggacttttattttcttttagagaggggaaagtgtgagctcttcccttattcctaatggctatttttgaagcaaagaaggccagcaacattggcacatgccacctggcaaaggacccttgagtaagtgaaggtctcctaaaactgggattaagaaaccttgctctcctcatctccaaggcagggaccatcaagaacctacagactccatctcttctgcaagcctcatgccaaccctgggctattgctgctgccccttaaacacaggctgtccttaacccacctctcctgccctgtgatatgtctgctgagttggcctggccatttccaagaggctgtagaaaggggagaatgtcaaggaagacttttggtagagaaggagcagaaagatgtgtttttgggaagaagaagacctctaggaggagctagtaggaatgtacatgaagcaattagtctgaaactggcttccccactcccccgtttctccttttcctatccttataggcctgtcccttgcctctgccctggattggttggcaaactaaaggacttgatgtacataactcctgtcccttttcccttacaaggtggggattgcccctggctttgcctcttctttgtgcctttggcctggggtgcatctcctcccgcccttccatgtgcctttctttgcctctgcagtctcatttctcataattttgcaaattatattttgttgctttcttacctactattggccctaaatagcagaaagaagagaagtgaccgagagaacctcagattcttcattgaggattggtatagccatgatttcagtcatagcaagcttttgctcaacagcatatgggtgggattttgcaaaaatcctattctgatgaatctcaaagtaaggctggtaagagaagtgagtggtgtgactcttactccttaggtgcccagaatttaccatcatctctgaaggagttacagggaagtggtctccccaattctcccctccctccagtattgccccctctcactttagcatatattaattagcaggttgggctagagaaatcagctgctatgcgggttgattattattattatttctaatccttttccttatttgccttctactccccttaatctaatctaaaagctctgttccatgcaactggagttccttatccctctcttccccttcccttatatattgaggctatggggtaggagaaaagtgcacaacccaccaccccctttactcgtgcattaaaatttcttatttacccttttcccccttcccatttcttcccactttcatctaccttttctggcaaaaaggagccttttgctctctgtgaccctaagagcacactgcacagggaaaattgccccatccagacctggctccactcttgatctctcttgtcctcttctgctcttttcctggtgctcttttttctcggtggggtgtgggtaatagaacagccgtgggcttttggggacctttaacttttttttctctcttttgtttataaaaaacactaaacattcaattccagagaaccaaaaatcccaccttcccaccgaacactactaaggggcttgtgttctgctccataccttttctcttttctttctgtcttgttaatgcttttaaaaacaaatgagttttttatataaataaagtttttaaagtgtgtatgtggggggtctgtgtcatttcttcacttcaagctgttatttcttccctgctttgcatctttgttacttccttatgtatcagtgtcctttccagagcaaccagaaggaggttataccaggatttattttgagctcagccccaactctttatcaagcaacattcttgttaactatatgtgaaacattttttcttctgaagattcttaaaaattgaatgtggctgaagttgaacatgggagcttattgctaatttagagataggaaactgaagcataaagaattaatgacttactttaattactggaattcttctgcaacatttgacaaaactaaccttgaataaggcccactgtaatacgtagctctcttaaatataacacttaggactagaagattagaaactaccaatcccaactacgtaataggaaaatgtaggatcaaaaggcccatgtatataagtactgaccactgggccataatgttgcttctcaggctatatgcagtcctttagtcagaagtcaataggcctatttattaatattttacagaccatattacctggattaccagggactatctttgctgcagagatcaagggttaagatctatgggaagatacttatttttctgaggtccttatgtcctgtcatataattaaagactcaagagaatttatgtgaaatgctttctgtatgcccaaatctttagattaaaattatatagctgctcct

SEQ ID NO: 38109 - DNA, 2586 bp, Artificial Sequence
  derived and/or modified sequence
atgcaggagcccggccagatcgtggagacctacaccgaggaggaccccgagggcgccatgagcgtggtgagcgtggagaccagcgacgacggcaccaccagaagaaccgagaccaccgtgaagaaggtggtgaagaccgtgaccaccagaaccgtgcagcccgtggccatgggccccgacggcctgcccgtggacgccagcagcgtgagcaacaactacatccagaccctgggcagagacttcagaaagaacggcaacggcggccccggcccctacgtgggccaggccggcaccgccaccctgcccagaaacttccactacccccccgacggctacagcagacactacgaggacggctaccccggcggcagcgacaactacggcagcctgagcagagtgaccagaatcgaggagagatacagacccagcatggagggctacagagcccccagcagacaggacgtgtacggcccccagccccaggtgagagtgggcggcagcagcgtggacctgcacagattccaccccgagccctacggcctggaggacgaccagagaagcatgggctacgacgacctggactacggcatgatgagcgactacggcaccgccagaagaaccggcacccccagcgaccccagaagaagactgagaagctacgaggacatgatcggcgaggaggtgcccagcgaccagtactactgggcccccctggcccagcacgagagaggcagcctggccagcctggacagcctgagaaagggcggcccccccccccccaactggagacagcccgagctgcccgaggtgatcgccatgctgggcttcagactggacgccgtgaagagcaacgccgccgcctacctgcagcacctgtgctacagaaacgacaaggtgaagaccgacgtgagaaagctgaagggcatccccgtgctggtgggcctgctggaccaccccaagaaggaggtgcacctgggcgcctgcggcgccctgaagaacatcagcttcggcagagaccaggacaacaagatcgccatcaagaactgcgacggcgtgcccgccctggtgagactgctgagaaaggccagagacatggacctgaccgaggtgatcaccggcaccctgtggaacctgagcagccacgacagcatcaagatggagatcgtggaccacgccctgcacgccctgaccgacgaggtgatcatcccccacagcggctgggagagagagcccaacgaggactgcaagcccagacacatcgagtgggagagcgtgctgaccaacaccgccggctgcctgagaaacgtgagcagcgagagaagcgaggccagaagaaagctgagagagtgcgacggcctggtggacgccctgatcttcatcgtgcaggccgagatcggccagaaggacagcgacagcaagctggtggagaactgcgtgtgcctgctgagaaacctgagctaccaggtgcacagagagatcccccaggccgagagataccaggaggccgcccccaacgtggccaacaacaccggcccccacgccgccagctgcttcggcgccaagaagggcaagggcaagaagcccatcgaggaccccgccaacgacaccgtggacttccccaagagaaccagccccgccagaggctacgagctgctgttccagcccgaggtggtgagaatctacatcagcctgctgaaggagagcaagacccccgccatcctggaggccagcgccggcgccatccagaacctgtgcgccggcagatggacctacggcagatacatcagaagcgccctgagacaggagaaggccctgagcgccatcgccgacctgctgaccaacgagcacgagagagtggtgaaggccgccagcggcgccctgagaaacctggccgtggacgccagaaacaaggagctgatcggcaagcacgccatccccaacctggtgaagaacctgcccggcggccagcagaacagcagctggaacttcagcgaggacaccgtgatcagcatcctgaacaccatcaacgaggtgatcgccgagaacctggaggccgccaagaagctgagagagacccagggcatcgagaagctggtgctgatcaacaagagcggcaacagaagcgagaaggaggtgagagccgccgccctggtgctgcagaccatctggggctacaaggagctgagaaagcccctggagaaggagggctggaagaagagcgacttccaggtgaacctgaacaacgccagcagaagccagagcagccacagctacgacgacagcaccctgcccctgatcgacagaaaccagaagagcgacaagaagcccgacagagaggagatccagatgagcaacatgggcagcaacaccaagagcctggacaacaactacagcacccccaacgagagaggcgaccacaacagaaccctggacagaagcggcgacctgggcgacatggagcccctgaagggcaccacccccctgatgcaggacgagggccaggagagcctggaggaggagctggacgtgctggtgctggacgacgagggcggccaggtgagctaccccagcatgcagaagatctag

SEQ ID NO: 38110 - DNA, 1920 bp, Artificial Sequence
  derived and/or modified sequence
atgatcggcgaggaggtgcccagcgaccagtactactgggcccccctggcccagcacgagagaggcagcctggccagcctggacagcctgagaaagggcggcccccccccccccaactggagacagcccgagctgcccgaggtgatcgccatgctgggcttcagactggacgccgtgaagagcaacgccgccgcctacctgcagcacctgtgctacagaaacgacaaggtgaagaccgacgtgagaaagctgaagggcatccccgtgctggtgggcctgctggaccaccccaagaaggaggtgcacctgggcgcctgcggcgccctgaagaacatcagcttcggcagagaccaggacaacaagatcgccatcaagaactgcgacggcgtgcccgccctggtgagactgctgagaaaggccagagacatggacctgaccgaggtgatcaccggcaccctgtggaacctgagcagccacgacagcatcaagatggagatcgtggaccacgccctgcacgccctgaccgacgaggtgatcatcccccacagcggctgggagagagagcccaacgaggactgcaagcccagacacatcgagtgggagagcgtgctgaccaacaccgccggctgcctgagaaacgtgagcagcgagagaagcgaggccagaagaaagctgagagagtgcgacggcctggtggacgccctgatcttcatcgtgcaggccgagatcggccagaaggacagcgacagcaagctggtggagaactgcgtgtgcctgctgagaaacctgagctaccaggtgcacagagagatcccccaggccgagagataccaggaggccgcccccaacgtggccaacaacaccggcccccacgccgccagctgcttcggcgccaagaagggcaagggcaagaagcccatcgaggaccccgccaacgacaccgtggacttccccaagagaaccagccccgccagaggctacgagctgctgttccagcccgaggtggtgagaatctacatcagcctgctgaaggagagcaagacccccgccatcctggaggccagcgccggcgccatccagaacctgtgcgccggcagatggacctacggcagatacatcagaagcgccctgagacaggagaaggccctgagcgccatcgccgacctgctgaccaacgagcacgagagagtggtgaaggccgccagcggcgccctgagaaacctggccgtggacgccagaaacaaggagctgatcggcaagcacgccatccccaacctggtgaagaacctgcccggcggccagcagaacagcagctggaacttcagcgaggacaccgtgatcagcatcctgaacaccatcaacgaggtgatcgccgagaacctggaggccgccaagaagctgagagagacccagggcatcgagaagctggtgctgatcaacaagagcggcaacagaagcgagaaggaggtgagagccgccgccctggtgctgcagaccatctggggctacaaggagctgagaaagcccctggagaaggagggctggaagaagagcgacttccaggtgaacctgaacaacgccagcagaagccagagcagccacagctacgacgacagcaccctgcccctgatcgacagaaaccagaagagcgacaagaagcccgacagagaggagatccagatgagcaacatgggcagcaacaccaagagcctggacaacaactacagcacccccaacgagagaggcgaccacaacagaaccctggacagaagcggcgacctgggcgacatggagcccctgaagggcaccacccccctgatgcaggacgagggccaggagagcctggaggaggagctggacgtgctggtgctggacgacgagggcggccaggtgagctaccccagcatgcagaagatctag

SEQ ID NO: 38111 - DNA, 2499 bp, Artificial Sequence
  derived and/or modified sequence
atgcaagaacctggacagattgtcgagacatacactgaagaggatcctgagggcgcaatgagtgtggtctcagtagaaacctccgacgatgggacgacgcggcggaccgagactaccgtgaaaaaagtggtcaagaccgttactacgcggactgtgcagccagtcgctatggggcctgacggtttgccggtggacgctagctccgtaagcaacaactacattcagactttaggacgcgattttaggaagaacggaaacgggggacctggaccttacgtcggccaggctggcacagctaccctgccaaggaacttccattaccctcctgacgggtactccagacactatgaggatggatatcctggaggctccgataactatggatcactttccagggtaaccagaattgaggaaagataccggcccagtatggagggctatcgggctccttctcgccaggatgtgtatgggcctcagccgcaggtgagggtggggggctcttctgtggacctgcaccggtttcaccctgagccctacggattagaagacgaccagcgatctatgggttacgacgatttggactacgggatgatgtctgattacggcacagctagacggacgggaacccctagcgacccacgccggcgccttcgtagctatgaggatatgatcggtgaggaggtgcctagcgatcagtactactgggctccgctggctcagcacgagcgaggatcattggcttccctggactcactccgtaaggggggccccccccctcccaattggaggcagccagaactgcccgaggtcatagctatgctcggctttcggctggacgcagtcaagtccaatgctgctgcctatctgcagcatctgtgttataggaatgacaaggtgaaaacagacgtcagaaagcttaagggcatccctgtgctggtgggcctgctcgatcacccaaaaaaagaggtacatttaggtgcctgcggagccttaaaaaatatatcctttggacgcgatcaagataataaaatcgcgattaagaattgtgacggtgtaccggctctggtacgtctattaaggaaagctcgcgatatggacctgacggaggtcatcactggaaccctgtggaacctgtcctcacatgattcgatcaaaatggagatcgtcgaccacgccctacacgccctgacggacgaagtgataattccacatagtggatgggaaagagagcccaatgaggactgcaagcctcgtcatattgagtgggaatccgttctgacgaacactgctggttgcttgcggaacgtgtcctccgagaggagcgaggcaagaaggaaattacgagagtgtgatgggcttgtcgacgctctgatcttcattgttcaggcagagatcggccagaaagattccgatagcaaattagttgagaactgcgtgtgtctgttgaggaacctttcgtaccaggtgcacagagaaatcccccaggctgagagataccaggaggccgcacctaatgtggcaaacaacacgggacctcacgccgccagttgcttcggcgcaaagaaaggtaagggtaagaagccaattgaagatcccgctaacgacactgtagatttccccaaacgtacctctccggcgcgaggctacgagttgctcttccagcctgaagttgttaggatatacatatcactgcttaaagagagcaagacaccagcaatactggaagcctcagcaggcgcaatccaaaatctctgtgccggcaggtggacctacggcagatatattcgttcggctctgaggcaggaaaaagcgctctcggctattgccgacctgctaacaaacgagcacgagagggtcgttaaagcggcctctggagccctccgtaatttggctgttgacgcaaggaataaggagttaattgggaagcacgccatccctaacctggtgaaaaacctcccaggaggccagcaaaatagctcttggaatttcagcgaagacactgtgatctcaatcttgaatacgataaatgaggttatcgccgaaaatctggaggctgccaaaaagctgagggagacccagggtatcgaaaagcttgtgctaatcaacaaatcagggaaccggagtgagaaggaggtgcgagcagcagctctggtcttgcagactatctggggatacaaggaactccgcaaacctctggaaaaggagggttggaaaaagagtgactttcaggtgaacctcaacaatgcttcgagatcacaatcgtcccattcatacgacgatagcacattacccttaatcgaccggaaccagaaatccgacaaaaagcccgacagggaggagattcagatgagcaacatggggagcaatacaaaaagccttgacaataactattcgactcctaacgaaagaggcgaccataaccgtaccctggatcgtagtggcgatctgggagatatggaacctctgaaagggacaacacctctgatgcagaagatatag

SEQ ID NO: 38112 - DNA, 1833 bp, Artificial Sequence
  derived and/or modified sequence
atgatcggtgaggaggtcccttccgaccagtattattgggcccccttggcacaacacgagcggggctcgctcgccagcctggatagtttgcgcaaaggaggacctccacctcccaattggcgtcagccagaattgccagaagttattgctatgcttggatttcggctggacgccgtcaagtctaatgccgcggcgtacttgcagcatctgtgctatagaaatgacaaggtgaagaccgatgtgcgtaaactgaaaggaattccagtcttggtaggactgctcgaccacccaaagaaggaagtgcacctgggagcatgcggtgctttaaaaaacatatcattcggaagggaccaagataacaaaattgccatcaagaactgcgacggggtccctgctttggttaggctgttacggaaggcacgggacatggacctgaccgaggtgatcacgggcactctgtggaatctatcttcccacgattccataaagatggaaatcgtggaccatgctcttcacgccttgacagacgaggtgattattccacactctggatgggagagagaacccaacgaagactgcaagccaagacacatcgagtgggagagcgtattaaccaatacagcagggtgcctaagaaacgtgtcaagcgagcggtccgaggctcgacgcaaactgcgggaatgcgacgggctggttgacgctttgatcttcattgtgcaagcagagatcggccaaaaagattccgatagtaaacttgtggagaattgtgtctgccttcttagaaatttatcatatcaggtgcacagggaaatcccacaggcggaaagatatcaggaagctgccccaaatgtggcgaataacactggtccccacgctgcatcttgttttggcgcaaagaaggggaagggcaaaaaacccatcgaggacccagctaacgataccgtggacttccctaagaggaccagccccgctcgaggatatgagctgctgttccagcccgaggttgtgcgaatttacatatcgcttctgaaagagtcaaagactcctgcaattctggaggccagcgccggagcaatccagaacctgtgcgctggtcgttggacatacggacgctatattaggtcagccctgagacaggaaaaagctctgtctgccatcgcggatttactgacgaacgaacacgaaagagttgtcaaagccgcaagcggggccctgcggaatctggccgtagacgcccggaataaagagctaattggtaaacacgccattcccaatctcgtgaagaatctccccggcggacagcaaaactcgtcatggaatttctctgaagatactgtgatcagcatacttaataccatcaacgaggtgatagccgagaatcttgaagcggcgaaaaagctgcgggaaacccaaggaatcgaaaagctagtcctgataaacaaatctggcaacagaagcgagaaagaggtgcgcgcagccgccctcgttctccagacaatttggggttacaaagagctgagaaaacccctcgaaaaagaaggctggaagaagagtgatttccaggttaatctcaacaacgcctcccgcagccaaagttcacattcatatgatgattctacactcccactaatcgaccggaatcagaaatctgataagaagcctgatagagaggagatccagatgagtaacatgggcagtaatactaaaagcctggataacaattactctacccctaacgagcgaggagaccataataggacgctcgataggagtggagacctgggcgacatggagcctctcaagggtacaacccccctcatgcagaagatatag

SEQ ID NO: 38113 - DNA, 2499 bp, Artificial Sequence
  derived and/or modified sequence
atgcaggaaccaggacaaattgtcgagacctacactgaggaagacccggaaggtgcgatgtcagtggtgagtgtggagacctcagacgatggcaccaccagacgcaccgaaaccaccgtcaaaaaggttgtaaaaacagtcaccaccaggacggtgcaaccggtcgcgatgggtcccgacggcctacccgtcgatgctagtagcgtgtccaacaactacatccaaaccctgggccgggacttcagaaagaacggaaacggcggtcctggcccctatgtcggccaggccggaaccgccacactgcctcggaacttccactacccgcccgatggatactctcggcattacgaggatggatacccagggggtagcgataactacggatctctgagtcgcgtaacgcgcatcgaggagcgctatcgcccgtcaatggaaggctaccgggccccctcacgccaggacgtatacggcccccagccacaggtccgagtcggcggctcatccgttgatctgcacaggttccaccctgaaccatatggtctcgaagatgatcagaggagcatgggctatgatgacttagattatggtatgatgagcgactatggcactgcaagaaggaccggcacccccagtgatccccggcgaaggctcaggtcatacgaagacatgattggggaagaagtgccctccgatcagtattactgggctcctcttgcccagcatgaacgcggcagcctcgcctcccttgactctctgagaaaaggaggcccgcccccccccaattggaggcagccagagctgccagaagttattgctatgttggggtttcgcctggacgcagttaagtcaaacgctgcggcttacctgcagcacttatgttacagaaacgacaaggtaaagacagacgtgcggaaacttaaaggtatcccagtcttggtgggactgcttgaccaccctaagaaggaagtccacctcggtgcctgcggagcattgaaaaatatcagctttggaagggatcaagataataaaatcgctatcaaaaattgcgatggcgttccagccctggtcaggcttctgcgaaaggcccgggacatggatttaaccgaggtcattactgggacattgtggaacttgtcctcgcacgactccattaagatggagattgtggatcacgctctccacgcgctcaccgacgaagtcattatcccacacagcggctgggagcgcgagcctaacgaggactgtaagcctcgacacatcgagtgggagtcggtgctgactaacacggctggatgtctccggaatgtcagcagtgagcgttcggaggcaagaaggaaattgcgggagtgtgatggattggtagacgccctgatttttatcgtacaagcagagattggccagaaggatagcgactcgaagttagtggagaactgcgtgtgcctgttgagaaacttatcctaccaggtgcatagagagatcccccaagctgagcggtaccaagaagctgctcctaatgtggcaaataacacgggcccccacgcagcatcttgtttcggggcaaagaagggcaagggtaaaaagccaatagaggatcccgcaaatgacacggttgactttccaaagcgcacatccccagcacgtggatacgaattgctttttcagcctgaggtggtgcgaatctacatctcactattgaaggagtccaagacaccagctatactcgaggctagcgcgggggcaatacagaatctgtgcgcaggtcgatggacttatggccgctacatcagatccgctttgcgtcaagaaaaagccctgtccgccatcgcggaccttcttaccaatgaacatgaaagagtggttaaagcagccagcggcgcactgaggaatctggctgtagatgctcgaaacaaggagttgattggaaaacacgctatacccaatctcgtgaagaatctgcctgggggccagcaaaatagttcttggaacttcagtgaagataccgtaattagcattctgaatactatcaatgaggtcatcgcggagaatctggaggcagccaagaagctcagagaaactcaggggatcgaaaagctggtcctgatcaacaagtcaggtaatcgcagcgagaaagaggtgagggcggctgctctggtgttgcaaacaatttggggatacaaggagctacgaaagccactggaaaaagaaggctggaagaaaagcgattttcaggtgaaccttaacaacgcaagccgtagccagagctctcacagctacgatgattccacattgccactgatagaccgtaaccaaaaatctgacaaaaagccggatagggaggagatccagatgagcaatatgggcagcaacaccaagtctctcgataacaattactccaccccaaacgagaggggagatcataaccgcacactcgatcgcagtggcgatctaggggatatggagccgctgaagggaacaacaccacttatgcagaagatctag

SEQ ID NO: 38114 - DNA, 2499 bp, Artificial Sequence
  derived and/or modified sequence
atgcaggaaccaggccagattgtcgaaacctatactgaggaggatcccgaaggcgccatgtctgtagtgtccgtagaaaccagcgatgacggcacaacccgcaggactgagaccaccgtaaaaaaagtcgtcaagacagtaaccacccgtacagtgcagcctgtggctatggggccagatgggctccccgtggacgccagcagcgttagtaataactacatacagactctcggacgagattttcgcaagaacggcaacggcggtccgggaccttatgtgggacaagctggcactgccaccctgcccaggaacttccattatccacctgatggatatagcagacattacgaagacggctaccctggcggcagcgacaattatggctcccttagccgggttacgcgaatcgaggaaaggtatcgcccatctatggagggatatcgggccccatctagacaggatgtgtacggcccccaaccgcaggttcgggtgggcggaagtagtgtagacctccacaggttccatcccgagccctatgggctggaggatgatcagcggtccatgggttatgatgatctcgattatggaatgatgtccgattacggcacggcgagacgaacaggaaccccctcagacccccggcggcgccttcggagttatgaagacatgatcggcgaagaagtcccatccgaccagtactactgggcccctcttgcccagcacgaaagagggtctctggcctcactcgattctctgcggaaaggtggtcctcctccacccaattggcgtcagccagagcttccagaggtcatagcaatgcttggcttcagactggatgccgttaaatccaacgccgccgcttacctacaacacctgtgctaccgaaatgacaaggttaagactgacgtaaggaaacttaagggcatccccgtgctcgtgggactcctagatcatccaaaaaaagaagtccatttaggcgcatgcggggcccttaagaacatatcttttggaagggaccaggacaataagatcgccatcaagaattgcgacggggtccccgcccttgttagactcctgaggaaggcgagggacatggacttgacggaagtgatcaccggaactttatggaacctctctagtcatgatagcattaagatggaaatcgttgaccatgccctccacgcactgacagacgaggttatcatcccacattccggttgggaacgcgagcctaacgaggattgtaagcctcggcatatcgaatgggaatccgtgttgacgaataccgccggctgtttgcggaatgtttcatctgagcgctctgaggcgagacgaaaattgagggaatgtgatgggctggtcgacgcattgatctttattgttcaggcggagatcggtcagaaggattccgacagtaaactggtggagaactgcgtttgcctgctgcggaacctgtcataccaagtgcacagagagattccccaggccgaaaggtaccaagaagccgccccaaacgttgccaataacacaggaccgcacgctgcctcatgtttcggcgcaaagaaggggaaaggcaagaagcccatagaggaccctgccaatgacaccgtcgattttcccaaacggacaagtccagcaagaggttacgaactactgtttcaacctgaagtggtgagaatctatatcagtctccttaaggaaagcaagacccctgccattttggaagcgtctgccggagctatccagaatttgtgtgccgggcggtggacctatggtagatatatcaggagtgcattgagacaagagaaggcattgagcgctatagccgatctgctgactaacgaacacgaaagagtcgtcaaagccgcctccggagccctccgaaacttggctgtggatgctcggaataaagagttgataggcaaacacgcaatccctaatctggtaaaaaaccttcccgggggccagcagaacagttcatggaacttttcggaagatacagtgatcagcattctgaataccattaatgaagtgattgctgaaaaccttgaggctgcaaagaagcttcgggaaacacagggcatcgaaaagttggtcctcattaataaatcgggcaaccggtcagagaaagaagtcagggccgccgccctcgtgctccagacaatctggggctacaaagagctccgtaaacctttggagaaggaaggttggaaaaagagcgatttccaggttaatttaaataatgcatccagatcacaaagttctcactcctacgacgactccaccctgcctctgattgataggaaccaaaagagcgataagaagcccgaccgagaggaaatccagatgagcaacatggggtcaaatacgaaaagtctggataataactactcaacacccaacgagagaggtgatcacaacagaaccctggacagatccggcgacctgggagacatggaacccttaaagggaactaccccactgatgcagaagatatag

SEQ ID NO: 38115 - DNA, 2499 bp, Artificial Sequence
  derived and/or modified sequence
atgcaggaaccagggcaaatcgtagagacctacaccgaggaggaccctgaaggggcaatgagcgttgtgagcgttgagacgagcgatgatggtaccacccgcagaaccgaaacaacagtcaagaaagtcgttaagactgtgacaacaagaacggtacagcccgtcgccatggggcccgacggccttccggtggacgcaagttccgtgagtaacaactacatccagactctgggaagagacttccgcaagaatggaaatggtgggcccggaccatatgtcggccaggctggcaccgcaaccctacctcgcaacttccactatccacctgacggctactctagacactatgaggacggttacccagggggtagtgacaattatgggtccctgtccagggtcacacgaattgaagagcgctatcggccttcaatggagggatatcgcgctccttctagacaggacgtctacgggccacaaccccaggtaagggtgggcgggtctagtgtggacctacacagattccacccggagccctatggtttggaggacgatcagcggagtatggggtacgatgacctcgattacggtatgatgtccgattacggaacagcacggcgcacgggaactccaagcgaccccagaaggcggttgagaagctacgaggacatgataggagaagaggtacccagtgatcagtactactgggcaccattagcccagcacgagcggggatccctagcgtctctggactccctgcgaaagggcgggcccccaccacctaactggcgccagccggaactgccagaagtaatcgcgatgttggggtttaggctggatgccgtgaaaagtaatgctgcagcctacttacagcacctctgttacagaaacgacaaagtcaaaacagatgtgaggaagctcaagggcattcctgttcttgttgggctacttgatcaccccaagaaagaggttcatctgggagcttgcggtgctctgaagaacataagcttcggccgggatcaggacaacaagatagctattaagaactgtgatggggtcccggctctggtgagactgttgcgaaaagccagagacatggatctgactgaggtcatcacaggtaccctttggaatctgtcctcacatgactctatcaaaatggaaattgtggaccacgcacttcatgctctcacggacgaggtgataatccctcatagcggatgggaacgggagcccaatgaagattgcaaacctaggcatatcgaatgggaatcagtccttacaaatacagccggctgtttgaggaatgtctcatctgaacgatcagaggcaagacgcaagctgcgggagtgtgatggactggtcgatgccctaattttcattgttcaggcagagatcggacagaaagattctgacagcaaactagtcgagaactgcgtctgccttctgagaaatttatcttaccaggtccacagggagataccacaggctgagagataccaagaggctgctccaaacgtggctaacaatacgggcccacacgcagcgagctgttttggtgctaagaaagggaagggcaagaagccaatcgaagatcccgctaatgacaccgtcgacttccccaagcgaaccagccccgccaggggatatgagctgctctttcaaccagaggtggttaggatttatatcagcctgctgaaggagtctaagactcccgcaatcttagaagcatctgcgggagccattcagaatttgtgtgcaggtagatggacatatgggagatacatcagaagcgccttacgtcaggagaaggcactgtctgctatcgcagacttgctcacaaatgagcacgaacgcgtggtgaaggctgcaagcggtgcacttagaaacctggccgttgatgccagaaacaaagaattgattggcaagcacgccatacccaatcttgtgaaaaacttacctgggggccagcagaactcttcttggaacttttctgaggacactgtgatcagtatcctcaacaccataaacgaggtaatcgcggagaatctggaggcagcgaaaaagttacgggagactcaggggattgaaaaattagtgctgatcaataagagcgggaaccgaagcgagaaggaagtaagagcagcagccctcgtcctgcagacgatctgggggtataaagagttgcggaaaccgttagaaaaagaaggctggaagaagagcgactttcaggttaatctgaacaacgcttcacgcagccagtcctcccactcatatgatgactcgacactgccattgatcgaccgcaaccagaagagtgataaaaagcccgaccgggaggaaattcagatgtcaaacatgggtagcaacactaagtcgctcgataacaattattccactcctaacgaacgaggagaccacaaccgcacgctggaccggtcaggagacctaggcgacatggagcccctgaagggtaccaccccactcatgcagaagatctag

SEQ ID NO: 38116 - DNA, 381 bp, Artificial Sequence
  derived and/or modified sequence
atgatcggagaagaggtccctagcgatcaatactattgggctccgctagcacagcacgagcgcggaagcttggcctctctggatagcctgcggaagggaggcccgccgccgccaaattggagacagccggaactacctgaagtcattgcaatgttgggcttccgtctggatgctgtcaaaagtaatgctgctgcctatctacagcacctgtgttaccgcaatgacaaagtcaaaactgacgtgcgaaagctaaagggcatacccgtgctagtggggctacttgaccatcctaagaaggaagtgcatctgggagcttgtggagctcttaaaaatattagttttggacgggaccaagataataagatcgcgataaagaattag

SEQ ID NO: 38117 - DNA, 2499 bp, Artificial Sequence
  derived and/or modified sequence
atgcaggagcccggccagatcgtggagacctacacagaggaggaccctgagggcgccatgtctgtggtgtctgtggagaccagtgatgatggcaccaccaggagaacagagaccaccgtgaagaaggtggtgaagacagtgaccaccaggacagtgcagcctgtggccatgggcccagatggcctgcctgtggatgccagctctgtgagcaacaactacatccagaccctgggccgggacttcaggaagaatggaaatggaggccctggcccctacgtgggccaggccggcacagccaccctgcccaggaacttccactaccccccagatggctacagccgccactatgaagatggctacccaggcggcagtgacaactacggcagcctgagccgggtgacccgcatcgaggagcgctaccggcccagcatggagggctaccgggcccccagccggcaggatgtgtatggcccccagccccaggtgcgggtgggcggcagctctgtggacctgcaccgcttccaccctgagccctacggcctggaggatgaccagaggtccatgggctatgatgacctggactatggcatgatgtctgactatggaacagccaggagaacaggcacccccagcgacccccggcggcggctgcggagctatgaggacatgattggagaggaggtgcccagcgaccagtactactgggcccccctggcccagcacgagcggggcagcctggccagcctggacagcctgaggaagggcggccccccaccacccaactggaggcagcctgagctgcctgaggtgattgccatgctgggcttccggctggatgctgtgaagagcaatgctgctgcctacctgcagcacctgtgctacagaaatgacaaggtgaagacagatgtgaggaagctgaagggcatccctgtgctggtgggcctgctggaccaccccaagaaggaggtgcacctgggcgcctgtggggccctgaagaacatcagctttggccgggaccaggacaacaagatcgccatcaagaactgtgatggagtgcctgccctggtgcggctgctgaggaaggcccgggacatggacctgacagaggtgatcaccggcaccctgtggaacctgagcagccatgacagcatcaagatggagatcgtggaccacgccctgcacgccctgacagatgaggtgatcatcccccacagcggctgggagcgggagcccaatgaagactgcaagcccaggcacatcgagtgggagagcgtgctgaccaacacagctggctgcctgagaaatgtgagcagcgagaggtctgaggcccggaggaagctgagagaatgtgatggcctggtggatgccctgatcttcatcgtgcaggccgagatcggccagaaggacagcgacagcaagctggtggagaactgtgtgtgcctgctgaggaacctgagctaccaggtgcaccgggagatcccccaggccgagcgctaccaggaggccgccccaaatgtggccaacaacacaggcccccacgccgccagctgcttcggggccaagaagggcaagggcaagaagcccatcgaggaccctgccaatgacacagtggacttccccaagaggaccagccctgcccggggctatgagctgctcttccagcctgaggtggtgcgcatctacatcagcctgctgaaggagagcaagaccccagccatcctggaggccagcgctggggccatccagaacctgtgtgccggccgctggacctacggccgctacatccgcagcgccctgcggcaggagaaggccctgagcgccatcgctgacctgctgaccaatgagcacgagcgggtggtgaaggccgccagcggggccctgaggaacctggccgtggatgccaggaacaaggagctgattggcaagcacgccatccccaacctggtgaagaacctgcccggcggccagcagaacagctcctggaacttctctgaagatactgtcatcagcatcctgaacaccatcaatgaggtgattgctgagaacctggaggccgccaagaagctgcgggagacccagggcatcgagaagctggtgctgatcaacaagagcggcaacagaagtgagaaggaggtgcgggctgctgccctggtgctgcagaccatctggggctacaaggagctgaggaagcccctggagaaggagggctggaagaagagtgacttccaggtgaacctgaacaatgccagccgcagccagagcagccacagctatgatgacagcaccctgcccctgattgacaggaaccagaagagtgacaagaagccagaccgggaggagatccagatgagcaacatgggcagcaacaccaagagcctggacaacaactacagcaccccaaatgaaagaggagaccacaacagaaccctggacagaagtggggacctgggggacatggagcccctgaagggcaccacccccctgatgcagaagatctag

SEQ ID NO: 38118 - DNA, 1833 bp, Artificial Sequence
  derived and/or modified sequence
atgattggagaggaggtgcccagcgaccagtactactgggcccccctggcccagcacgagcggggcagcctggccagcctggacagcctgaggaagggcggccccccaccacccaactggaggcagcctgagctgcctgaggtgattgccatgctgggcttccggctggatgctgtgaagagcaatgctgctgcctacctgcagcacctgtgctacagaaatgacaaggtgaagacagatgtgaggaagctgaagggcatccctgtgctggtgggcctgctggaccaccccaagaaggaggtgcacctgggcgcctgtggggccctgaagaacatcagctttggccgggaccaggacaacaagatcgccatcaagaactgtgatggagtgcctgccctggtgcggctgctgaggaaggcccgggacatggacctgacagaggtgatcaccggcaccctgtggaacctgagcagccatgacagcatcaagatggagatcgtggaccacgccctgcacgccctgacagatgaggtgatcatcccccacagcggctgggagcgggagcccaatgaagactgcaagcccaggcacatcgagtgggagagcgtgctgaccaacacagctggctgcctgagaaatgtgagcagcgagaggtctgaggcccggaggaagctgagagaatgtgatggcctggtggatgccctgatcttcatcgtgcaggccgagatcggccagaaggacagcgacagcaagctggtggagaactgtgtgtgcctgctgaggaacctgagctaccaggtgcaccgggagatcccccaggccgagcgctaccaggaggccgccccaaatgtggccaacaacacaggcccccacgccgccagctgcttcggggccaagaagggcaagggcaagaagcccatcgaggaccctgccaatgacacagtggacttccccaagaggaccagccctgcccggggctatgagctgctcttccagcctgaggtggtgcgcatctacatcagcctgctgaaggagagcaagaccccagccatcctggaggccagcgctggggccatccagaacctgtgtgccggccgctggacctacggccgctacatccgcagcgccctgcggcaggagaaggccctgagcgccatcgctgacctgctgaccaatgagcacgagcgggtggtgaaggccgccagcggggccctgaggaacctggccgtggatgccaggaacaaggagctgattggcaagcacgccatccccaacctggtgaagaacctgcccggcggccagcagaacagctcctggaacttctctgaagatactgtcatcagcatcctgaacaccatcaatgaggtgattgctgagaacctggaggccgccaagaagctgcgggagacccagggcatcgagaagctggtgctgatcaacaagagcggcaacagaagtgagaaggaggtgcgggctgctgccctggtgctgcagaccatctggggctacaaggagctgaggaagcccctggagaaggagggctggaagaagagtgacttccaggtgaacctgaacaatgccagccgcagccagagcagccacagctatgatgacagcaccctgcccctgattgacaggaaccagaagagtgacaagaagccagaccgggaggagatccagatgagcaacatgggcagcaacaccaagagcctggacaacaactacagcaccccaaatgaaagaggagaccacaacagaaccctggacagaagtggggacctgggggacatggagcccctgaagggcaccacccccctgatgcagaagatctag

SEQ ID NO: 38119 - DNA, 381 bp, Artificial Sequence
  derived and/or modified sequence
atgattggagaggaggtgcccagcgaccagtactactgggcccccctggcccagcacgagcggggcagcctggccagcctggacagcctgaggaagggcggccccccaccacccaactggaggcagcctgagctgcctgaggtgattgccatgctgggcttccggctggatgctgtgaagagcaatgctgctgcctacctgcagcacctgtgctacagaaatgacaaggtgaagacagatgtgaggaagctgaagggcatccctgtgctggtgggcctgctggaccaccccaagaaggaggtgcacctgggcgcctgtggggccctgaagaacatcagctttggccgggaccaggacaacaagatcgccatcaagaactag

SEQ ID NO: 38120 - DNA, 2499 bp, Artificial Sequence
  derived and/or modified sequence
atgcaggagcccggccagatcgtggagacctacaccgaggaggacccggagggggctatgtctgtggtctctgttgagacaagtgatgatgggactacgcgaaggactgagacaacagtcaaaaaggtggtaaaaactgtgaccacacgaaccgtacaacccgttgcgatgggacccgatggactgcccgtagacgccagttcagtgtctaataactatatacagacactcggacgcgacttccgcaagaatgggaacggtggccctgggccctatgtaggacaggctggaactgccacactgcccagaaatttccactatcctccagacgggtactcaagacactacgaggacgggtaccctggagggtctgacaactacggcagcctcagccgggtgactaggattgaggaacgataccggccctccatggaggggtaccgtgccccctccaggcaggatgtctacggtccacagcctcaggtccgggtagggggctcttccgtggatcttcatcgctttcatcctgagccatacggtctcgaggatgaccagagatccatgggctacgatgacttggattatgggatgatgtctgattatggtaccgcccggcgcaccggcacaccgagtgaccccaggagaaggctccggtcctacgaggacatgatcggggaagaggtgccttccgaccaatactattgggcccctctggcccagcacgagagaggctccttggcgagcttagactctctccggaagggaggacccccaccccctaattggagacagcccgagttacctgaggtgatcgccatgctgggctttagactggacgccgtgaagtcaaacgcagccgcttatttgcagcacctgtgttatagaaacgataaagtaaagaccgatgtgcgaaagctgaaaggcattcctgtgctggtcgggctgctggaccacccaaagaaagaggtgcaccttggggcatgtggcgcactcaaaaatatatcatttgggcgagatcaggacaacaagatagccataaagaactgtgatggcgtaccggccttggttcggttgctcaggaaagcccgagacatggacctgaccgaagtgattacaggtacactttggaatctctcctcgcacgacagcattaagatggaaatcgtggatcacgcactgcatgctctcactgatgaggtgatcataccccattctggatgggaaagggagccaaatgaagactgtaagccgcgacatatcgagtgggagtctgtgctcactaacaccgcgggttgtctccgtaatgtcagcagtgaacgcagcgaagcccggcgcaaattacgggaatgtgatggactggtcgatgccctgatttttatagtgcaggcagaaatcggacagaaagattcagattccaagctggtggaaaattgcgtgtgcctccttagaaacctgagttatcaggttcacagagagatcccccaagcagaacggtatcaggaggccgccccgaacgtggcaaataacacaggaccccacgcagcttcgtgtttcggtgctaagaaaggtaaggggaaaaagccgatcgaggaccccgccaacgatacagtggatttcccaaaaaggacaagtcctgcaagaggttatgagctactcttccagccggaggtggtcagaatttacatatctcttttgaaggagtcaaagacacccgctattctcgaggcttctgctggagccattcaaaacctttgtgcaggccggtggacatacgggaggtatatccgatctgccttgaggcaggaaaaagctctttccgctattgcggacctccttaccaacgaacacgagcgcgtggtgaaagccgcatccggcgccctcaggaatcttgccgtggacgccagaaacaaagagctgatcggaaagcacgcgatacccaatctcgtgaagaaccttcccggaggtcaacagaattcaagttggaatttttccgaggatacagtgatcagcattttgaacacgatcaacgaagtcatcgctgaaaacctggaggccgcaaaaaaactgagagaaacacaagggatcgagaaactggtcctgataaacaaatccgggaatagatcagagaaggaagtacgagccgctgcacttgtcctccaaactatttggggctacaaagaactaagaaagcctctcgagaaagaaggttggaagaagtctgacttccaggtcaatcttaacaatgcatcgcgatctcagagcagtcacagttatgatgacagcactctgccgctgatcgataggaaccagaaatcagacaagaagcccgacagggaggagattcagatgtcaaatatgggctccaatacaaaaagtctggataataattattcaacccctaatgaaaggggggaccacaataggacccttgatagaagcggggatctaggcgacatggagccgttaaagggaacaacgcccctcatgcaaaaaatttag

SEQ ID NO: 38121 - DNA, 1833 bp, Artificial Sequence
  derived and/or modified sequence
atgatcggcgaggaggtgcccagcgaccagtactactgggccccccttgcccagcatgaacgagggtcactggcatcactggattctctgagaaagggaggacctcctccccctaactggcggcaaccagaattgcctgaagtgatcgccatgctcggctttagactcgacgcggtgaaatccaatgctgccgcatatcttcagcatctatgttacagaaacgataaggttaagacagacgtgcggaagctgaagggcatccctgtcctcgtcgggttgctggaccaccccaaaaaggaggtgcatctcggagcctgcggtgctctcaagaacatctctttcggccgcgaccaggataataaaatcgcgattaagaactgcgacggagtccctgccttagttcggctcctgcgcaaagcccgcgacatggacttaacggaggttattactgggaccctctggaatctttcgtctcatgacagtattaagatggaaatcgtggatcacgccctgcatgcccttactgatgaagttattataccccatagcggctgggaacgagagcctaatgaggattgtaaacctagacacattgaatgggaatcagtgctgaccaatactgcagggtgccttcgtaacgtgtcctccgagaggtctgaagcccgaagaaagttacgcgaatgcgacggcctcgtggatgcactcatcttcattgtgcaggctgagattggacaaaaagacagcgactccaagctggtggagaactgcgtgtgcctattgagaaatctttcctatcaggtccatagggaaattccccaagccgaacgctaccaggaagccgcccctaacgtcgccaataataccgggcctcatgctgcaagctgctttggcgctaagaagggcaaaggtaaaaagccgatcgaggaccccgctaacgataccgtcgactttccaaaacgcacatccccagcccgcggctatgagctcctcttccaacccgaggtcgtaagaatctatatctctttgctcaaggaatctaaaactcccgctattctggaagccagtgccggagccatccagaatctgtgcgcagggcgctggacgtatggacgttacattaggagcgctctgagacaggaaaaggctctcagtgcaatcgcagacctgctgacaaatgaacacgagagggtagtaaaggcagcttccggggccttacgaaatctcgctgtcgacgccagaaataaggagctcatcggaaaacatgctataccaaatctcgtgaagaacttacccgggggccagcaaaacagcagctggaacttctcagaggacacagtaatatctattttgaacacaataaacgaggtgattgccgagaatctggaggccgcgaaaaaactgcgggagacgcagggtatcgagaaactggtcttaattaacaagagcggtaataggtctgagaaggaggtccgggccgcggccctggtcttacagactatctgggggtataaagaattgagaaagcctctggaaaaggagggatggaagaagtccgactttcaggttaatctcaacaatgcatcacgttcccaaagttcacactcttacgacgactccactttacctctgatagacaggaatcagaagtccgataagaagccagatcgcgaagagatccagatgagcaatatgggatcgaatacaaagagtctagataataactactctacgcccaacgagaggggcgatcacaaccgcaccttggaccggtcaggggacctgggggacatggagcccttaaaaggtaccacacccctcatgcaaaagatctag

SEQ ID NO: 38122 - DNA, 2499 bp, Artificial Sequence
  derived and/or modified sequence
atgcaggagcccggccagatcgtggagacctacaccgaggaggaccctgaaggcgcaatgtcagtggtctctgtggaaacaagtgacgatggtacaactagaaggacagagacaactgtcaaaaaagtagtaaaaaccgtgactacccggaccgtgcagcccgtcgccatgggacctgatgggctacccgtcgatgcatccagcgtatccaacaattatattcagacgctgggacgggattttagaaaaaatggtaacggcggtccaggaccctatgtagggcaggcgggtaccgccacccttccgaggaattttcactaccccccggacgggtatagccgtcattacgaggacggataccccggcggcagcgataattacggttcactgtcccgcgtgacccggattgaggaaaggtaccgccctagcatggagggctaccgtgcaccttcgcgtcaagatgtctatggcccccaaccccaggtccgcgtcggaggttcatctgtggacctgcatagattccaccccgaaccgtacggacttgaagatgatcagcgctccatgggctacgacgacctggactatgggatgatgtctgactacggtactgcccgacgcacaggcaccccatcagacccaaggcggcgtctgaggtcatacgaggacatgattggggaggaggtcccatctgaccagtattactgggcacctctggcccagcacgaacgtggctctctcgcgtccctggactcgctgcggaagggcgggccacccccgcccaactggaggcagccagaactccccgaagtgattgccatgctggggttccgactggacgccgtgaagtctaatgccgccgcatatttgcaacacctctgctaccgcaatgacaaggtgaagaccgacgtccgtaaattaaagggaataccggttctggtcggcttactcgatcacccgaaaaaggaggtgcatttaggggcatgtggagctctcaagaacatcagcttcggacgtgaccaagataacaagatcgccatcaaaaattgtgacggtgtgccagccttagtcagacttctcaggaaggcaagggacatggacttaaccgaggtcatcaccggcactctttggaacctatcttctcacgatagcattaaaatggagatcgttgatcatgctctgcacgccctgaccgacgaagtcattattccccatagcggctgggagcgggaacccaatgaagactgcaagccccgccacatcgaatgggagtccgtgctgacaaatacggccggatgtctgagaaacgtttcttccgaacgaagtgaggcccgacggaagctcagagagtgtgatgggctcgtggacgcattaattttcatagtgcaggccgaaatcggccagaaggacagcgattctaaacttgtggaaaattgcgtgtgcctgctgagaaatcttagctaccaggtgcatcgggagattccgcaggccgagagatatcaggaagcagcccctaacgtcgccaataataccggcccccacgccgcaagttgtttcggagctaagaagggaaagggtaagaaacccatcgaagacccggctaatgatacagtggacttccctaagcgcacttccccagcgcgtggctatgaactactattccagcccgaagtggtaagaatctatatctccctgttaaaggagtcaaagactccagcaattctggaagcttccgccggagccatacaaaatctgtgtgcagggcggtggacctacggccgatacattcggagcgccctcaggcaggaaaaggcacttagcgcaatcgccgaccttctgacaaatgagcacgagagagtcgtaaaggcggcatccggcgctctcaggaaccttgccgtggacgcgaggaataaggagctaattggcaaacatgccattcccaaccttgtgaaaaatttgccaggcggtcagcagaattcctcctggaatttctccgaagataccgtgatttctattctcaatacgattaacgaggtgatcgctgaaaatctggaggctgctaaaaagctgcgagaaactcagggtattgagaaacttgtactgataaacaagtctggcaaccggagtgaaaaagaggttagggccgccgccctggtgctgcaaactatttggggatataaggagctgaggaagcccctggagaaggaaggctggaaaaaatccgacttccaggtgaaccttaacaatgcctctcggagtcagagctcacattcttacgacgacagtacactgccccttatcgaccgaaaccagaagtctgataaaaagccagatcgtgaagaaatccagatgtctaacatgggctcaaataccaagagtcttgacaataattacagcactccgaacgagcgcggtgaccacaacagaaccctcgaccgatcaggagatcttggggatatggaacccctgaaggggacaaccccccttatgcagaagatttag

SEQ ID NO: 38123 - DNA, 2499 bp, Artificial Sequence
  derived and/or modified sequence
atgcaggagcccggccagatcgtggagacctacaccgaggaggacccggaaggtgccatgtccgtggtgtctgtggagaccagcgatgacggtacaacccgaaggactgaaaccacagtcaagaaagtggttaaaacagttacgaccaggacggtgcagcctgttgccatgggccctgatgggctgcctgtggacgcttccagcgtgagcaacaattacattcagaccctaggcagagattttcgcaagaacggaaacggtggcccaggcccctatgtcggccaggctgggacggcaacgttgccgaggaatttccactatcctccagacgggtacagcagacattatgaggacgggtatcctggagggtccgataactacggaagcttgagccgcgtgactcgcatcgaagagcggtaccggccttccatggaaggataccgcgctccatcaagacaggatgtgtatggaccacagcctcaggtgcgcgtgggcggaagttccgttgaccttcatagatttcacccagagccttatggcctggaggacgatcagcggtccatggggtatgatgacctggattacggcatgatgagcgattatggtaccgccagacggacgggaacaccatcggacccaaggaggcggctgagaagttacgaggatatgatcggtgaggaagttccaagtgaccagtattattgggcacctctcgcgcagcatgaacgaggatccctagcaagcctcgatagtctgaggaagggcggtccccctccccctaattggagacaaccggaacttcctgaagtgattgcgatgttgggatttcgactcgacgccgtcaagtctaacgcagcagcctatctgcagcatctttgttataggaacgataaggttaaaaccgacgttcgcaagcttaaaggcatccccgtgctggtggggctgctggatcatccaaagaaggaagttcatctgggggcttgtggtgcccttaaaaatataagcttcggacgcgatcaagacaacaaaatagctataaagaattgcgacggagtgcccgctctagtgcggctgctgcggaaggcccgggatatggacctgacagaagtgattacgggcactctgtggaacctcagctcccatgattccataaagatggagatcgtagaccacgctttgcacgcccttactgatgaagtgatcatccctcattcaggatgggagcgcgaacccaacgaagattgtaagccaaggcacatagaatgggaatctgtgctgacaaataccgcagggtgtctccggaatgtatcctccgaacgcagtgaagcgcgccgcaaactccgcgagtgtgatgggctggtggatgcgcttatctttatcgttcaggccgagatcgggcaaaaagactcggactcgaaattagtggaaaattgcgtctgcctcctgcgtaacctatcataccaggtgcaccgcgagattccacaggccgagcgatatcaggaagcagcgccaaacgtagcaaataataccggtccacatgccgccagctgcttcggggcaaaaaaggggaaaggtaagaaacccattgaggacccagctaatgacaccgtggatttccccaagcggacttctcccgcacgtggatacgaactactcttccagcctgaagtggtgcgaatctatattagtctcttgaaagagagtaaaacgcccgctattttggaggcatcggccggcgccatacaaaatctgtgcgcaggaagatggacttacggccgctacattaggtccgctttgcgacaagaaaaagcactttccgcaattgcagatcttctcaccaacgagcacgagcgtgtcgttaaagctgcctccggagccctccggaacctggcagtggatgcgcgtaacaaggagttaatcggcaaacacgcaatccctaatctcgtgaagaatctgccagggggccagcagaacagttcctggaacttctctgaggacaccgtgatctctatcctcaatactatcaacgaggtaattgccgaaaacctggaagccgcaaagaagctgagggagacgcagggcatcgaaaagctggtattaataaataaatccggtaaccggtccgagaaggaagtgcgcgccgccgccctcgtgcttcagactatttggggatacaaggaactgcgaaagccgcttgaaaaagaaggctggaagaaatccgacttccaggtgaacctcaacaatgccagtagaagtcagtcatctcatagctatgatgactccactctgcctctcattgataggaatcagaaaagtgataagaagccagatagggaagaaattcagatgtccaatatgggttccaacaccaagtccctcgacaataattactccactcctaacgagcgcggtgaccataacaggacactggacagatcaggtgacttgggcgacatggagcccctcaaaggaaccacccctcttatgcagaagatctag

SEQ ID NO: 38124 - DNA, 2499 bp, Artificial Sequence
  derived and/or modified sequence
atgcaggagcccggccagatcgtggagacctacaccgaggaggacccagagggcgccatgtctgtagtgtctgttgagacctctgacgatgggaccactcgaaggaccgaaacaaccgtgaaaaaagtcgtaaagacagtgaccacgaggacagtgcagcctgtagccatggggccggatgggctgcctgttgatgctagctctgttagcaataactacatccagacgctgggtcgagactttaggaaaaatggtaatggggggcccggcccttatgtcggccaagcgggtaccgctacccttccgcgcaatttccactatccacctgacgggtacagcaggcattatgaagatgggtatcctggaggaagtgacaattatggttcgctgagtagagtgacaaggatagaggagcgctacagaccttccatggagggctatcgggcgccgagtcgccaagatgtttacggaccccagccccaggtacgtgtgggcggctcctcagtggacctgcacagattccaccccgaaccctacggcctggaggacgatcaacggtctatgggatatgatgacttggattatggcatgatgagtgactatggtaccgctcgacgcactggaaccccctccgatccacgccgcagactacgaagttatgaagatatgattggggaggaagtaccttctgaccaatactattgggcccccctggctcagcatgagagaggcagtcttgcatccctcgatagtcttagaaagggaggacccccacctcccaattggcgtcaaccggaattaccagaggtcatcgcaatgttggggtttaggttagatgcagtcaaatcaaacgccgccgcctatcttcagcacctgtgctatcggaacgacaaagtgaaaaccgatgtcagaaaactcaaaggcatacctgttctggtgggcctgttagaccacccaaagaaggaagttcatctaggcgcctgtggagccctgaagaatatcagcttcggcagggaccaagacaataaaatagccatcaaaaactgcgatggcgtgcctgctctggtgcggttgttgcgcaaagcaagagatatggacctgaccgaggtaatcactgggacattgtggaatttgagcagtcatgactctatcaaaatggagatagtggaccacgcactgcacgctcttactgacgaagttatcatccctcattcgggttgggaacgggaacctaatgaggattgtaaaccacgacacattgagtgggaatcagtcctgactaataccgcagggtgtctgcgcaacgtgtcttcagaacggagcgaagccaggaggaagctgcgggagtgtgacgggttagtggacgcattaatcttcatcgtccaagccgagatcggccagaaagattccgacagtaaactggtcgagaactgtgtttgtcttctcagaaacctcagctatcaggtccatagggagatccctcaagccgagagataccaggaagccgcccctaacgtcgcaaataacactggaccgcacgctgccagctgcttcggagccaaaaagggcaagggcaagaagcctatagaagaccccgccaatgacacagttgatttccctaagcgcacaagtcccgcccggggctacgagctcctgtttcagcccgaggttgtccggatatacatatcattattgaaggagagcaagacacctgctatcctcgaagccagcgctggagctatccagaacctctgtgcaggaagatggacctacggccgttacatcagatctgcgcttaggcaggagaaagccctatctgcgattgccgacttgttaaccaacgaacatgagagagtggttaaggccgcctctggagcactgcgcaacctggccgtcgacgcgcgaaataaggagcttataggcaaacacgctattcctaatctggtgaaaaacctgcctggcggacagcagaacagcagttggaacttttccgaggacacggttatcagcatactgaatacaatcaacgaggtaatcgcagagaacctggaagcggccaaaaagctgcgtgaaacccaagggatagaaaagctggtactgattaataagtcagggaatcgatcggaaaaggaagtgagggcggccgccctggtgctgcaaactatctggggatacaaagagctgcgaaaacctctcgagaaagagggatggaagaagtctgactttcaggtcaatcttaacaatgcaagccgtagccagagcagccactcttacgacgatagcacactgcctctgatagacagaaaccagaaatccgataaaaaacccgaccgtgaagaaatccaaatgtccaatatgggcagtaacaccaaatccctggacaataactacagcacaccaaacgaacggggcgaccacaacaggacacttgaccgaagcggcgatctgggggacatggagcctctcaaagggactactcccttaatgcagaagatttag

SEQ ID NO: 38125 - DNA, 381 bp, Artificial Sequence
  derived and/or modified sequence
atgatcggcgaggaggtgcccagcgaccagtactactgggcccccttggcccaacacgagagaggcagtctcgcctcccttgattctcttcggaaagggggaccgcccccccccaactggaggcagcccgagctccctgaagtgatcgctatgctggggtttcgactggatgccgtaaagtcaaatgccgcagcttacctccagcacctgtgctatcggaatgataaggtgaaaaccgatgttagaaaactcaaaggaatcccagtactcgtggggctgctggatcatccgaaaaaggaggtccatttgggcgcctgcggagcattgaagaatatctcattcgggcgggaccaagataacaagatagccataaagaattag

SEQ ID NO: 38126 - DNA, 2499 bp, Artificial Sequence
  derived and/or modified sequence
atgcaggaaccaggacagatcgtggagacctacaccgaggaagaccccgaaggggcaatgtcagttgtcagcgtggagacaagtgacgacggtactacaagacggactgagacgacagttaagaaggttgttaagaccgttacaacccgcacagtccagcctgtggcaatggggcctgacgggttgcccgtcgatgccagctctgtctcaaataattatatccagaccctcggtagagattttcgaaagaatgggaacgggggtccgggaccatatgttgggcaggcaggcacagccaccctgcctcggaacttccactacccaccagacggctattcccgtcattatgaagacggctatcctggcggatccgacaattacgggtcactctcacgggtgacaaggattgaagagcgctatcgccctagcatggagggctaccgtgctccttctaggcaggatgtgtatgggccacagccccaggtccgtgttggtgggtctagcgtggaccttcaccgctttcaccctgagccctacggtttagaagacgaccagcgctccatgggctacgacgatctcgactatggcatgatgagtgattacgggaccgcgcgaaggaccggtactcctagcgaccccaggcgcagactccggagctatgaagacatgatcggcgaagaagtaccaagcgatcagtactattgggccccattggcgcagcacgagcgaggaagtctagcaagtctggacagcttgcggaagggcggtcctccccctcctaactggagacagccagaactgcctgaggtcatcgctatgctgggttttcggctggatgctgtgaaatcaaatgcagcagcttacctacaacacctctgttaccgcaacgacaaagtcaagactgatgtccggaagttaaaggggatcccggttctggtggggctcttggatcatcctaagaaagaggtgcaccttggtgcatgtggtgctctcaagaacatcagtttcgggagggatcaggacaataagattgcgattaaaaactgcgatggcgtgccggcacttgtccgactgcttaggaaggccagagacatggacctgacagaggtcatcaccggcaccctgtggaacctgagttcacacgatagtattaaaatggagatcgtcgaccacgcgctgcacgctctgaccgacgaagtgattattcctcactctgggtgggaaagagagcccaatgaagactgcaaacctcggcatatagagtgggaaagcgtcctgaccaacacagcgggttgtctaaggaatgtatctagcgagagatcagaagctcgcaggaagctgagggagtgtgacgggctagtagacgcattaatctttatagtgcaggcagagataggccagaaggatagcgatagtaaacttgtggagaactgcgtttgcctgcttcggaatctgtcttaccaggtgcacagggaaattccacaggccgagaggtaccaggaggctgcccctaacgtggccaacaataccggccctcacgcagcctcttgttttggcgcaaaaaaaggaaaaggcaagaaacccattgaggatcccgctaacgatacggtggactttccaaagcgtacatctcccgctcggggatacgagctgctgttccagccagaagtagttcggatatacatctccctgctcaaagaaagcaagacccccgctattctggaggctagcgccggagccattcagaatttgtgtgcaggacggtggacttacggaagatatatcaggtctgcgctgagacaggaaaaggcgttaagtgctatcgctgaccttttgacaaatgaacatgagcgagtcgtgaaagccgcatctggcgctttgcggaatctcgcagtagatgccagaaataaggagctcatcggcaagcacgcaatccctaacctggtgaaaaacctgccaggaggacagcagaactcctcttggaacttctccgaggacacagttatctccatcctgaataccattaatgaagtcatcgccgagaacttggaagccgctaaaaagctgagagagactcagggtatcgaaaaattagtgctcatcaacaaatccggaaacagatcagagaaggaggtacgcgctgccgcactggtgctgcagaccatttgggggtacaaagagctacggaagcccttagagaaggaagggtggaagaagtcagactttcaggtgaatctgaacaacgcctcaagatcgcaaagcagccacagttacgacgattccaccctcccgcttatcgaccggaatcaaaaatctgacaagaaaccagatagggaagaaattcagatgagcaacatggggtctaatactaagagcctggacaataattattctacccctaatgagcgcggagatcataaccggaccttggataggtccggggatctcggcgacatggagcctcttaaaggaactaccccgcttatgcagaaaatctag

SEQ ID NO: 38127 - DNA, 1833 bp, Artificial Sequence
  derived and/or modified sequence
atgatcggggaggaagttccttccgaccagtattattgggcccctcttgcccagcatgaacgtggctcactggcgagcctcgactcccttcggaagggtggcccaccacccccaaattggaggcagcccgagctgcctgaagtgatcgcgatgctcgggttccggctggatgctgtgaagagcaatgccgcagcgtacctgcagcacctgtgttacaggaacgataaggtaaaaacagatgtgcgaaaactgaagggcatcccagtcctggtgggcttgctagatcacccaaaaaaagaggttcatctgggggcatgtggggcactgaaaaacatctcgttcgggcgtgaccaagataacaaaattgcgattaaaaattgtgatggcgtgcctgccttagtgcgactgctgcgaaaagcacgggacatggatctaactgaagtgatcactggaacactctggaatctgagctctcacgattcaatcaaaatggaaatcgttgaccacgctctgcacgccctcactgatgaggttataatacctcacagtgggtgggagagagaacccaatgaagactgtaaacccaggcatattgagtgggagtccgtactgacaaacaccgcgggatgtctccgcaacgtcagctctgaacgctcggaagcccgaagaaaactgcgggagtgtgacgggttagttgacgccctcattttcattgttcaagccgagatcggacaaaaggatagtgactcaaagctagtggagaactgtgtatgtttgctgcgcaatctgtcatatcaggtccaccgagagataccacaggccgagcgctatcaggaggccgcaccaaatgtcgccaataacacgggcccacacgctgcctcgtgctttggtgctaaaaaaggcaagggcaagaagccaattgaagacccagctaatgataccgttgacttccctaaacgcacaagccccgcacgcggttacgagctgcttttccaacctgaggtggtgcgcatttacatctccctgctgaaggagtcgaagacccctgcaatcctggaggcttctgcaggagctatccaaaacctttgcgcgggacgctggacctacggacggtacatcaggagcgcactgaggcaggaaaaagctcttagtgcaatagccgacctgctgactaacgagcacgaacgcgtggtcaaggccgcttctggggcattgcgaaatctggcagtcgacgccaggaataaggagctcatcgggaagcatgccattccaaatctggtgaagaacttacccggaggccagcagaattcctcctggaacttcagtgaggatacggtgatcagtattctcaacaccattaacgaggtgattgcagagaatcttgaagccgctaaaaagctgcgcgagacccagggaatcgagaaactagtactcattaataagtctggtaaccggtccgaaaaggaggtgagagcagccgctctggtcctccagaccatttggggatataaggagctacgtaagcccctggaaaaggaagggtggaaaaagtctgatttccaggtcaacctgaacaatgcatcaaggagccagtcttctcactcttatgatgattcaacccttcctctgatcgaccgaaaccagaagtctgacaagaaacccgacagagaggagatacagatgagtaacatgggcagcaacacaaaaagtctcgataataactattctacccccaacgagaggggggatcacaatcgcactcttgaccgcagcggggatctgggagatatggaacccttaaagggaactacgcccctgatgcaaaagatttag

SEQ ID NO: 38128 - DNA, 2499 bp, Artificial Sequence
  derived and/or modified sequence
atgcaggagcctggacagatagtggagacttacaccgaggaagatccagagggcgcaatgtctgttgttagtgttgagacctcggacgatgggacaacccggaggactgaaacaacagtgaagaaagtggttaagactgtgaccaccaggaccgtgcagcctgttgcaatgggcccagatggcctgcctgtggatgcttcttcagtgtccaataattacattcagacattggggcgagactttcgcaagaatggcaacggaggccctggtccgtatgtcgggcaggccggaacagcaactttgcctcggaatttccactaccctcctgacggatactcccggcattacgaagacgggtacccgggaggttccgacaattacggaagcctgtctcgggttacaaggatcgaggagagatatcggccaagtatggaagggtatagggcgccatcacgccaagacgtgtatggacctcaaccccaggtccgcgtggggggatcgtcagtggacctgcaccgctttcaccctgagccctacggcctggaggatgaccagcgcagcatgggatacgatgacctagattacggcatgatgagtgactacggcaccgcaaggcgcactggcacccctagcgatcctaggcgcaggctccggtcctacgaagatatgattggcgaggaagtacccagcgatcagtactactgggcccctctggctcagcacgagcggggtagcctagcatcactggacagtctgcggaaagggggacccccaccaccaaactggagacagccagagctccccgaagtcattgccatgctgggatttcgcctcgatgcagtaaagagtaacgctgcggcatacttacaacatctgtgctacagaaatgacaaggtcaagaccgatgttagaaagcttaaaggcattcccgtgttggtgggtttgctagatcaccctaaaaaggaggtgcacctgggtgcttgtggtgctctgaagaacattagttttggaagagatcaggacaataaaatagctataaagaactgcgacggcgtgccggcactcgtacgactgctgcgtaaggctcgggacatggacctcacagaagttatcacgggcaccctgtggaacttgtctagccacgacagtattaagatggagattgttgatcacgccctgcacgccctaactgacgaagtgattattccacactcaggatgggaacgagaacccaacgaggactgcaaaccccgacacattgaatgggaaagcgtgcttactaatacagcaggttgccttcgcaatgtgagcagcgagagatctgaggctcgcaggaagttgcgcgagtgtgatggtctggtggatgccctcatttttattgtacaggcagagatcggccagaaggattctgactctaaactggtggagaactgcgtgtgcctgttgcgcaatttaagctaccaggtgcatcgggaaatcccgcaggcggaacgataccaagaggctgcacccaatgtggccaacaacacgggaccccatgctgcctcatgcttcggggctaagaaaggcaaaggtaaaaagccaatagaggatccagccaacgacaccgtggatttccccaaacgaacgagcccagctaggggctacgagttactgttccagcccgaagttgttcggatctatattagtctactgaaggagtcaaaaaccccggcaatccttgaagcctctgcgggtgccatccagaatttgtgtgctggcaggtggacatacgggcgatatataaggtccgccttgagacaggagaaagccctaagtgcgatcgccgacttgttaaccaacgagcacgagcgggtggtgaaagctgccagtggcgctctcaggaacctcgctgtagacgcgcgtaataaagagctgattggcaagcacgcgattcctaacctggtgaagaacctgccgggaggccagcagaattcatcctggaatttttccgaggacaccgtcatctctatccttaacactatcaacgaagttatcgccgagaacctggaggcagccaagaaactgagggagactcagggtatcgagaagctggtgctgattaacaaatcagggaatagaagcgaaaaggaagtgcgcgctgccgctctcgtccttcaaacaatctggggctacaaagaactcaggaagcccctggaaaaagaaggatggaaaaagtctgatttccaggtcaacctgaacaatgcgtctcgctcccaatccagtcacagctatgacgattcaacactcccccttatcgatagaaaccagaagtccgacaagaaacctgatagagaggaaattcagatgtctaatatgggatccaacactaaatcactcgataataattactctacccctaacgaacgcggtgatcataatagaactctggaccgctcaggcgatctcggcgatatggaacccctgaaaggtactactcctctgatgcagaaaatttag

SEQ ID NO: 38129 - DNA, 2499 bp, Artificial Sequence
  derived and/or modified sequence
atgcaggagccaggtcagatagtcgaaacatacactgaagaggaccccgaaggagccatgagcgtggtcagtgtagagacctctgatgatggaacaacacggcgaactgaaacgactgtgaaaaaggtcgtgaagacggtgacgacacgcacagtgcagccagtagctatgggcccagacggattacccgtggacgcaagtagtgttagtaataattacatccaaaccctggggagggatttccgcaagaacggcaacggcggtcccggaccttatgttgggcaggccggtaccgcaaccctacctcgcaatttccattacccccctgatgggtattcgcggcattatgaggatgggtaccctggaggtagtgataattacggatctctgagccgtgtgactcgcattgaggagcgatatcgcccatctatggagggctatagagccccatctcggcaggacgtgtatggacctcagccccaagtgagggtgggaggctcctccgtcgatctgcacagatttcatccggaaccctacggactagaggacgatcagcggtcaatgggatacgacgacctggattacggcatgatgagcgattatggcactgcccgacgcacaggtacgcccagcgatcctcggagaaggctccggtcgtacgaggacatgattggagaggaagtgccgagcgatcagtattactgggcaccactggcgcaacatgagagggggtcactggccagcctggactccctgcgcaaaggaggcccacctccaccgaactggcgtcaacccgaactgccggaggtgatcgcaatgctcggatttcggctggatgcagtaaaaagcaatgcagcggcttacctccagcacctttgttatcgcaacgataaagtaaagacggacgttcgcaaactcaaaggaattcctgtgctggtgggtctgcttgaccatccaaagaaagaagtacacttgggagcctgtggagccctgaagaatatctccttcggcagggatcaggacaataaaatcgccattaagaactgcgacggcgtacccgctctcgtacgcctgctgcgcaaggcaagggacatggacctgacagaagtaattaccggtacactgtggaacctgtcctcccacgacagcattaagatggagattgtggatcatgccctgcacgcactgaccgacgaagtaatcattccacattcaggctgggagagggagccaaatgaggattgtaagccgaggcacatcgaatgggagtcagttcttacgaacactgcagggtgcctgcgaaacgtatcatccgaaaggtcagaggctcgtcgcaagcttagagagtgcgacgggctcgtggatgcgctgatcttcatagttcaggctgagattggccagaaggattcggactctaagttagtggagaactgtgtgtgtcttctgcggaacctgagttaccaggtgcaccgcgaaataccccaggccgagcgttaccaagaagctgcacctaacgtagcgaacaatacggggcctcatgctgccagctgcttcggtgcaaaaaagggtaagggtaaaaagcctattgaggatccggcaaacgataccgtggacttccccaagaggacctcaccagcacgcggatatgagctcttgtttcaacccgaagtggtacggatttatatttcccttttaaaagagtccaaaacgcctgcgatcctggaggcaagcgcgggagctatacaaaacttgtgcgcgggtcgatggacatacgggagatacatccgcagcgcactgcggcaagaaaaggccctctcagccatcgcagacctgttaactaacgagcacgagcgcgttgttaaggccgcttccggcgctctgcgtaacctcgctgtggacgcacgaaacaaagaactaatcggaaaacatgcaatacccaatttagtaaagaacttgcccggagggcagcagaatagttcctggaacttctctgaagatacggtcatttccatattaaacactataaatgaggtgatagccgagaacctggaggccgctaagaaactgcgggaaacacaaggcattgaaaagcttgtgttgataaataagtccggtaacagaagcgaaaaggaagttagagccgcagcactggtcctgcagaccatctggggctacaaagaactaaggaaaccgctggagaaagaaggatggaagaaaagcgacttccaggtcaacctaaacaatgcctcacgcagccaaagctcgcactcttacgacgacagtaccctgcccctaattgatcggaaccagaagagcgacaagaagcccgatcgtgaggagattcaaatgagcaacatgggttctaacacaaagagcttagacaacaattactcaactcccaatgagaggggcgaccataatcgcacattggaccgatcaggcgatctcggagatatggaaccgctaaaggggactaccccgttgatgcagaagatctag

SEQ ID NO: 38130 - DNA, 2499 bp, Artificial Sequence
  derived and/or modified sequence
atgcaggagccgggtcaaattgtagagacttatactgaagaggacccggagggcgctatgagcgtggtgtcagtggagacaagcgacgatggaacaacgaggagaaccgagaccactgttaagaaagttgtgaaaactgtcacaacacggacggtccagcctgtggccatgggaccagatggactgccggtcgacgcttcgtcagtgtctaacaattatattcagacactcggcagagacttccgaaagaacggaaacggcggacctggtccatacgtgggccaggcgggaactgctacgctgcccaggaacttccattatcccccagacggctatagtcgccactatgaggatggctatcccggtggcagcgataattacgggtcactgagccgagttaccaggattgaagagcgttaccgaccatccatggagggctaccgggcacccagccggcaggacgtgtatggaccgcaacctcaggtgagggtggggggttccagtgtcgacctgcacaggttccatcccgaaccctatgggcttgaagatgaccagcgaagcatgggctacgatgatcttgattatggtatgatgagcgattatgggacggctcgtagaaccggcacgccctcagaccctagacggaggctccggagttatgaagatatgatcggagaagaagtgccgtcggaccagtattactgggctcctctcgcccagcacgaaagaggatcattggcttccctggatagtctgagaaaaggcggtcctccccctcccaactggagacaacccgagctaccggaggtcatcgccatgctgggttttagattggatgccgtaaaatccaatgcggctgcttatctacagcacctctgctaccgcaatgacaaggtcaaaacggacgtccgaaagctcaagggcatcccggttctggtcgggttgctcgatcatcctaaaaaggaagtacacctgggtgcttgtggcgctctgaaaaacatcagcttcggcagagatcaggacaataagattgccattaaaaattgtgatggcgtgcccgcactcgttcgcttactgagaaaggccagagacatggacctcaccgaagtgattacaggaacactctggaatctgtccagtcatgactctatcaaaatggaaattgtagaccacgcactccacgcactgactgatgaagtcatcatcccccactctgggtgggagcgcgaacccaatgaagactgcaagccccgacacattgagtgggagtccgtgctgacaaacaccgccggatgtctgcgcaatgtttcctccgagagatctgaggcccgaaggaagttaagggaatgcgatggtttagtcgatgccctcatattcatcgtgcaagctgagatagggcagaaagattcagactcaaaactggttgagaattgtgtttgtcttctgagaaacctgagttaccaggtgcatcgggagataccgcaggcagaacgatatcaggaagccgctcccaatgtggccaacaataccggccctcacgccgcttcatgtttcggggcaaagaaaggaaaggggaagaaaccaatagaggatccagcaaacgataccgtagacttcccgaaacgcaccagtcctgctagaggatacgagctcttgttccaacccgaagtggttagaatttatatcagcttacttaaagagtccaagactccggcaatccttgaggccagtgccggagcaatccaaaatctttgcgctggtcgctggacatacggcagatacattcgcagtgccctccgacaggagaaggcactgtctgcgattgctgatctgttgaccaacgagcacgagagggtggtgaaggctgccagcggagcgttaagaaatctggccgtggacgccaggaacaaagaactgattggcaagcacgcgatccccaatttagtaaagaaccttccagggggacagcagaactcttcttggaatttttccgaggatacagtgatcagcatacttaatactattaatgaggtgatcgctgagaaccttgaagccgctaagaaacttcgcgagactcagggcattgagaagttagtcctgatcaataagtccggcaatcgctctgaaaaagaggtccgcgctgcagctctcgtcctgcagacaatctggggatataaggaactgaggaaacctttagagaaggagggctggaaaaaaagtgattttcaagtgaatcttaacaacgcctctaggagccagtcaagtcattcctacgatgatagcacccttcccttgattgacagaaatcaaaagagcgataaaaagcccgaccgcgaagagattcagatgagcaacatgggctctaacacgaaaagcttagataacaactactccaccccgaacgaacggggagatcacaataggactttagatcggtccggcgaccttggagatatggaacctcttaagggcacaacaccactaatgcaaaagatctag

SEQ ID NO: 38131 - DNA, 381 bp, Artificial Sequence
  derived and/or modified sequence
atgatcggcgaggaagtccctagcgaccaatactattgggcgccactcgcgcagcacgaacggggatcactggcttccctcgacagtctgcggaagggtggaccaccacctccaaattggcgccaacctgagctcccagaagtaatcgctatgctcggttttcgccttgatgccgtgaagtcgaacgcagctgcctatttacagcacttgtgttacagaaacgacaaagtgaaaacagatgtgagaaaactcaagggcatccctgtattagtcggtttactggaccacccgaagaaggaggtgcacttaggcgcatgtggcgctctgaaaaacatttccttcggacgagatcaggacaacaaaatagccattaagaattag

SEQ ID NO: 38132 - DNA, 4966 bp, Artificial Sequence
  derived and/or modified sequence
ctgccagatcagtttgtcaccacccaggctcccttgcctttggctgggtgcaacttccattttaggtgttggatctgagggggaaaaaaaagagagagggagagagagagaaagaagagcaggaaagatcccgaaaggaggaagaggtggcgaaaaatcaactgccctgctggatttgtctttctcagcaccttggcgaagccttgggtttctttcttaaaggactgatttttagaactccacatttgaggagctatgaagacatgattggtgaggaggtgccatcggatcaatactactgggctcctttggcccagcatgagcgaggaagtttagcaagcttggatagcctgcgcaaaggagggcctccacctcctaattggagacagccagagctgccagaggtgatcgccatgcttggattccgcttggatgctgtcaagtccaatgcagctgcatacctgcaacacttatgctaccgcaatgacaaggtgaagactgacgtgcggaagctcaagggcatcccagtactggtgggattgttagaccatcccaaaaaggaagtgcaccttggagcctgtggagctctcaagaatatctcttttggacgtgaccaggataacaagattgccataaaaaactgtgatggtgtgcctgcccttgtgcgattgcttcgaaaggctcgtgatatggaccttactgaagttattaccggaaccctgtggaatctttcatcccatgactcaatcaaaatggagattgtggaccatgcactgcatgccttgacagatgaagtgatcattcctcattctggttgggagcgggaacctaatgaagactgtaagccacgccacattgagtgggaatcggtgctcaccaacacagctggctgccttaggaatgtaagctcagagaggagtgaagctcgccggaaacttcgggaatgtgatggtttagttgatgccctcattttcattgttcaggctgagattgggcagaaggattcagacagcaagcttgtagagaactgtgtttgccttcttcggaacttatcatatcaagttcaccgggagatcccacaggcagagcgttaccaagaggcagctcccaatgttgccaacaatactgggccacatgctgccagttgctttggggccaagaagggcaaagggaaaaaacctatagaggatccagcaaacgatacagtggatttccctaaaagaacgagtccagctcgaggctatgagctcttatttcagccagaggtggttcggatatacatctcacttcttaaggagagcaagactcctgccatcctagaagcctcagctggagctatccagaacttgtgtgctgggcgctggacgtatggtcgatacatccgctctgctctgcgtcaagagaaggctctttctgccatagctgacctcctgactaatgaacatgaacgggtggtgaaagctgcatctggagcactgagaaacctggctgtggatgctcgcaacaaagaattaattggtaaacatgctattcctaacttggtaaagaatctgccaggaggacagcagaactcctcttggaatttctctgaggacactgtcatctctattttgaacactatcaacgaggttatcgctgagaacttggaggctgccaaaaagcttcgagagacacagggtattgagaagctggtgttgatcaacaaatcagggaaccgctcagaaaaagaagttcgagcagcagcacttgtattacagacaatctggggatataaggaactgcggaagccactggaaaaagaaggatggaagaaatcagactttcaggtgaatctaaacaatgcttcccgaagccagagcagtcattcatatgatgatagtactctccctctcattgaccggaaccaaaaatcagataagaaacctgatcgggaagaaattcagatgagcaatatgggatcaaacacaaaatcactagataacaactattccacaccaaatgagagaggagaccacaatagaacactggatcgatcgggggatctaggcgacatggagccattgaagggaacaacacccttgatgcagaagatttagcaccactatctccgttccatctgggcttatatgtacttttattttttggtggtgaaattgactgatgattttcctttttcttcgctggactattgtgccaactgccaggctgcctcctgcccttacagccctaagtggctgccttctttccatcaactcccaacttcttcctgtgaagtttaattgtctcaacgcctccccctcccccattccctccatttttctcccaagaaacctgactcaattatttgcatattttgagaaactgctgcagattagttctttttgccagttttccctggaactcctggccttttgtggaggggagggatggagagaataggaatcttcactagaagccgtgggaagaattggaagttacatgctgtatatgcaatgtccagcagtctgataaactgacgattcttaatcaagatttttttcctgatggggaagggacttttattttcttttagagaggggaaagtgtgagctcttcccttattcctaatggctatttttgaagcaaagaaggccagcaacattggcacatgccacctggcaaaggacccttgagtaagtgaaggtctcctaaaactgggattaagaaaccttgctctcctcatctccaaggcagggaccatcaagaacctacagactccatctcttctgcaagcctcatgccaaccctgggctattgctgctgccccttaaacacaggctgtccttaacccacctctcctgccctgtgatatgtctgctgagttggcctggccatttccaagaggctgtagaaaggggagaatgtcaaggaagacttttggtagagaaggagcagaaagatgtgtttttgggaagaagaagacctctaggaggagctagtaggaatgtacatgaagcaattagtctgaaactggcttccccactcccccgtttctccttttcctatccttataggcctgtcccttgcctctgccctggattggttggcaaactaaaggacttgatgtacataactcctgtcccttttcccttacaaggtggggattgcccctggctttgcctcttctttgtgcctttggcctggggtgcatctcctcccgcccttccatgtgcctttctttgcctctgcagtctcatttctcataattttgcaaattatattttgttgctttcttacctactattggccctaaatagcagaaagaagagaagtgaccgagagaacctcagattcttcattgaggattggtatagccatgatttcagtcatagcaagcttttgctcaacagcatatgggtgggattttgcaaaaatcctattctgatgaatctcaaagtaaggctggtaagagaagtgagtggtgtgactcttactccttaggtgcccagaatttaccatcatctctgaaggagttacagggaagtggtctccccaattctcccctccctccagtattgccccctctcactttagcatatattaattagcaggttgggctagagaaatcagctgctatgcgggttgattattattattatttctaatccttttccttatttgccttctactccccttaatctaatctaaaagctctgttccatgcaactggagttccttatccctctcttccccttcccttatatattgaggctatggggtaggagaaaagtgcacaacccaccaccccctttactcgtgcattaaaatttcttatttacccttttcccccttcccatttcttcccactttcatctaccttttctggcaaaaaggagccttttgctctctgtgaccctaagagcacactgcacagggaaaattgccccatccagacctggctccactcttgatctctcttgtcctcttctgctcttttcctggtgctcttttttctcggtggggtgtgggtaatagaacagccgtgggcttttggggacctttaacttttttttctctcttttgtttataaaaaacactaaacattcaattccagagaaccaaaaatcccaccttcccaccgaacactactaaggggcttgtgttctgctccataccttttctcttttctttctgtcttgttaatgcttttaaaaacaaatgagttttttatataaataaagtttttaaagtgtgtatgtggggggtctgtgtcatttcttcacttcaagctgttatttcttccctgctttgcatctttgttacttccttatgtatcagtgtcctttccagagcaaccagaaggaggttataccaggatttattttgagctcagccccaactctttatcaagcaacattcttgttaactatatgtgaaacattttttcttctgaagattcttaaaaattgaatgtggctgaagttgaacatgggagcttattgctaatttagagataggaaactgaagcataaagaattaatgacttactttaattactggaattcttctgcaacatttgacaaaactaaccttgaataaggcccactgtaatacgtagctctcttaaatataacacttaggactagaagattagaaactaccaatcccaactacgtaataggaaaatgtaggatcaaaaggcccatgtatataagtactgaccactgggccataatgttgcttctcaggctatatgcagtcctttagtcagaagtcaataggcctatttattaatattttacagaccatattacctggattaccagggactatctttgctgcagagatcaagggttaagatctatgggaagatacttatttttctgaggtccttatgtcctgtcatataattaaagactcaagagaatttatgtgaaatgctttctgtatgcccaaatctttagattaaaattatatagctgctcct

SEQ ID NO: 38133 - DNA, 498 bp, Artificial Sequence
  derived and/or modified sequence
aagatggctgggctgcaagaggcagggggatgggcccgtcagggaggaattcttgtgaaagccgtcgtctgcctcagcacttgatgaaaacacaccgaaaaagagggagctatgaagacatgattggtgaggaggtgccatcggatcaatactactgggctcctttggcccagcatgagcgaggaagtttagcaagcttggatagcctgcgcaaaggagggcctccacctcctaattggagacagccagagctgccagaggtgatcgccatgcttggattccgcttggatgctgtcaagtccaatgcagctgcatacctgcaacacttatgctaccgcaatgacaaggtgaagactgacgtgcggaagctcaagggcatcccagtactggtgggattgttagaccatcccaaaaaggaagtgcaccttggagcctgtggagctctcaagaatatctcttttggacgtgaccaggataacaagattgccataaaaaact

SEQ ID NO: 38134 - DNA, 2499 bp, Artificial Sequence
  derived and/or modified sequence
atgcaggagcccggccagatcgtggagacctacaccgaggaggaccccgagggcgccatgagcgtggtgagcgtggagaccagcgacgacggcaccaccagaagaaccgagaccaccgtgaagaaggtggtgaagaccgtgaccaccagaaccgtgcagcccgtggccatgggccccgacggcctgcccgtggacgccagcagcgtgagcaacaactacatccagaccctgggcagagacttcagaaagaacggcaacggcggccccggcccctacgtgggccaggccggcaccgccaccctgcccagaaacttccactacccccccgacggctacagcagacactacgaggacggctaccccggcggcagcgacaactacggcagcctgagcagagtgaccagaatcgaggagagatacagacccagcatggagggctacagagcccccagcagacaggacgtgtacggcccccagccccaggtgagagtgggcggcagcagcgtggacctgcacagattccaccccgagccctacggcctggaggacgaccagagaagcatgggctacgacgacctggactacggcatgatgagcgactacggcaccgccagaagaaccggcacccccagcgaccccagaagaagactgagaagctacgaggacatgatcggcgaggaggtgcccagcgaccagtactactgggcccccctggcccagcacgagagaggcagcctggccagcctggacagcctgagaaagggcggcccccccccccccaactggagacagcccgagctgcccgaggtgatcgccatgctgggcttcagactggacgccgtgaagagcaacgccgccgcctacctgcagcacctgtgctacagaaacgacaaggtgaagaccgacgtgagaaagctgaagggcatccccgtgctggtgggcctgctggaccaccccaagaaggaggtgcacctgggcgcctgcggcgccctgaagaacatcagcttcggcagagaccaggacaacaagatcgccatcaagaactgcgacggcgtgcccgccctggtgagactgctgagaaaggccagagacatggacctgaccgaggtgatcaccggcaccctgtggaacctgagcagccacgacagcatcaagatggagatcgtggaccacgccctgcacgccctgaccgacgaggtgatcatcccccacagcggctgggagagagagcccaacgaggactgcaagcccagacacatcgagtgggagagcgtgctgaccaacaccgccggctgcctgagaaacgtgagcagcgagagaagcgaggccagaagaaagctgagagagtgcgacggcctggtggacgccctgatcttcatcgtgcaggccgagatcggccagaaggacagcgacagcaagctggtggagaactgcgtgtgcctgctgagaaacctgagctaccaggtgcacagagagatcccccaggccgagagataccaggaggccgcccccaacgtggccaacaacaccggcccccacgccgccagctgcttcggcgccaagaagggcaagggcaagaagcccatcgaggaccccgccaacgacaccgtggacttccccaagagaaccagccccgccagaggctacgagctgctgttccagcccgaggtggtgagaatctacatcagcctgctgaaggagagcaagacccccgccatcctggaggccagcgccggcgccatccagaacctgtgcgccggcagatggacctacggcagatacatcagaagcgccctgagacaggagaaggccctgagcgccatcgccgacctgctgaccaacgagcacgagagagtggtgaaggccgccagcggcgccctgagaaacctggccgtggacgccagaaacaaggagctgatcggcaagcacgccatccccaacctggtgaagaacctgcccggcggccagcagaacagcagctggaacttcagcgaggacaccgtgatcagcatcctgaacaccatcaacgaggtgatcgccgagaacctggaggccgccaagaagctgagagagacccagggcatcgagaagctggtgctgatcaacaagagcggcaacagaagcgagaaggaggtgagagccgccgccctggtgctgcagaccatctggggctacaaggagctgagaaagcccctggagaaggagggctggaagaagagcgacttccaggtgaacctgaacaacgccagcagaagccagagcagccacagctacgacgacagcaccctgcccctgatcgacagaaaccagaagagcgacaagaagcccgacagagaggagatccagatgagcaacatgggcagcaacaccaagagcctggacaacaactacagcacccccaacgagagaggcgaccacaacagaaccctggacagaagcggcgacctgggcgacatggagcccctgaagggcaccacccccctgatgcagaagatctag

SEQ ID NO: 38135 - DNA, 1833 bp, Artificial Sequence
  derived and/or modified sequence
atgatcggcgaggaggtgcccagcgaccagtactactgggcccccctggcccagcacgagagaggcagcctggccagcctggacagcctgagaaagggcggcccccccccccccaactggagacagcccgagctgcccgaggtgatcgccatgctgggcttcagactggacgccgtgaagagcaacgccgccgcctacctgcagcacctgtgctacagaaacgacaaggtgaagaccgacgtgagaaagctgaagggcatccccgtgctggtgggcctgctggaccaccccaagaaggaggtgcacctgggcgcctgcggcgccctgaagaacatcagcttcggcagagaccaggacaacaagatcgccatcaagaactgcgacggcgtgcccgccctggtgagactgctgagaaaggccagagacatggacctgaccgaggtgatcaccggcaccctgtggaacctgagcagccacgacagcatcaagatggagatcgtggaccacgccctgcacgccctgaccgacgaggtgatcatcccccacagcggctgggagagagagcccaacgaggactgcaagcccagacacatcgagtgggagagcgtgctgaccaacaccgccggctgcctgagaaacgtgagcagcgagagaagcgaggccagaagaaagctgagagagtgcgacggcctggtggacgccctgatcttcatcgtgcaggccgagatcggccagaaggacagcgacagcaagctggtggagaactgcgtgtgcctgctgagaaacctgagctaccaggtgcacagagagatcccccaggccgagagataccaggaggccgcccccaacgtggccaacaacaccggcccccacgccgccagctgcttcggcgccaagaagggcaagggcaagaagcccatcgaggaccccgccaacgacaccgtggacttccccaagagaaccagccccgccagaggctacgagctgctgttccagcccgaggtggtgagaatctacatcagcctgctgaaggagagcaagacccccgccatcctggaggccagcgccggcgccatccagaacctgtgcgccggcagatggacctacggcagatacatcagaagcgccctgagacaggagaaggccctgagcgccatcgccgacctgctgaccaacgagcacgagagagtggtgaaggccgccagcggcgccctgagaaacctggccgtggacgccagaaacaaggagctgatcggcaagcacgccatccccaacctggtgaagaacctgcccggcggccagcagaacagcagctggaacttcagcgaggacaccgtgatcagcatcctgaacaccatcaacgaggtgatcgccgagaacctggaggccgccaagaagctgagagagacccagggcatcgagaagctggtgctgatcaacaagagcggcaacagaagcgagaaggaggtgagagccgccgccctggtgctgcagaccatctggggctacaaggagctgagaaagcccctggagaaggagggctggaagaagagcgacttccaggtgaacctgaacaacgccagcagaagccagagcagccacagctacgacgacagcaccctgcccctgatcgacagaaaccagaagagcgacaagaagcccgacagagaggagatccagatgagcaacatgggcagcaacaccaagagcctggacaacaactacagcacccccaacgagagaggcgaccacaacagaaccctggacagaagcggcgacctgggcgacatggagcccctgaagggcaccacccccctgatgcagaagatctag

SEQ ID NO: 38136 - DNA, 381 bp, Artificial Sequence
  derived and/or modified sequence
atgatcggcgaggaggtgcccagcgaccagtactactgggcccccctggcccagcacgagagaggcagcctggccagcctggacagcctgagaaagggcggcccccccccccccaactggagacagcccgagctgcccgaggtgatcgccatgctgggcttcagactggacgccgtgaagagcaacgccgccgcctacctgcagcacctgtgctacagaaacgacaaggtgaagaccgacgtgagaaagctgaagggcatccccgtgctggtgggcctgctggaccaccccaagaaggaggtgcacctgggcgcctgcggcgccctgaagaacatcagcttcggcagagaccaggacaacaagatcgccatcaagaactag

SEQ ID NO: 38137 - protein, 490 aa, Artificial Sequence
  derived and/or modified sequence
MGPVMPPSKKPESSGISVSSGLSQCYGGSGFSKALQEDDDLDFSLPDIRLEEGAMEDEELTNLNWLHESKNLLKSFGESVLRSVSPVQDLDDDTPPSPAHSDMPYDARQNPNCKPPYSFSCLIFMAIEDSPTKRLPVKDIYNWILEHFPYFANAPTGWKNSVRHNLSLNKCFKKVDKERSQSIGKGSLWCIDPEYRQNLIQALKKTPYHPHPHVFNTPPTCPQAYQSTSGPPIWPGSTFFKRNGALLQDPDIDAASAMMLLNTPPEIQAGFPPGVIQNGARVLSRGLFPGVRPLPITPIGVTAAMRNGITSCRMRTESEPSCGSPVVSGDPKEDHNYSSAKSSNARSTSPTSDSISSSSSSADDHYEFATKGSQEGSEGSEGSFRSHESPSDTEEDDRKHSQKEPKDSLGDSGYASQHKKRQHFAKARKVPSDTLPLKKRRTEKPPESDDEEMKEAAGSLLHLAGIRSCLNNITNRTAKGQKEQKETTKN

SEQ ID NO: 38138 - DNA, 7718 bp, Artificial Sequence
  derived and/or modified sequence
aggagccttcacgtaaatgggtccagtcatgcctcccagtaagaagccagaaagctcaggaattagtgtctccagtggactgagtcagtgttacgggggcagcggtttctccaaggcccttcaggaagacgatgacctcgacttttctctgcctgacatccgattagaagagggggccatggaagatgaagagctgaccaacctgaactggctgcacgagagcaagaacttgctgaagagctttggggagtcggtcctcaggagtgtcagccccgtccaggacctggacgatgacacccccccatcccctgcccactctgacatgccctacgatgccaggcagaaccccaactgcaaacccccctactccttcagctgcctcatatttatggccatcgaggactctccaaccaagcgcctgccagtgaaggatatctacaactggatcttggaacattttccgtattttgcaaatgcacctactgggtggaaaaactcagtgagacacaatttatcattgaataagtgttttaagaaagtggacaaagagaggagtcagagtattgggaaagggtcgttgtggtgcatagacccagagtatagacaaaatctaattcaggctttgaaaaagacaccttatcacccacacccacacgtgttcaatacacctcccacctgtcctcaggcatatcaaagcacatcaggtccacccatctggccgggcagtaccttcttcaagagaaatggagcccttctccaagatcctgacattgatgctgccagtgccatgatgcttttgaatactccccctgagatacaagcaggttttcctccaggagtgatccaaaatggagcgcgggtcctgagccgagggctgtttcctggcgtgcggccgctgccaatcactcccattggggtgacagcggccatgaggaatggcatcaccagctgccggatgcggactgagagtgagccatcttgtggctccccagtggtcagcggagaccccaaggaggatcacaactacagcagtgccaagtcctccaacgcccggagcacctcgcccaccagcgactccatctcctcctcctcctcctcagccgacgaccactatgagtttgccaccaaggggagccaggagggcagcgagggcagcgaggggagcttccggagccacgagagccccagcgacacggaagaggacgacaggaagcacagccagaaggagcccaaggattctctgggggacagcgggtacgcatcccagcacaagaagcgccagcacttcgccaaggccaggaaggtccccagcgacacactgcccctcaaaaagagacgcaccgaaaagccccccgagagcgatgatgaggagatgaaagaagcggcagggtccctcctgcacttagcagggatccggtcctgtttgaataacatcaccaatcggacggcaaaggggcagaaagagcaaaaggaaaccacaaaaaattaaaaacaagtcactgatttgttttgaacttacgaccatttggtttcagcatgtcaggagatttctaatgatttgtggcaatatcagcaattttttttcttttttcttgtttttggtttggttttctttcttttcttttccttttattttgttttaatttgccccctcttctttgttttggacccttaagaattttatttttaaaggagattgaagccatagaactcatattgacactcagctgttttacaaaagcttttcattatctgaagacaaaaccgaaaaagccaaaattaccattgcttcctccagcttgtcagaaacctgtggctgaatccgcagggatgtcaacgtcaatatcacaggaacacacattcggcacctagaaggcacgtgggcaaagtaatcatcgttcaggcccaacccttaggtttaaaaagtcaggttgtccatcccattgggttcactgagtgaaggcacataaagcaattgaggaggaggaggaacccctcgtccccctaggagcagacccaagcttgtggcaccaggcatctgatggtgccaggaaagccactggaattgtcacacggcgagcacagagggccggccaccagtcctcgatgcttctgaaccctgaagcccgatgacatcttacgaggtggacgttggactgttcatgcgcatcgggtgtcagtgactcatggagaagaaatggggtaaatttttagtgatgttgctaatcattgaattctgttctctattaaattaagaaaatgttccaaaagccataagcctgaagattggccctgtgcacgcacgcacacacacacacacacacacacacacacacacacacacacgaaggagagagagagaaaactgatggggaaaacaagctgtgtcttcttaactgcccaagtgaaaagcaaccaagtccaggaaattacaatagctgttaaggaaaggaaataatggtacagatctttttctgtctatcaaaactatttgatccaagtgaaaaaaaaaaaaaaactagaaagctacggaacctgccattagtattgtggtgtatttttaagattaaaggtacactgatggacaaaaaaaaaaagtaaaacatggcaaaaaataaaataactcctatactgccctcaaaatggagtttgcaattaatatcaggatttatctttgcaaaaatcagtgatttccacattcagccagtatagccagcagaaatttctgatccacaatgcatggattcctttgaagaaaaaaaagaaaaagagaaaaaaatcacaaaaacaaactttttttattcaaaagtaacaaagttcttgtaaggtaaataatgtatttagcatgaagcatgaattattttcatataaatatagaaaatagagaaaaggctatgcctgtaatttttaagcccttaggcttagagtttcttttggttttcttcttttttctttccttttctttgctttctttttttcctttttgtttttgtttttgttttttgtttttgtttttttttcgggttattttgttttggttttttgaagcaggtgtttaaggtttaaccttcttcagggacaaattctgactgttggggaacttactctgcaatataaaaatatcttcatgctctggtagggcttggatggttgaactctgtactgccttgtgtgcacttcagccccgaccccctctgattctctgttgaaaagtgtgtcctttctctctgtctgtacatgtttaacatgacgcaataatttgagggcaaacttagtagtgagtgtgtatgatagaatcaagagaattatgggacgcttacttgagaaaatcattaccatgatttggttctaggaaaaaggcagtgaataattatgcaaattagccagaagaaggggaaccgtgctaatgggccttattgggtgaggggacgagatggggttcatgtgaaggaggaagcgatgccgaggtaggaaaggccagccccagacatcctatcgccacaatgccatgtcgcaataggaagcaggggccggccatcgctaccttcagcacactgaccaacctggaattaagaccacctagattgcgagagctgaatttagaaaccagacaacgtcatgcagcccagaaactcctgttgttacctttgcctaagaaattttctttaatggcgggggcggggggcgggggtacaaagagaaatctctaaaagaatatgatcttccatccaagtggagggaaactttaaaacaaaaacacccagtactgtggctcaggatatgatgcgtgaggagagggagggaacagagatgaccttaacttttaaaaaagggactgctgtgggccaaagccaagcccatctgccaggacgaggtaatgtcagagctccatcagcccggacagtgggaactaactggtgcattccccacacttaccttccggtgggttgctgatgagagaacctgaaaaaacctacacctctacagcaggtcgaattcatgacctgaagctgaatacttccagcatatttattcagggtgtaggtgggaataaagtatcttcgcagtgctctgttccctccgtctccccagacatctgacaccctaaaagccatccacagctatggaacctgagcgacaccttgatttgtgttgtcacctgaccaagcctaaagacctccagctcagtcccccaccttcatcccaccccacagatgataaaattcagacctctctcctgaaaggcagaggttcaacattcaggactgtttctggccgaggacttcttccaattaaaacccccaccgtgggctgtctcccctcatttcatttttctaaaggggcagaggcctcttttagaaaataataaaatgcaatgtgtgtgatttacttttctgatctctttgagaaatagagaaatataaaagtgtgttcttaactccagaaccactctttttgcataaatacctcatcgggcagctttctaagtgtgattttcctgagtctcccttcgttggatctgccggaagacttgtcggggaacctttagtgagggtacttcttcctatttttcttctgtttttggaggcatacacattatgcataaccaaaacaatggctcaattgtgtttaactttgtattttgattgttgagaacaaaaacaaaaagtatcaatgtgtatgtggctgtttgtagtgaatttattggagaatgaggttgtccgtgtccttaacaagccaaggggcaggaggcaccctctcttatcccctcctccaagagcagtagagaatttaagcacaagcctatttgtgaaagaatattttgcttaagtgtcattcactttagtcttggaattccttcccaaacgtcaggtgttcttttagcttccaaactagcatatgtatccattagtctgacagatcgcctgaacaccattaagaggtgtggcgtttttgctttcatttctcctgctgggagaagtggcggttcatgtgtcattccagtatctcacatactcacacggggcaggggggagggggaaacggggaactatagcaatatttaaagatgctttggaaaccaaccgtgaacacatcaacaccacgacgtctacgattacttgctattggccctcggatacatttaagagaaagagacagtcactcttttttttcttaaatgatatacatataaacagttatttttatcctattataattgtcttttgtctttatctagtactatgtggaaagggtttgcatcatagatttttcccagccttataatataccataagctcctacttccctgcccctccctaatcagtattctttcaagagttctttggtgaagccatctatctgaaactaaaatgaaccaaacccatatttcactggtggttggagaaaaccatggccaaaacgattgtggcaggtctcaatcttgggagtttttaagaaggaatgtgccagaggccgattcccaagaacagagttttcttttgttttgcagaggcattcaatgtgtctagtgcttgctggccacagcagttactaccacagagccttctgggaggggccgttgtgttgaaggaggctcctgcctgagggacagcatcaggcagtgggctctgtagagtgagaaccaggtggaggccttctgtgcccagctcagagttctgcaccacgccaggactgcccaggccaagggctactgacgcaagttccactcattccactctgtggggggcgccttgggcctctcctggaagggctcttggagaaggaattggagttacgtacaagtgacctaaatgggaagcttttctagatgagattggattaaattccatgtgatttctctttccctttaatccaggttgggactcgtttctttctggtggatcacagctgcccagatgttgcaattgatttttatgtttctgtagagaagtatttttctttcatcttcaggattttttttgccaccaaaagaaaacattggaactctgtgtttcctcttgattgtgacttcccagtgttgacagttaagtccttagtgtcgtaggtcccagcccaccaatactatatcaaacactgttatgcacataatgcagcactgtgatctaatttaaataatacttttttattatttatactactatatataatatacatcaacacttttgctatataacctaagtgataaccctcttttagttacctgccaaactctggacttggtttatattgcagttaacacagttacaaagctgtaatggtgtctttttttcctttgtaacggaatgtgtaaatcaaagtatatacattgtgtggtgttcctgtttctggagtttcatgaggatttacacatggcattcagtgttctgtatagatctgcctacctttgtgaattcatctgttaacccctcttcctttgagagagcaccggcgatggtggttaactccttgtgttttctctctctcctactggttattcttgaattaagcacagactcgtcagctcggttgctttatcatgaataatgtgtgtgaccttgcagttcttccacagttcagcaaacaagtgctagcttcactgaccaaaaattaaggaaggaaaacacagtttttaaaacgatccatcttttaacagccgaaaccgatgtgtctatggtgctgcaccttgctgttgtacttctgaaatcagacgtgtgtgaacgatcatttctgacttaaccgtgagatgctcacgagtacccttcctgttgttttgttagcattgaaatcgagactatttatttggaatatatacaacagtgtttttccactgtatttcatttgcaaaagttgagaactgctttctctaccttttgcaaaataattgatattccatattggattctcaaagacttcgatatggtgaacctattaaacctagaaattgtattcatcctttcatgactgtggcctgagttccccagcccctctcctccttttttttagatgagatttagcacactctcagttatttaaacatgcaacatttcttgagtatgtatgttgaggccatctgagctcatagctgattcagtaaccagtttcatgctgtgtcattcacactcactacttaatactgccatggtgaaaatgtggaggaaaaatgtatccatgtgtgtctgggaagcatatacacttgtacattttttaatactctgattctgtaacatttctgagttttgttttgttttacagaaaaaaaaaaaaagtgataaagcaatcagaagaccaagaggtttactattgatgcttagggtcgtctgaccttggctggccaatagacctacacggccaaattaatttacgagagtaataatttttcaaaagccaattttttttctgtattttctgtatgaaactgccaatatcatgaatagaaagggagaaccataaaggagaaagaacgtgatgttctgttatgttcatgtaaacctaaagaaacagtgtggaggcaggcgcgatcagccgaactctagggacttggtgttgcttggaaggcatccatacctgcattttgcattcttcgtatgtaatcatattgccaaagacaaactatttcatcatttattgtaaataacacttttccccagacctaccataaagtttctgtgatgtattgtcttccagttgcaataaaaattactgagttgcatcaattg

SEQ ID NO: 38139 - DNA, 7832 bp, Artificial Sequence
  derived and/or modified sequence
ccgggagacggcgcgacccggcggcggggccacccgcgagtccagcgtcgccgcagccccccaatgcggccgcgagaagcagcgggggggcaggcgatcgaaggagccttcacgtaaatgggtccagtcatgcctcccagtaagaagccagaaagctcaggaattagtgtctccagtggactgagtcagtgttacgggggcagcggtttctccaaggcccttcaggaagacgatgacctcgacttttctctgcctgacatccgattagaagagggggccatggaagatgaagagctgaccaacctgaactggctgcacgagagcaagaacttgctgaagagctttggggagtcggtcctcaggagtgtcagccccgtccaggacctggacgatgacacccccccatcccctgcccactctgacatgccctacgatgccaggcagaaccccaactgcaaacccccctactccttcagctgcctcatatttatggccatcgaggactctccaaccaagcgcctgccagtgaaggatatctacaactggatcttggaacattttccgtattttgcaaatgcacctactgggtggaaaaactcagtgagacacaatttatcattgaataagtgttttaagaaagtggacaaagagaggagtcagagtattgggaaagggtcgttgtggtgcatagacccagagtatagacaaaatctaattcaggctttgaaaaagacaccttatcacccacacccacacgtgttcaatacacctcccacctgtcctcaggcatatcaaagcacatcaggtccacccatctggccgggcagtaccttcttcaagagaaatggagcccttctccaagatcctgacattgatgctgccagtgccatgatgcttttgaatactccccctgagatacaagcaggttttcctccaggagtgatccaaaatggagcgcgggtcctgagccgagggctgtttcctggcgtgcggccgctgccaatcactcccattggggtgacagcggccatgaggaatggcatcaccagctgccggatgcggactgagagtgagccatcttgtggctccccagtggtcagcggagaccccaaggaggatcacaactacagcagtgccaagtcctccaacgcccggagcacctcgcccaccagcgactccatctcctcctcctcctcctcagccgacgaccactatgagtttgccaccaaggggagccaggagggcagcgagggcagcgaggggagcttccggagccacgagagccccagcgacacggaagaggacgacaggaagcacagccagaaggagcccaaggattctctgggggacagcgggtacgcatcccagcacaagaagcgccagcacttcgccaaggccaggaaggtccccagcgacacactgcccctcaaaaagagacgcaccgaaaagccccccgagagcgatgatgaggagatgaaagaagcggcagggtccctcctgcacttagcagggatccggtcctgtttgaataacatcaccaatcggacggcaaaggggcagaaagagcaaaaggaaaccacaaaaaattaaaaacaagtcactgatttgttttgaacttacgaccatttggtttcagcatgtcaggagatttctaatgatttgtggcaatatcagcaattttttttcttttttcttgtttttggtttggttttctttcttttcttttccttttattttgttttaatttgccccctcttctttgttttggacccttaagaattttatttttaaaggagattgaagccatagaactcatattgacactcagctgttttacaaaagcttttcattatctgaagacaaaaccgaaaaagccaaaattaccattgcttcctccagcttgtcagaaacctgtggctgaatccgcagggatgtcaacgtcaatatcacaggaacacacattcggcacctagaaggcacgtgggcaaagtaatcatcgttcaggcccaacccttaggtttaaaaagtcaggttgtccatcccattgggttcactgagtgaaggcacataaagcaattgaggaggaggaggaacccctcgtccccctaggagcagacccaagcttgtggcaccaggcatctgatggtgccaggaaagccactggaattgtcacacggcgagcacagagggccggccaccagtcctcgatgcttctgaaccctgaagcccgatgacatcttacgaggtggacgttggactgttcatgcgcatcgggtgtcagtgactcatggagaagaaatggggtaaatttttagtgatgttgctaatcattgaattctgttctctattaaattaagaaaatgttccaaaagccataagcctgaagattggccctgtgcacgcacgcacacacacacacacacacacacacacacacacacacacacgaaggagagagagagaaaactgatggggaaaacaagctgtgtcttcttaactgcccaagtgaaaagcaaccaagtccaggaaattacaatagctgttaaggaaaggaaataatggtacagatctttttctgtctatcaaaactatttgatccaagtgaaaaaaaaaaaaaaactagaaagctacggaacctgccattagtattgtggtgtatttttaagattaaaggtacactgatggacaaaaaaaaaaagtaaaacatggcaaaaaataaaataactcctatactgccctcaaaatggagtttgcaattaatatcaggatttatctttgcaaaaatcagtgatttccacattcagccagtatagccagcagaaatttctgatccacaatgcatggattcctttgaagaaaaaaaagaaaaagagaaaaaaatcacaaaaacaaactttttttattcaaaagtaacaaagttcttgtaaggtaaataatgtatttagcatgaagcatgaattattttcatataaatatagaaaatagagaaaaggctatgcctgtaatttttaagcccttaggcttagagtttcttttggttttcttcttttttctttccttttctttgctttctttttttcctttttgtttttgtttttgttttttgtttttgtttttttttcgggttattttgttttggttttttgaagcaggtgtttaaggtttaaccttcttcagggacaaattctgactgttggggaacttactctgcaatataaaaatatcttcatgctctggtagggcttggatggttgaactctgtactgccttgtgtgcacttcagccccgaccccctctgattctctgttgaaaagtgtgtcctttctctctgtctgtacatgtttaacatgacgcaataatttgagggcaaacttagtagtgagtgtgtatgatagaatcaagagaattatgggacgcttacttgagaaaatcattaccatgatttggttctaggaaaaaggcagtgaataattatgcaaattagccagaagaaggggaaccgtgctaatgggccttattgggtgaggggacgagatggggttcatgtgaaggaggaagcgatgccgaggtaggaaaggccagccccagacatcctatcgccacaatgccatgtcgcaataggaagcaggggccggccatcgctaccttcagcacactgaccaacctggaattaagaccacctagattgcgagagctgaatttagaaaccagacaacgtcatgcagcccagaaactcctgttgttacctttgcctaagaaattttctttaatggcgggggcggggggcgggggtacaaagagaaatctctaaaagaatatgatcttccatccaagtggagggaaactttaaaacaaaaacacccagtactgtggctcaggatatgatgcgtgaggagagggagggaacagagatgaccttaacttttaaaaaagggactgctgtgggccaaagccaagcccatctgccaggacgaggtaatgtcagagctccatcagcccggacagtgggaactaactggtgcattccccacacttaccttccggtgggttgctgatgagagaacctgaaaaaacctacacctctacagcaggtcgaattcatgacctgaagctgaatacttccagcatatttattcagggtgtaggtgggaataaagtatcttcgcagtgctctgttccctccgtctccccagacatctgacaccctaaaagccatccacagctatggaacctgagcgacaccttgatttgtgttgtcacctgaccaagcctaaagacctccagctcagtcccccaccttcatcccaccccacagatgataaaattcagacctctctcctgaaaggcagaggttcaacattcaggactgtttctggccgaggacttcttccaattaaaacccccaccgtgggctgtctcccctcatttcatttttctaaaggggcagaggcctcttttagaaaataataaaatgcaatgtgtgtgatttacttttctgatctctttgagaaatagagaaatataaaagtgtgttcttaactccagaaccactctttttgcataaatacctcatcgggcagctttctaagtgtgattttcctgagtctcccttcgttggatctgccggaagacttgtcggggaacctttagtgagggtacttcttcctatttttcttctgtttttggaggcatacacattatgcataaccaaaacaatggctcaattgtgtttaactttgtattttgattgttgagaacaaaaacaaaaagtatcaatgtgtatgtggctgtttgtagtgaatttattggagaatgaggttgtccgtgtccttaacaagccaaggggcaggaggcaccctctcttatcccctcctccaagagcagtagagaatttaagcacaagcctatttgtgaaagaatattttgcttaagtgtcattcactttagtcttggaattccttcccaaacgtcaggtgttcttttagcttccaaactagcatatgtatccattagtctgacagatcgcctgaacaccattaagaggtgtggcgtttttgctttcatttctcctgctgggagaagtggcggttcatgtgtcattccagtatctcacatactcacacggggcaggggggagggggaaacggggaactatagcaatatttaaagatgctttggaaaccaaccgtgaacacatcaacaccacgacgtctacgattacttgctattggccctcggatacatttaagagaaagagacagtcactcttttttttcttaaatgatatacatataaacagttatttttatcctattataattgtcttttgtctttatctagtactatgtggaaagggtttgcatcatagatttttcccagccttataatataccataagctcctacttccctgcccctccctaatcagtattctttcaagagttctttggtgaagccatctatctgaaactaaaatgaaccaaacccatatttcactggtggttggagaaaaccatggccaaaacgattgtggcaggtctcaatcttgggagtttttaagaaggaatgtgccagaggccgattcccaagaacagagttttcttttgttttgcagaggcattcaatgtgtctagtgcttgctggccacagcagttactaccacagagccttctgggaggggccgttgtgttgaaggaggctcctgcctgagggacagcatcaggcagtgggctctgtagagtgagaaccaggtggaggccttctgtgcccagctcagagttctgcaccacgccaggactgcccaggccaagggctactgacgcaagttccactcattccactctgtggggggcgccttgggcctctcctggaagggctcttggagaaggaattggagttacgtacaagtgacctaaatgggaagcttttctagatgagattggattaaattccatgtgatttctctttccctttaatccaggttgggactcgtttctttctggtggatcacagctgcccagatgttgcaattgatttttatgtttctgtagagaagtatttttctttcatcttcaggattttttttgccaccaaaagaaaacattggaactctgtgtttcctcttgattgtgacttcccagtgttgacagttaagtccttagtgtcgtaggtcccagcccaccaatactatatcaaacactgttatgcacataatgcagcactgtgatctaatttaaataatacttttttattatttatactactatatataatatacatcaacacttttgctatataacctaagtgataaccctcttttagttacctgccaaactctggacttggtttatattgcagttaacacagttacaaagctgtaatggtgtctttttttcctttgtaacggaatgtgtaaatcaaagtatatacattgtgtggtgttcctgtttctggagtttcatgaggatttacacatggcattcagtgttctgtatagatctgcctacctttgtgaattcatctgttaacccctcttcctttgagagagcaccggcgatggtggttaactccttgtgttttctctctctcctactggttattcttgaattaagcacagactcgtcagctcggttgctttatcatgaataatgtgtgtgaccttgcagttcttccacagttcagcaaacaagtgctagcttcactgaccaaaaattaaggaaggaaaacacagtttttaaaacgatccatcttttaacagccgaaaccgatgtgtctatggtgctgcaccttgctgttgtacttctgaaatcagacgtgtgtgaacgatcatttctgacttaaccgtgagatgctcacgagtacccttcctgttgttttgttagcattgaaatcgagactatttatttggaatatatacaacagtgtttttccactgtatttcatttgcaaaagttgagaactgctttctctaccttttgcaaaataattgatattccatattggattctcaaagacttcgatatggtgaacctattaaacctagaaattgtattcatcctttcatgactgtggcctgagttccccagcccctctcctccttttttttagatgagatttagcacactctcagttatttaaacatgcaacatttcttgagtatgtatgttgaggccatctgagctcatagctgattcagtaaccagtttcatgctgtgtcattcacactcactacttaatactgccatggtgaaaatgtggaggaaaaatgtatccatgtgtgtctgggaagcatatacacttgtacattttttaatactctgattctgtaacatttctgagttttgttttgttttacagaaaaaaaaaaaaagtgataaagcaatcagaagaccaagaggtttactattgatgcttagggtcgtctgaccttggctggccaatagacctacacggccaaattaatttacgagagtaataatttttcaaaagccaattttttttctgtattttctgtatgaaactgccaatatcatgaatagaaagggagaaccataaaggagaaagaacgtgatgttctgttatgttcatgtaaacctaaagaaacagtgtggaggcaggcgcgatcagccgaactctagggacttggtgttgcttggaaggcatccatacctgcattttgcattcttcgtatgtaatcatattgccaaagacaaactatttcatcatttattgtaaataacacttttccccagacctaccataaagtttctgtgatgtattgtcttccagttgcaataaaaattactgagttgcatcaattgaagaaaaacacca

SEQ ID NO: 38140 - DNA, 1473 bp, Artificial Sequence
  derived and/or modified sequence
atggggcctgtaatgccaccttcaaagaagcctgagagctcaggcatttcagtcagcagcggattgtcccaatgttacggcgggtctggtttcagtaaagccctgcaagaagatgatgatttggatttttcgctgcctgatattcgcctggaagagggcgccatggaggatgaggagctgacaaacttgaactggctccatgagagcaagaacctgctcaaatcttttggggagagtgtcctcaggtccgtctcaccagtgcaagacctcgatgacgataccccgccatctccagcccattcagatatgccgtatgatgctaggcagaacccgaactgcaagcctccatacagctttagttgcctgattttcatggccattgaggacagccccacaaaacgactacccgtcaaagacatatataactggatcctggagcactttccttacttcgccaacgccccaactggatggaaaaactccgtgaggcataacttgagcctgaataagtgttttaagaaagtggacaaagagaggtctcagagtatcggaaaagggagcctttggtgtatcgacccagagtatcggcaaaatctgatccaagccctaaagaagactccataccacccacatccccacgtgttcaacaccccaccaacttgcccccaggcctaccagtccacaagcgggcctcctatttggcctggctccactttcttcaagagaaacggcgccctccttcaggatcctgacattgacgcagctagcgcaatgatgctgttaaacaccccgcctgaaattcaggctgggttcccccccggggtgattcagaatggagccagggtcttaagtcgcggcctgttcccaggcgtgagacctctgcctatcacacctattggggtgactgccgccatgcggaatggcattacctcttgtcggatgcggacagagagcgagccatcatgcggatcccccgtggtgagcggtgatcctaaggaggatcataattatagctctgctaagtcatctaacgcgcggtctactagccccacctctgactccattagtagctccagctcaagtgccgacgatcactatgaatttgccactaagggctctcaggaaggctccgaagggtctgagggatccttcaggagccatgaaagcccgagcgataccgaggaggacgacaggaagcactcacagaaagaacctaaagatagcctgggggattctggatatgcctctcagcacaagaagcgccaacacttcgccaaggcgcggaaggtcccatcagatacactcccactgaagaaacggcgcacagagaaaccacctgaatctgacgatgaggagatgaaggaggctgccggatctctccttcatcttgcgggaatacggtcctgcctgaacaacatcacaaacaggactgccaaagggcaaaaggagcagaaggaaacgaccaagaattag

SEQ ID NO: 38141 - DNA, 1473 bp, Artificial Sequence
  derived and/or modified sequence
atggggcccgtcatgcctcctagtaaaaaacctgagtccagcggtatctctgtgtccagcggcctgagtcagtgctacgggggctctgggtttagcaaggccctacaggaggacgatgatctagatttttcactgcccgacatccgactggaggaaggggcaatggaggacgaagagttaacaaacctgaactggctccatgagagcaagaatttgttgaaatctttcggtgagagtgtcctgagatctgttagtcccgtgcaggatctggacgacgatactccaccctcccctgcgcattcagatatgccatatgatgcccggcaaaacccaaattgcaagccaccctactcctttagttgtttgatttttatggctattgaggactcgcctacaaaacggctccctgttaaggacatctacaattggatccttgaacactttccctatttcgcaaacgccccaacgggctggaaaaatagcgtgcgacacaacctgtcgctgaataagtgcttcaagaaagttgataaagaaaggtctcagtccatcgggaaaggtagtttgtggtgcattgatcctgagtatagacagaacctgattcaggcgcttaagaaaacaccctatcacccgcaccctcatgtgttcaatacgcctcctacttgcccccaggcttaccaaagtacctctggcccacctatatggccaggctcaacattctttaaaagaaacggtgctctcctgcaggaccctgatatcgacgccgccagtgccatgatgctacttaataccccaccggagattcaggcaggctttccgcctggcgtgatccagaacggagcccgcgtattgagccgggggctttttccaggtgtgcgccccctccctatcacacccatcggggtgaccgccgcaatgcgcaatgggattaccagctgtagaatgcgtaccgagagcgaaccctcatgtggcagccctgtggtttcaggcgatcctaaagaggaccataactactcatctgcaaagtcatctaacgcacggtctacatcccctacttctgactctatctctagcagcagctcttccgctgatgatcattacgaatttgcaactaaggggtcccaggagggatccgagggaagcgagggaagcttccgttctcatgagagtccaagcgacaccgaggaagacgaccggaagcacagccagaaggagcccaaagactcactcggcgattccggatatgcctcccagcataaaaaacggcagcactttgccaaggctcggaaggtgcctagcgacaccctgcccttaaagaagcggagaaccgaaaaaccaccagagtcggatgatgaggaaatgaaggaagccgcagggtcacttttgcacctggcaggaattagaagctgtctgaacaacataaccaataggacggccaaaggacagaaggaacagaaggaaactaccaagaattag

SEQ ID NO: 38142 - DNA, 1473 bp, Artificial Sequence
  derived and/or modified sequence
atgggccctgtgatgccacccagcaagaagccagagagcagcggcatctctgtgagcagcggcctgagccagtgctacggcggcagcggcttcagcaaggccctgcaggaggatgatgacctggacttcagcctgcctgacatccggctggaggagggcgccatggaggatgaggagctgaccaacctgaactggctgcacgagagcaagaacctgctgaagagctttggagagagcgtgctgcggtctgtgtcccctgtgcaggacctggatgatgacaccccacccagccctgcccacagcgacatgccctatgatgcccggcagaaccccaactgcaagccaccctacagcttcagctgcctgatcttcatggccatcgaggacagccccaccaagaggctgcctgtgaaggacatctacaactggatcctggagcacttcccctactttgccaatgcccccaccggctggaagaacagcgtgcgccacaacctgagcctgaacaagtgcttcaagaaggtggacaaggagaggagccagagcatcggcaagggcagcctgtggtgcattgatcctgagtaccggcagaacctgatccaggccctgaagaagaccccctaccacccccacccccacgtgttcaacaccccacccacctgcccccaggcctaccagagcaccagcggcccccccatctggccaggcagcaccttcttcaagagaaatggagccctgctgcaggaccctgacattgatgctgccagcgccatgatgctgctgaacaccccacctgagatccaggccggcttccccccaggagtcatccagaatggagcccgggtgctgagccggggcctcttccctggggtgcggcccctgcccatcacccccatcggcgtgacagctgccatgagaaatggcatcaccagctgcaggatgaggacagagagcgagcccagctgtggcagccctgtggtgtctggggaccccaaggaggaccacaactacagcagcgccaagagcagcaatgcccggagcaccagccccaccagtgacagcatcagcagcagcagcagcagcgcagatgaccactatgaatttgccaccaagggcagccaggagggcagcgagggcagcgagggcagcttccgcagccatgagagccccagcgacacagaagaagatgacaggaagcacagccagaaggagcccaaggacagcctgggggacagcggctacgccagccagcacaagaagaggcagcactttgccaaggccaggaaggtgcccagcgacaccctgcccctgaagaagagaagaacagagaagcccccagagagtgatgatgaggagatgaaggaggccgccggcagcctgctgcacctggccggcatccgcagctgcctgaacaacatcaccaacagaacagccaagggccagaaggagcagaaggagaccaccaagaactag

SEQ ID NO: 38143 - DNA, 1473 bp, Artificial Sequence
  derived and/or modified sequence
atgggccccgtgatgccccccagcaagaagcccgagagcagcggcatcagtgtgtcctccgggctttcacagtgctacggtgggtccggattctccaaggcgctacaggaagacgacgatctggacttctccctcccagacatccgcctcgaagagggcgccatggaagacgaggaacttacaaatttgaattggttgcacgagtctaagaacctactaaagtctttcggagagagtgtgctcagaagtgtctcccccgtgcaagacctggatgacgacacccccccttcacccgcccacagtgacatgccgtacgatgctaggcaaaatcctaactgtaagcctccctacagttttagctgcctcatcttcatggctattgaggactccccaaccaaaagactgcctgtgaaagatatttacaattggatcctggagcacttcccctactttgccaatgctccgaccggatggaagaattccgtccgtcataacctgtcactaaataaatgtttcaagaaggtggacaaggaacggagtcagagcatcggaaaggggagtctgtggtgtatagacccagagtatcgccagaatctcatccaggcactcaagaagacaccttatcaccctcatcctcacgtgtttaatacaccaccaacatgccctcaggcttaccagagcaccagcggaccccctatatggccaggatctacgttcttcaaacggaatggcgccctcctccaagaccctgacatagacgccgcaagcgccatgatgttgttgaatacccctcccgaaatacaagccggatttccaccaggcgtcatccagaatggtgcacgggtcctgtcccgggggttgtttcctggagtgagaccactacctattacccctatcggggtcaccgccgccatgcggaacggcataacttcctgtcgaatgaggacagaaagtgagccaagctgcggctctcctgtggtgtctggcgatcccaaggaagaccataactattcctcagcaaagtcctcgaatgcaaggtccacatcccccacttctgactccatctcttcctcaagcagctcagccgacgatcactatgagtttgccaccaaaggttcccaggagggatccgagggcagcgaaggctcctttcgatcgcacgaatcgccgagcgacaccgaagaggatgataggaaacattctcaaaaagaacccaaagactctttaggagattctggctatgccagccagcacaagaagaggcagcattttgcaaaggctcgaaaggtgcctagcgacacattacccctcaaaaagagaagaaccgagaagccccccgagtccgacgatgaggagatgaaggaggccgcggggtcactgctccatttggctggcatacggtcttgtctgaataacatcacaaaccggactgcgaagggacagaaagagcaaaaagagacgaccaagaattag

SEQ ID NO: 38144 - DNA, 1473 bp, Artificial Sequence
  derived and/or modified sequence
atgggccccgtgatgccccccagcaagaagcccgagagcagcggcattagtgtgtcaagcgggctgtcacagtgttacggaggaagtggcttctcaaaggctttgcaggaggatgatgacctggacttcagtctgccggacataagattggaagagggggctatggaggatgaggaattgaccaacctcaattggctgcacgaatcaaagaacttattaaagtcatttggcgagagcgttctgagatccgtgtctccagttcaagatttagacgacgatacacctccttctccagcgcactctgacatgccctacgacgccagacaaaaccctaattgcaaacctccttatagtttttcgtgtctgatctttatggccatagaggatagtcccactaaaaggctcccagtgaaagatatctacaattggattctggagcacttcccctactttgcgaacgcccccactggctggaaaaacagcgtgcgtcataacctcagccttaacaagtgtttcaagaaggtcgacaaagaacgctcacagtccatcgggaaaggctctctctggtgtatcgaccctgaataccgtcagaatctcatacaggctctcaaaaaaactccatatcacccgcatccccatgtgttcaatacccctcctacgtgccctcaggcctaccagagcacttccggccctcccatctggcccggtagcactttttttaaacgcaatggtgctctattgcaggatccagatattgatgccgcctcagccatgatgctgttgaataccccccccgagattcaggcaggattccccccaggggtcatacaaaatggagctcgcgtgctgtcccgagggctttttcccggagtgcgtccactgcctatcactccaatcggagttactgccgccatgaggaatggcatcacttcttgccgcatgcggactgagtcagaaccctcctgcggcagtccggtggtaagcggcgaccctaaagaggaccacaattattccagcgccaagtcctcaaatgctcggtctacttccccaacttcggactcaatctctagtagtagcagctccgccgatgatcactacgagtttgccaccaaggggtctcaggaaggaagcgagggatccgagggctcctttagatctcatgagtccccaagcgacactgaagaggacgaccgcaagcattcacagaaggagccaaaagattcacttggagactctggatacgcttcacagcacaaaaagcgacagcatttcgctaaggcccgtaaggttccttcggacactttaccccttaagaagcggagaacagaaaaaccacctgaaagcgacgacgaggagatgaaagaggccgccgggtctttgctgcacctggcaggcattaggagttgtctgaataatatcacgaatcgcaccgccaagggccagaaagagcagaaggagaccacaaaaaactag

SEQ ID NO: 38145 - DNA, 1473 bp, Artificial Sequence
  derived and/or modified sequence
atggggccagtgatgcccccttctaagaaaccagaatcctccggaatttcagtatccagcggcttaagtcagtgttatggaggaagtggctttagtaaagcgctgcaagaggacgacgacctcgatttttcccttccggacattaggctggaggaaggggctatggaggacgaggagctgacaaatctgaattggctgcatgaatcaaagaatctgttaaaaagctttggagagagcgtactcagatcagtaagtcccgttcaagatctagacgacgatactccgccaagccctgcgcacagcgacatgccttatgacgcccgtcaaaatcccaactgcaaaccaccctattccttttcttgtctcattttcatggcaatagaggacagccccactaaaaggttacctgtcaaggatatctataattggattctggaacacttcccttactttgccaatgcgccaaccggctggaagaacagcgtgcgccataatctcagcctcaacaaatgttttaaaaaggtggataaggagaggtcccagagcatcggcaaaggctccctgtggtgtatagatcctgagtacagacagaatctaatccaggccctaaaaaagacgccataccacccccacccccacgttttcaacaccccacctacgtgtccccaagcttaccagtccacgtccggccctccaatttggcctgggtccaccttttttaagagaaatggggcattgctccaagaccctgatattgatgcggcaagcgctatgatgctgctgaacacaccgccagagattcaggctggtttcccccctggcgtcattcagaatggagccagggtcctctccagaggactgttccctggcgtgagaccattgccaataacgccaattggggttactgcagccatgaggaatggcataacatcatgtcgcatgcggacagaatcggaaccctcatgtggtagccctgtggtaagtggtgaccccaaggaggatcacaactattcctcagctaagtcgtcaaatgcaaggtccacctccccgaccagtgattctatctcgtcctcttcatccagcgcggacgatcactatgaattcgccaccaagggcagccaggaaggctctgaaggcagcgaggggtctttccggagtcacgaatcaccgtctgatacagaagaagatgatcgcaaacactcacagaaggagccgaaggatagcctgggggattctggctacgctagccagcacaagaagcgtcagcactttgccaaggccagaaaggttccttctgacaccctcccactcaaaaagcggagaaccgagaaacctcctgagagcgatgacgaagaaatgaaagaagccgcagggtcgttgctacacctggcaggcatccgtagttgtcttaataacatcaccaaccgcactgctaaggggcagaaagagcagaaggaaacaacaaagaattag

SEQ ID NO: 38146 - DNA, 1473 bp, Artificial Sequence
  derived and/or modified sequence
atgggccctgtaatgccaccctctaaaaaaccggaaagctccggcatctcagtctcttccggactctcacagtgttacggaggcagcggatttagtaaggccttacaagaagacgacgaccttgatttttcactgccagacatccgcttagaggagggcgctatggaggacgaagaattaactaacttaaattggctgcacgaatccaagaacctcctcaaatccttcggagaatcagtcctaagaagtgtcagcccggtgcaggacttagacgatgacacccccccaagcccggcacactccgacatgccgtatgatgccagacagaatccaaactgtaagccaccctactccttttcatgtcttatctttatggccattgaggattcgcctacaaaacgcttacccgtgaaggatatatataactggattctggagcacttcccctacttcgctaacgctccaactggctggaagaattcagtgcgccacaatctgtcactgaacaaatgtttcaagaaagtcgacaaggaaagaagtcagtccataggaaaagggtctctgtggtgcatcgatcctgaatatcgacaaaacctgatccaggcccttaagaaaaccccctatcatccgcacccacatgtctttaatacgccaccaacatgtcctcaggcttatcagagcacatccgggcctccaatatggccagggtcaacctttttcaagcggaacggggctctcttgcaggatccagacatcgacgcagcatcagcaatgatgctacttaacactcctcctgagatacaagctggcttccctcccggagtgatccagaacggggcacgggtcctaagccgtggactgttccccggtgtgcgtcccctcccaattactccaatcggggtgactgctgccatgcgaaatggtataacaagctgccggatgcggacggagtccgaaccctcatgcggatcccccgtggtgagtggggatcctaaggaagatcataattactcctctgctaaatcctcaaacgcccgttccacaagtcccacatctgacagcatttcttcatcaagctcatcagccgacgaccactatgagttcgccactaagggatcacaggaggggtcagagggttcagaaggatcatttagatcacatgaatctccgtcagatactgaggaagatgatcgaaagcatagtcagaaggaaccaaaagatagcttgggtgattcagggtatgcctctcagcataagaaaaggcagcacttcgccaaagctagaaaggtgccatccgatacactgccattgaaaaagaggaggactgagaaaccaccagagagcgacgacgaggaaatgaaggaagcagccggatctctgcttcacctcgctggtatcagaagttgcttgaacaacattacaaataggacggcaaaggggcaaaaagaacagaaggagacaacaaaaaactag

SEQ ID NO: 38147 - DNA, 1473 bp, Artificial Sequence
  derived and/or modified sequence
atgggccccgtgatgccccccagcaagaagcccgagagcagcggcatcagcgtgagcagcggcctgagccagtgctacggcggcagcggcttcagcaaggccctgcaggaggacgacgacctggacttcagcctgcccgacatcagactggaggagggcgccatggaggacgaggagctgaccaacctgaactggctgcacgagagcaagaacctgctgaagagcttcggcgagagcgtgctgagaagcgtgagccccgtgcaggacctggacgacgacaccccccccagccccgcccacagcgacatgccctacgacgccagacagaaccccaactgcaagcccccctacagcttcagctgcctgatcttcatggccatcgaggacagccccaccaagagactgcccgtgaaggacatctacaactggatcctggagcacttcccctacttcgccaacgcccccaccggctggaagaacagcgtgagacacaacctgagcctgaacaagtgcttcaagaaggtggacaaggagagaagccagagcatcggcaagggcagcctgtggtgcatcgaccccgagtacagacagaacctgatccaggccctgaagaagaccccctaccacccccacccccacgtgttcaacaccccccccacctgcccccaggcctaccagagcaccagcggcccccccatctggcccggcagcaccttcttcaagagaaacggcgccctgctgcaggaccccgacatcgacgccgccagcgccatgatgctgctgaacaccccccccgagatccaggccggcttcccccccggcgtgatccagaacggcgccagagtgctgagcagaggcctgttccccggcgtgagacccctgcccatcacccccatcggcgtgaccgccgccatgagaaacggcatcaccagctgcagaatgagaaccgagagcgagcccagctgcggcagccccgtggtgagcggcgaccccaaggaggaccacaactacagcagcgccaagagcagcaacgccagaagcaccagccccaccagcgacagcatcagcagcagcagcagcagcgccgacgaccactacgagttcgccaccaagggcagccaggagggcagcgagggcagcgagggcagcttcagaagccacgagagccccagcgacaccgaggaggacgacagaaagcacagccagaaggagcccaaggacagcctgggcgacagcggctacgccagccagcacaagaagagacagcacttcgccaaggccagaaaggtgcccagcgacaccctgcccctgaagaagagaagaaccgagaagccccccgagagcgacgacgaggagatgaaggaggccgccggcagcctgctgcacctggccggcatcagaagctgcctgaacaacatcaccaacagaaccgccaagggccagaaggagcagaaggagaccaccaagaactag

SEQ ID NO: 38148 - protein, 237 aa, Artificial Sequence
  derived and/or modified sequence
MKGILVAGITAVLVAAVESLSCVQCNSWEKSCVNSIASECPSHANTSCISSSASSSLETPVRLYQNMFCSAENCSEETHITAFTVHVSAEEHFHFVSQCCQGKECSNTSDALDPPLKNVSSNAECPACYESNGTSCHGKPWKCYEEEQCVFLVAELKNDIESKSLVLKGCSNVSNATCQFLSGENKTLGGVIFRKFECANVNSLTPTSAPTTSHNVGSKASLYLLALASLLLRGLLP

SEQ ID NO: 38149 - DNA, 714 bp, Artificial Sequence
  derived and/or modified sequence
atgaagggcatcctggtggccggcatcaccgccgtgctggtggccgccgtggagagcctgagctgcgtgcagtgcaacagctgggagaagagctgcgtgaacagcatcgccagcgagtgccccagccacgccaacaccagctgcatcagcagcagcgccagcagcagcctggagacccccgtgagactgtaccagaacatgttctgcagcgccgagaactgcagcgaggagacccacatcaccgccttcaccgtgcacgtgagcgccgaggagcacttccacttcgtgagccagtgctgccagggcaaggagtgcagcaacaccagcgacgccctggacccccccctgaagaacgtgagcagcaacgccgagtgccccgcctgctacgagagcaacggcaccagctgccacggcaagccctggaagtgctacgaggaggagcagtgcgtgttcctggtggccgagctgaagaacgacatcgagagcaagagcctggtgctgaagggctgcagcaacgtgagcaacgccacctgccagttcctgagcggcgagaacaagaccctgggcggcgtgatcttcagaaagttcgagtgcgccaacgtgaacagcctgacccccaccagcgcccccaccaccagccacaacgtgggcagcaaggccagcctgtacctgctggccctggccagcctgctgctgagaggcctgctgccctag

SEQ ID NO: 38150 - DNA, 714 bp, Artificial Sequence
  derived and/or modified sequence
atgaaaggcattttggtcgccggcattacagctgtactcgtggcagcggttgagagcctcagctgcgtgcaatgcaacagttgggagaagagctgcgtcaacagtatcgcctctgagtgtccatctcacgctaacacctcttgtatatcgagctcagcaagttcctctctggagaccccggtcaggttgtaccagaatatgttctgctctgctgagaattgctctgaggagactcacattactgcttttacggtccatgtgtctgccgaggagcactttcacttcgtgagccagtgctgccaggggaaagaatgttcgaacacctctgatgcactggatcctccacttaaaaacgtctcaagcaatgccgaatgtccagcctgttatgagtccaacggcacctcatgccatggcaaaccatggaaatgctacgaggaagagcagtgtgttttcctggttgcagagctcaaaaatgacatcgagtctaaaagcttagtgttaaagggttgcagtaatgtgagcaatgctacctgccagtttctttcgggagagaacaagaccctaggtggggtcatattcagaaagtttgagtgcgccaatgtgaactcactgaccccaacttctgccccaactaccagccacaacgtagggtctaaagctagcttgtatcttctggcacttgcgtcactgctgttgagggggttgctcccttag

SEQ ID NO: 38151 - DNA, 714 bp, Artificial Sequence
  derived and/or modified sequence
atgaagggcatcctggtggccggcatcacagctgtgctggtggccgctgtggagagcctgagctgtgtgcagtgcaacagctgggagaagagctgtgtgaacagcatcgcctctgaatgtcccagccacgccaacaccagctgcatcagcagcagcgccagcagcagcctggagacccctgtgcggctgtaccagaacatgttctgcagcgctgagaactgcagcgaggagacccacatcacagccttcaccgtgcacgtgtctgctgaggagcacttccactttgtgtcccagtgctgccagggcaaggagtgcagcaacaccagtgatgccctggacccccccctgaagaatgtgagcagcaatgctgagtgcccagcctgctatgagagcaatggcaccagctgccacggcaagccctggaagtgctatgaggaggagcagtgtgtgttcctggtggccgagctgaagaatgacatcgagagcaagagcctggtgctgaagggctgcagcaatgtgtccaatgccacctgccagttcctgagcggggagaacaagaccctgggcggcgtcatcttcaggaagtttgaatgtgccaacgtgaacagcctgacccccaccagcgcccccaccaccagccacaacgtgggcagcaaggccagcctgtacctgctggccctggccagcctgctgctgcggggcctgctgccctag

SEQ ID NO: 38152 - DNA, 955 bp, Artificial Sequence
  derived and/or modified sequence
gcttgaggccctgtggtccccatccttgggagaagtcagctccagcaccatgaagggcatcctcgttgctggtatcactgcagtgcttgttgcagctgtagaatctctgagctgcgtgcagtgtaattcatgggaaaaatcctgtgtcaacagcattgcctctgaatgtccctcacatgccaacaccagctgtatcagctcctcagccagctcctctctagagacaccagtcagattataccagaatatgttctgctcagcggagaactgcagtgaggagacacacattacagccttcactgtccacgtgtctgctgaagaacactttcattttgtaagccagtgctgccaaggaaaggaatgcagcaacaccagcgatgccctggaccctcccctgaagaacgtgtccagcaacgcagagtgccctgcttgttatgaatctaatggaacttcctgtcatgggaagccctggaaatgctatgaagaagaacagtgtgtctttctagttgcagaacttaagaatgacattgagtctaagagtctcgtgctgaaaggctgttccaacgtcagtaacgccacctgtcagttcctgtctggtgaaaacaagactcttggaggagtcatctttcgaaagtttgagtgtgcaaatgtaaacagcttaacccccacgtctgcaccaaccacttcccacaacgtgggctccaaagcttccctctacctcttggcccttgccagcctccttcttcggggactgctgccctgaggtcctggggctgcactttgcccagcaccccatttctgcttctctgaggtccagagcaccccctgcggtgctgacaccctctttccctgctctgccccgtttaactgcccagtaagtgggagtcacaggtctccaggcaatgccgacagctgccttgttcttcattattaaagcactggttcattcactgcc

SEQ ID NO: 38153 - DNA, 714 bp, Artificial Sequence
  derived and/or modified sequence
atgaagggcatcctggtggccggcatcaccgccgtgctggtggccgccgtggagtcgctatcctgtgtgcagtgtaatagctgggaaaagagctgcgtgaacagcattgcctctgaatgtcctagccacgctaatacctcatgcattagctcttcagcttccagtagcttggagacgccggtgcggctgtatcaaaacatgttctgtagcgccgagaattgttctgaagagacacacatcaccgcatttacggtgcacgtgtctgcagaagaacattttcatttcgtgtcccagtgttgccaaggaaaggaatgttctaacacttccgatgctttagacccaccactgaagaatgtatcatcaaacgctgaatgtcccgcctgttacgaatccaacgggactagttgccacggtaaaccctggaagtgttatgaagaagagcagtgcgttttcctggtcgccgagttgaagaatgacatagaatctaagtcgctggtgcttaagggatgttctaatgtgagcaacgccacctgccagttcctgagtggtgagaacaaaaccctaggcggggtaatatttaggaaattcgagtgcgccaacgtgaatagcctgacccccaccagcgcacctacgacaagccacaatgtgggctctaaggccagcctgtatttactcgcccttgcttctctcctgctgaggggcctattaccatag

SEQ ID NO: 38154 - DNA, 714 bp, Artificial Sequence
  derived and/or modified sequence
atgaaaggcattctggtcgctggcatcactgccgtgctcgttgcagcagttgagtctctttcctgtgttcaatgtaactcatgggagaagtcctgtgtgaatagcatagcctctgagtgtccctctcatgccaacaccagctgcatctcctcttcagctagctctagcctggagacacccgtccggctttaccagaacatgttctgctctgctgagaattgtagcgaggagacccacataactgcctttactgtgcatgtgagcgcagaggagcactttcatttcgtgtcccaatgctgccaggggaaggaatgtagtaacacaagcgatgctctggatccacccctgaaaaacgtgagttcgaacgctgaatgcccagcctgctatgagtctaatgggactagttgccacggtaagccctggaagtgttacgaggaagagcaatgtgtttttctggttgcggagctgaaaaacgacatcgagagcaaatccctggttctaaaagggtgctcgaacgtgagtaatgccacctgtcagtttctttctggagaaaacaagacacttggtggtgtgatcttcagaaaatttgagtgcgcaaatgtcaatagcctgacacccaccagcgcgcctaccactagtcataatgtgggtagtaaggcttctctgtatttgctggctctagcatctttactattaagaggcctcctgccatag

SEQ ID NO: 38155 - protein, 125 aa, Artificial Sequence
  derived and/or modified sequence
MPSEKTFKQRRTFEQRVEDVRLIREQHPTKIPVIIERYKGEKQLPVLDKTKFLVPDHVNMSELIKIIRRRLQLNANQAFFLLVNGHSMVSVSTPISEVYESEKDEDGFLYMVCASQETFGMKLSV

SEQ ID NO: 38156 - DNA, 378 bp, Artificial Sequence
  derived and/or modified sequence
atgcccagtgaaaagacctttaaacagaggagaactttcgagcaaagagtcgaggatgtccgtcttattagagagcaacacccgaccaaaatccctgtgatcatagagagatataagggggagaagcagttgcccgtactggacaaaactaagttcctggtgcccgaccatgtgaacatgtcagagctgattaaaattatccgccgccgactgcaactgaacgcaaatcaggccttttttctgctggtgaacggacactcaatggtctcagtgagcacaccgatctcagaggtttatgaaagtgagaaggatgaggacgggttcctttatatggtgtgcgccagccaggaaactttcggaatgaaattgtcagtgtag

SEQ ID NO: 38157 - DNA, 378 bp, Artificial Sequence
  derived and/or modified sequence
atgccctcagaaaaaaccttcaaacaacgtcgcacattcgagcaaagggtcgaagacgtgcgtctgataagggaacagcaccctacaaaaatacctgtcataatcgagaggtacaagggcgaaaaacaactgcccgtattggacaaaactaaatttctggtccccgaccacgtaaacatgtcagagctgatcaaaatcatccgccgacggctccaattgaacgcaaaccaggctttctttcttctggtgaatggccactccatggtgagcgtgagcaccccgatctctgaagtgtatgagagtgaaaaagacgaggatggtttcctgtatatggtgtgcgcatctcaggaaacttttggtatgaaactcagtgtatag

SEQ ID NO: 38158 - DNA, 378 bp, Artificial Sequence
  derived and/or modified sequence
atgcccagcgagaagaccttcaagcagaggaggacctttgagcagagggtggaggatgtgcggctcatccgggagcagcaccccaccaagatccctgtgatcatcgagcgctacaagggggagaagcagctgcctgtgctggacaagaccaagttcctggtgcctgaccacgtgaacatgtctgagctgatcaagatcatcagaagaaggctgcagctgaatgccaaccaggccttcttcctgctggtgaatggccacagcatggtgtctgtgtccacccccatcagcgaggtgtatgaaagtgagaaggatgaagatggcttcctgtacatggtgtgtgccagccaggagaccttcggcatgaagctgtctgtgtag

SEQ ID NO: 38159 - DNA, 378 bp, Artificial Sequence
  derived and/or modified sequence
atgcccagcgagaagaccttcaagcagcggcggaccttcgagcagagggtggaggacgtccgtctaatacgggagcagcatccaaccaagattcccgtgatcattgaaaggtataagggggagaaacagcttccagttctggacaaaactaaatttctggtccctgaccacgtgaatatgagcgagctcattaagatcattcggcgaagactccagctcaacgcgaatcaggcgttcttcctgctcgtcaatggacattcgatggtttcagtgagcaccccgattagcgaggtctacgaatccgaaaaggatgaagacgggtttttatacatggtctgcgcctctcaggaaacatttggcatgaagctttccgtttag

SEQ ID NO: 38160 - DNA, 378 bp, Artificial Sequence
  derived and/or modified sequence
atgcccagcgagaagaccttcaagcagcggcggaccttcgagcagcgcgtagaagatgtgcgtttgataagagagcaacatccgacgaaaatccccgttatcattgaacgctacaagggagaaaagcaactccccgttctcgacaaaacaaagtttctggtgcccgaccacgtcaacatgtctgagttgattaagattattcgcaggaggctccaattgaatgccaatcaagcgtttttcctcttggtcaacggacactctatggtatctgtttcaacgcccatctctgaggtgtatgagagtgaaaaggacgaagatgggttcctatacatggtatgtgctagccaggagacgttcggaatgaagttgtccgtgtag

SEQ ID NO: 38161 - DNA, 378 bp, Artificial Sequence
  derived and/or modified sequence
atgcccagcgagaaaacatttaagcagagaagaaccttcgaacagcgcgtcgaggatgtgcgactgattagagagcagcaccccaccaagatccctgtgattattgagcggtacaaaggcgagaagcagctgcctgtgctggacaagaccaagttcctcgtgcctgaccacgtgaacatgagcgaactcatcaagatcatccggaggaggctacagttgaacgcgaatcaggctttctttcttctggtgaatgggcacagcatggtgtcagtgagcacgccgatcagcgaagtctatgaatctgagaaagatgaagacggtttcctctacatggtgtgcgcctcccaggagacttttggaatgaaactctccgtgtag

SEQ ID NO: 38162 - DNA, 378 bp, Artificial Sequence
  derived and/or modified sequence
atgccatccgagaaaactttcaaacaacgcagaacattcgagcagagggtagaggacgtgcggctgatacgcgaacaacaccctacgaaaattcctgtaattatcgaacggtacaagggcgaaaagcaactgcctgtcctcgataagacgaagttccttgtgcctgatcacgtgaatatgagcgagctgatcaagataatcaggcggaggctccagttgaatgctaatcaggccttttttcttctcgtcaacggccacagcatggtgtctgtgagtaccccaatctctgaagtctatgaatcggaaaaggatgaagatggattcttatacatggtgtgcgcctctcaggagacctttgggatgaagctgtcggtttag

SEQ ID NO: 38163 - DNA, 378 bp, Artificial Sequence
  derived and/or modified sequence
atgcccagcgagaagaccttcaagcagagaagaaccttcgagcagagagtggaggacgtgagactgatcagagagcagcaccccaccaagatccccgtgatcatcgagagatacaagggcgagaagcagctgcccgtgctggacaagaccaagttcctggtgcccgaccacgtgaacatgagcgagctgatcaagatcatcagaagaagactgcagctgaacgccaaccaggccttcttcctgctggtgaacggccacagcatggtgagcgtgagcacccccatcagcgaggtgtacgagagcgagaaggacgaggacggcttcctgtacatggtgtgcgccagccaggagaccttcggcatgaagctgagcgtgtag

SEQ ID NO: 38164 - protein, 1704 aa, Artificial Sequence
  derived and/or modified sequence
MAVLRQLALLLWKNYTLQKRKVLVTVLELFLPLLFSGILIWLRLKIQSENVPNATIYPGQSIQELPLFFTFPPPGDTWELAYIPSHSDAAKTVTETVRRALVINMRVRGFPSEKDFEDYIRYDNCSSSVLAAVVFEHPFNHSKEPLPLAVKYHLRFSYTRRNYMWTQTGSFFLKETEGWHTTSLFPLFPNPGPREPTSPDGGEPGYIREGFLAVQHAVDRAIMEYHADAATRQLFQRLTVTIKRFPYPPFIADPFLVAIQYQLPLLLLLSFTYTALTIARAVVQEKERRLKEYMRMMGLSSWLHWSAWFLLFFLFLLIAASFMTLLFCVKVKPNVAVLSRSDPSLVLAFLLCFAISTISFSFMVSTFFSKANMAAAFGGFLYFFTYIPYFFVAPRYNWMTLSQKLCSCLLSNVAMAMGAQLIGKFEAKGMGIQWRDLLSPVNVDDDFCFGQVLGMLLLDSVLYGLVTWYMEAVFPGQFGVPQPWYFFIMPSYWCGKPRAVAGKEEEDSDPEKALRNEYFEAEPEDLVAGIKIKHLSKVFRVGNKDRAAVRDLNLNLYEGQITVLLGHNGAGKTTTLSMLTGLFPPTSGRAYISGYEISQDMVQIRKSLGLCPQHDILFDNLTVAEHLYFYAQLKGLSRQKCPEEVKQMLHIIGLEDKWNSRSRFLSGGMRRKLSIGIALIAGSKVLILDEPTSGMDAISRRAIWDLLQRQKSDRTIVLTTHFMDEADLLGDRIAIMAKGELQCCGSSLFLKQKYGAGYHMTLVKEPHCNPEDISQLVHHHVPNATLESSAGAELSFILPRESTHRFEGLFAKLEKKQKELGIASFGASITTMEEVFLRVGKLVDSSMDIQAIQLPALQYQHERRASDWAVDSNLCGAMDPSDGIGALIEEERTAVKLNTGLALHCQQFWAMFLKKAAYSWREWKMVAAQVLVPLTCVTLALLAINYSSELFDDPMLRLTLGEYGRTVVPFSVPGTSQLGQQLSEHLKDALQAEGQEPREVLGDLEEFLIFRASVEGGGFNERCLVAASFRDVGERTVVNALFNNQAYHSPATALAVVDNLLFKLLCGPHASIVVSNFPQPRSALQAAKDQFNEGRKGFDIALNLLFAMAFLASTFSILAVSERAVQAKHVQFVSGVHVASFWLSALLWDLISFLIPSLLLLVVFKAFDVRAFTRDGHMADTLLLLLLYGWAIIPLMYLMNFFFLGAATAYTRLTIFNILSGIATFLMVTIMRIPAVKLEELSKTLDHVFLVLPNHCLGMAVSSFYENYETRRYCTSSEVAAHYCKKYNIQYQENFYAWSAPGVGRFVASMAASGCAYLILLFLIETNLLQRLRGILCALRRRRTLTELYTRMPVLPEDQDVADERTRILAPSPDSLLHTPLIIKELSKVYEQRVPLLAVDRLSLAVQKGECFGLLGFNGAGKTTTFKMLTGEESLTSGDAFVGGHRISSDVGKVRQRIGYCPQFDALLDHMTGREMLVMYARLRGIPERHIGACVENTLRGLLLEPHANKLVRTYSGGNKRKLSTGIALIGEPAVIFLDEPSTGMDPVARRLLWDTVARARESGKAIIITSHSMEECEALCTRLAIMVQGQFKCLGSPQHLKSKFGSGYSLRAKVQSEGQQEALEEFKAFVDLTFPGSVLEDEHQGMVHYHLPGRDLSWAKVFGILEKAKEKYGVDDYSVSQISLEQVFLSFAHLQPPTAEEGR

SEQ ID NO: 38165 - protein, 1708 aa, Artificial Sequence
  derived and/or modified sequence
TAPPPSPSLPLQDRAATSAHLALFTLSFQSTFLLFPAGCSAYLNLLRPPTSLAALGVPFSKTMAVLRQLALLLWKNYTLQKRKVLVTVLELFLPLLFSGILIWLRLKIQSENVPNATIYPGQSIQELPLFFTFPPPGDTWELAYIPSHSDAAKTVTETVRRALVINMRVRGFPSEKDFEDYIRYDNCSSSVLAAVVFEHPFNHSKEPLPLAVKYHLRFSYTRRNYMWTQTGSFFLKETEGWHTTSLFPLFPNPGPREPTSPDGGEPGYIREGFLAVQHAVDRAIMEYHADAATRQLFQRLTVTIKRFPYPPFIADPFLVAIQYQLPLLLLLSFTYTALTIARAVVQEKERRLKEYMRMMGLSSWLHWSAWFLLFFLFLLIAASFMTLLFCVKVKPNVAVLSRSDPSLVLAFLLCFAISTISFSFMVSTFFSKGMGIQWRDLLSPVNVDDDFCFGQVLGMLLLDSVLYGLVTWYMEAVFPGQFGVPQPWYFFIMPSYWCGKPRAVAGKEEEDSDPEKALRNEYFEAEPEDLVAGIKIKHLSKVFRVGNKDRAAVRDLNLNLYEGQITVLLGHNGAGKTTTLSMLTGLFPPTSGRAYISGYEISQDMVQIRKSLGLCPQHDILFDNLTVAEHLYFYAQLKGLSRQKCPEEVKQMLHIIGLEDKWNSRSRFLSGGMRRKLSIGIALIAGSKVLILDEPTSGMDAISRRAIWDLLQRQKSDRTIVLTTHFMDEADLLGDRIAIMAKGELQCCGSSLFLKQKYGAGYHMTLVKEPHCNPEDISQLVHHHVPNATLESSAGAELSFILPRESTHRFEGLFAKLEKKQKELGIASFGASITTMEEVFLRVGKLVDSSMDIQAIQLPALQYQHERRASDWAVDSNLCGAMDPSDGIGALIEEERTAVKLNTGLALHCQQFWAMFLKKAAYSWREWKMVAAQVLVPLTCVTLALLAINYSSELFDDPMLRLTLGEYGRTVVPFSVPGTSQLGQQLSEHLKDALQAEGQEPREVLGDLEEFLIFRASVEGGGFNERCLVAASFRDVGERTVVNALFNNQAYHSPATALAVVDNLLFKLLCGPHASIVVSNFPQPRSALQAAKDQFNEGRKGFDIALNLLFAMAFLASTFSILAVSERAVQAKHVQFVSGVHVASFWLSALLWDLISFLIPSLLLLVVFKAFDVRAFTRDGHMADTLLLLLLYGWAIIPLMYLMNFFFLGAATAYTRLTIFNILSGIATFLMVTIMRIPAVKLEELSKTLDHVFLVLPNHCLGMAVSSFYENYETRRYCTSSEVAAHYCKKYNIQYQENFYAWSAPGVGRFVASMAASGCAYLILLFLIETNLLQRLRGILCALRRRRTLTELYTRMPVLPEDQDVADERTRILAPSPDSLLHTPLIIKELSKVYEQRVPLLAVDRLSLAVQKGECFGLLGFNGAGKTTTFKMLTGEESLTSGDAFVGGHRISSDVGKVRQRIGYCPQFDALLDHMTGREMLVMYARLRGIPERHIGACVENTLRGLLLEPHANKLVRTYSGGNKRKLSTGIALIGEPAVIFLDEPSTGMDPVARRLLWDTVARARESGKAIIITSHSMEECEALCTRLAIMVQGQFKCLGSPQHLKSKFGSGYSLRAKVQSEGQQEALEEFKAFVDLTFPGSVLEDEHQGMVHYHLPGRDLSWAKVFGILEKAKEKYGVDDYSVSQISLEQVFLSFAHLQPPTAEEGR

SEQ ID NO: 38166 - DNA, 5115 bp, Artificial Sequence
  derived and/or modified sequence
atggcagtgctacggcagttggcactcctgctgtggaagaattacactctccaaaaacgcaaagtgttggtgaccgtcctggaactgtttctcccattgctgttcagcggcatcctgatttggctaaggttaaagatccagtcggagaacgtgcccaacgcaacaatctacccggggcagagcatccaggagctgcctctctttttcaccttccctcctcctggggatacctgggagctggcatacatcccaagtcactccgacgccgccaagacggtgaccgagaccgtccggcgggctttagttattaacatgagagtgagaggcttcccaagcgaaaaagactttgaggattacatcaggtacgacaactgctccagctctgtactcgctgcagttgttttcgaacatcctttcaaccacagcaaagagccactacctctggccgttaagtatcatctgaggttttcttacactagacgtaattatatgtggacacaaactggcagcttcttcttgaaggagaccgaaggatggcatactacatctctgtttccactatttcctaaccctggacctcgagagccgacatcccccgacggtggagaaccagggtatattagagagggttttctggctgttcagcatgccgttgatcgcgctatcatggaataccacgcagacgcggctacacggcaactgtttcagagactgaccgtcaccattaaacggttcccctatccacccttcatagcggatccattcctggtggcaatacaatatcagctgccactgctactcctgttgtcctttacctacaccgctttgacgattgcaagggcagtggtgcaggaaaaggagagacgactgaaggaatatatgcgcatgatggggctttctagctggttacactggtctgcttggttcctgctgttcttcttgtttctgctcatcgcagcgtcctttatgacccttctgttttgtgtgaaagttaagccgaatgtggccgttctctccagatccgatccctccctggtattagcctttctgttgtgcttcgctattagcactatatcattctcctttatggtaagcaccttcttctctaaggcaaacatggccgctgcctttggcggcttcctgtacttcttcacatacattccttactttttcgtggcaccgcgttacaactggatgactctgagccagaaactctgttcctgcttactttcgaatgtggccatggccatgggtgcccaattgattggcaaatttgaggccaaaggcatggggattcaatggagggacctgttatcgcctgttaacgtcgatgacgacttttgctttggtcaggtgcttggcatgctactgctggattcggtgctttacggcttagtcacatggtatatggaggccgtgttcccaggtcagtttggagtgcctcagccctggtatttttttattatgccctcatactggtgcgggaaaccacgtgcagtggccgggaaggaggaggaagacagtgaccccgaaaaagccctcagaaacgagtatttcgaggctgaacccgaggacctagtagccgggattaagatcaagcatctgtctaaggttttcagagtcggtaacaaggatagagctgccgttcgcgacctgaatctgaacctctacgagggacagatcaccgttctgctcggccacaacggcgcaggcaagacaacaactttaagcatgctgaccggcttatttccccctacctcaggccgcgcctatattagcggttacgagatttcacaggatatggttcaaataagaaagagcttagggctctgcccccagcatgacatcttgttcgataacctcactgttgcagagcatctttacttctacgctcagcttaaaggactgagtagacagaagtgccctgaggaagtgaagcagatgttacacattatcggcctggaggataaatggaacagccggtcacgatttttaagcggagggatgcgacgtaaacttagcattggaatcgctctgatcgcaggcagtaaagtgctcattttagacgagcccacatctgggatggatgcgatttcgaggagagcaatctgggacctgctccagcgacaaaaaagtgaccgaaccattgtgttgactacacactttatggacgaggcagatctgctaggtgacagaattgccattatggctaagggggaactgcagtgctgcggcagctctctctttctgaaacaaaagtacggcgccgggtaccacatgactcttgtgaaggaaccacattgcaatcctgaggatattagtcaactagtgcaccaccacgttccaaatgccactctcgagtccagtgctggagctgaattaagtttcatccttccacgtgaatcaacacaccgttttgaggggctctttgccaagctggagaaaaagcagaaggagttgggcatcgcctcttttggggcctcaatcacgactatggaagaagtctttctgcgcgttggcaagctagtcgattcttctatggacattcaggccatccagctgccagcattgcagtatcagcacgaaaggagagcttccgattgggccgtggatagcaatctgtgcggggcaatggacccgtctgacggaattggcgcgttaatcgaggaggaaaggacagccgtaaaattaaataccggattggccctgcactgccagcagttctgggctatgttcctcaagaaggcagcctactcctggagggaatggaagatggttgctgctcaggttctggtacctctcacttgcgtgactttggcactgctggcaatcaactattccagtgaactcttcgatgaccctatgctcagacttactctgggtgaatatgggagaactgtagtgcccttcagcgtaccgggaactagccagctgggccagcagttgtccgagcacttaaaggatgcgttgcaagcggaaggacaagagccccgtgaagtgctaggcgacttagaggaatttctaatattcagagcctccgtggaaggaggaggttttaatgagcgctgtctggtagcggcaagctttcgggacgtcggtgagcgcaccgtggttaacgcgttgtttaacaatcaagcataccacagccctgcgacagcccttgccgtggtggataacttgctgtttaaactcctgtgcggcccccatgcttctatcgtggtctcgaatttcccccagccaaggtcggccctccaagctgctaaggatcagtttaatgagggacgaaaaggcttcgacattgccctgaatctgcttttcgcaatggccttcctggctagcacattctctatcttagcagtctcagagcgtgcagtacaggccaagcatgtgcagttcgtaagtggggtgcatgtggcttctttctggctcagcgcgctgctctgggatctcattagcttcctgatcccttctctgcttctcctggtggtgtttaaagctttcgacgttcgggcattcacaagagatggccacatggccgacacccttttactgcttctgctctatggctgggcaattatcccactcatgtaccttatgaattttttttttcttggcgctgctactgcatacacccgtctgaccatcttcaatattttgtctggaatcgccacctttctgatggtgacaataatgaggatccctgctgtgaagctggaagagttgtccaaaactctcgatcacgtgtttctggtcttgccaaaccattgtttaggaatggcggtaagttcattttacgaaaattatgagacacggcgctattgtacctcgtccgaggtcgctgcccattattgtaagaagtacaacattcaataccaggagaatttctatgcatggagcgcccctggcgtcggaaggtttgtcgcttctatggctgctagtggctgtgcctacttaatactcttgttcctcatcgagactaacctccttcagcggcttcggggaattctctgtgccctccgcaggcgaaggactctaacggaactttatacccgcatgccagttctaccagaggaccaggacgtggctgatgaacggacacgtatcctggccccttcccccgattctctcctgcatactccactgataatcaaagagctgtcaaaggtatatgaacagagagtaccactacttgccgtcgaccggctgtccttggctgtgcagaagggtgagtgcttcggattgctcgggttcaatggggccggaaaaacgacgacgtttaaaatgctcacaggtgaggaaagcttaaccagcggggacgctttcgtcggcggtcaccggattagtagcgacgttggaaaagtgaggcagaggatcggctattgcccccaattcgacgcccttctggaccacatgaccggtagagagatgctggtcatgtatgcccgtctcagaggaatcccagagcgacacattggtgcctgcgtggaaaataccctgaggggtttgctgcttgagccgcatgcaaataagctggttcggacctatagcggagggaataagcgcaagctctctactggaattgctctaattggggagccagcagtgatattcctcgacgagccttccaccggcatggaccccgtggccagacggctgttgtgggatacagttgctcgtgcccgcgagtcaggcaaagccattatcatcacgagccattctatggaggagtgcgaggccctatgcacacggctagcaattatggtccagggtcagttcaagtgcctaggttcaccacagcaccttaaaagcaaatttggttccggatatagtttgcgtgccaaagttcagtctgagggacagcaggaggctctggaagagttcaaagccttcgtggacctcacttttcccggaagtgtcctcgaggatgagcaccagggaatggtacactaccacctaccaggtagagacctcagctgggccaaagtgtttggaattttggagaaggccaaggagaaatacggagtagacgattactctgtgtcccagatcagtctagaacaggtgtttctctctttcgctcacttacagccaccgaccgcagaggagggtcgctag

SEQ ID NO: 38167 - DNA, 5127 bp, Artificial Sequence
  derived and/or modified sequence
acggctccaccaccctctccatcgcttccactgcaggatagggcagcgacatcggcccatctggcacttttcacactatcatttcagagtaccttcctgctgtttcccgctggctgctccgcctacctgaatctgctgcgcccaccgacctccctggcagccctcggcgtgcctttttccaaaaccatggctgtgttgcgccaacttgctctactgttatggaagaattacacgcttcagaagcgaaaggtgctggtcacagtgctggagctcttcttgccattgctttttagcggcatattgatatggctgagactcaagatccagagtgaaaacgtgcctaatgcaactatatatccagggcagtctatccaagagttgcccctgtttttcacatttcctcctcccggggacacgtgggaacttgcttatatcccctcacactctgatgcagctaagactgtaaccgagacagtacgacgagcgctcgttattaatatgcgcgtccggggtttccccagtgagaaagattttgaagactacatccggtatgacaattgctcaagtagtgtcctggctgctgttgttttcgagcatcccttcaaccacagcaaggagccgcttcccctggccgtcaaataccacctccgattctcctatacacgaagaaattacatgtggacacagacaggctccttctttttaaaagaaacagaggggtggcatacgaccagcctcttccccctgttccccaatcccggccccagagaacccacctcccccgacgggggcgaacccgggtacatcagggaaggattcctggccgtgcagcacgccgtggatcgggctatcatggagtatcatgcggatgcagccacccgacagttgttccagagactgacagttaccatcaagcggttcccctaccctcccttcatagctgatccattcctagtagccattcagtatcagctgcccttgctgttattgctctcattcacctatacagcgctgacaattgcaagagcagtcgtgcaggaaaaagagcggcgcctcaaggagtatatgcggatgatgggattatcctcgtggctgcattggagcgcctggttcttgctttttttcctgtttctgcttatagccgccagttttatgaccctgttattttgtgtgaaagtcaaacctaacgtggctgtgctttcccggagcgatccgtccctggtgctggcctttcttctgtgttttgcgatcagcaccatctcttttagtttcatggtgagtacatttttctctaagggaatggggatacaatggcgggacttgctgtcacccgttaacgttgatgatgacttttgtttcggtcaggttctcggaatgcttctgctagacagtgtgctgtatggcctcgttacatggtacatggaggccgtgttccctgggcagtttggtgttccacagccctggtattttttcattatgccttcctactggtgcggaaaaccgcgggccgttgcagggaaagaggaggaggactctgaccccgaaaaagccctcagaaatgagtattttgaagctgagcctgaggatctagtggccggtatcaaaatcaaacacttgagcaaagtgtttcgtgtcggaaacaaggaccgggcagctgtaagagacctgaacttgaacctgtacgagggtcaaattacggtgctcttgggtcataacggagcagggaaaacaacaactctctctatgctcactgggttatttccgcctacgtccggcagggcttatatcagcggttacgaaatatctcaggacatggttcagatcaggaagtcacttggtctgtgtcctcaacatgatatattgtttgacaatctgaccgtggcagagcatctgtatttctatgcacagctcaagggtctctctcgccaaaagtgccccgaagaggtcaaacaaatgttgcatatcataggattagaagacaagtggaactccaggagtaggtttctctctgggggcatgcgccggaagcttagtatcgggattgcactaattgccgggtccaaggtgttgattctcgacgagccgacatctggcatggacgcaataagtcggagggcgatttgggacctgctgcagagacagaagtccgatcgtaccatagtgctgaccacacatttcatggacgaggctgatcttttaggggatcggatcgccataatggcgaagggcgaactgcagtgttgcgggtccagtctttttctcaagcagaagtacggggccggctaccatatgactctggtgaaggaacctcactgcaacccagaggacattagccagctggtgcatcaccatgtgcccaatgccaccctggaaagttccgccggagccgaactgtcgtttatactgcctcgggagtcaacccatcgcttcgagggtctgtttgcaaagctcgaaaaaaaacagaaggaactgggtattgctagtttcggagcaagcattaccacaatggaagaagtgttcctgcgcgttggcaaactcgtggatagctccatggacattcaggctatccaattgcccgccctgcagtatcagcacgagaggcgagcatcagattgggccgtggattccaatctttgcggggctatggaccccagcgacggaataggagcactgatcgaggaagaacggacagccgtgaagctaaatacaggactggccctgcactgtcagcagttctgggcaatgttcctgaagaaagccgcctacagttggagagagtggaagatggtcgctgcccaagttctggtgcctcttacatgcgtgacattggctctcctcgctattaattacagctctgaacttttcgatgatcccatgcttaggctaacactgggagagtacgggcgtactgtagtaccatttagtgtgcctggcacctctcagctgggtcaacagctgagtgagcacttaaaagatgctctacaggcggaagggcaagagcctcgcgaggtgctcggggatcttgaggaattcctaatctttagggccagcgtggaaggcggcggatttaacgaaagatgcctggtggcggcctccttccgggacgtgggcgaacgaaccgttgtaaatgccttgttcaataatcaggcataccattctcccgccacagctctcgccgtggtggacaatttgctctttaagctcctctgtggcccacacgcctccattgtggtatccaacttcccacaacccagaagtgctctgcaggctgctaaggaccagtttaacgaaggccgtaaaggattcgatatcgctctgaatctgctcttcgccatggccttcctcgcatccacattctctatcctagccgtgtctgaacgggctgttcaggctaagcacgtgcagtttgtttcaggggtccatgtggccagtttctggctgtcagctctgctttgggatttgatcagcttcctaatacccagcttacttctgctcgtggtgtttaaagctttcgacgttcgggcattcaccagggacgggcatatggccgacacacttcttcttctgctactgtacggttgggccatcatccccctgatgtacctgatgaactttttttttctaggggccgcaacagcttacaccagactaactatcttcaatattctttccggaatcgccacgttcttaatggtcaccatcatgcgtatccctgctgtgaaactcgaagaactgagtaagaccctcgaccacgttttcctcgtcctgcctaatcattgtctaggaatggccgtgagcagtttctacgaaaactacgagaccagaaggtactgtacctcatcggaagttgctgcccactactgcaagaagtacaatatacagtaccaggaaaacttctacgcatggagcgctcccggcgtaggcagatttgtcgccagtatggcagcttccggatgcgcttacctgatcctactgtttttgattgagactaatctgctccagcgcctgagaggtatcctgtgcgcacttcggcggaggcgaaccctcaccgagttgtacacgagaatgcccgtcttaccagaggatcaggacgtggcagatgagcggacccggattttagccccttctcccgactccttattgcatacaccccttataatcaaagaactgtcaaaggtatatgagcagcgcgtcccgcttctcgctgtggatagactatctttggcggtgcaaaaaggggagtgtttcggactgcttgggttcaatggagcaggcaagactaccacatttaagatgctcaccggtgaagagtcactgacatcaggggacgccttcgttgggggccaccgcatttcatctgatgttggcaaggtgcgtcaacgaatcgggtattgtcctcagtttgacgccctgctggaccacatgactggccgcgagatgctggtgatgtacgcgcgcctgcgcggtatccctgagcggcacatcggcgcctgcgtggagaacacgctaagggggcttctgttagagccacacgctaataaattggtgcgtacttacagtggaggtaataagaggaaacttagcactggcatcgccctgattggagagccagctgtgatcttcctggacgaaccttcaacagggatggatcccgtcgcaaggcgcttattgtgggataccgtggcccgtgccagagagagcggaaaggctataatcatcacctcacactccatggaagagtgtgaagcgttgtgcacccgcttggccataatggtccaaggtcagttcaagtgcctcggctctccccagcatttaaagtccaagtttggtagcggttattctctgcgagccaaggtccagtccgaggggcagcaagaagcactggaggagttcaaagcattcgtggatttaacgttcccgggttcggtgctcgaagatgagcaccagggtatggttcattatcacctgcccggcagagacttaagttgggctaaagtgtttggcatactggaaaaggccaaggaaaagtacggggtggacgactattccgtgagtcagataagtctcgagcaggtgtttctcagttttgcccacctacaaccccccacggctgaggagggcagatag

SEQ ID NO: 38168 - DNA, 5115 bp, Artificial Sequence
  derived and/or modified sequence
atggctgtgctgcggcagctggccctgctgctgtggaagaactacaccctgcagaagaggaaggtgctggtgacagtgctggagctgttcctgcccctgctcttcagcggcatcctgatctggctgcggctgaagatccagagtgaaaatgtgcccaatgccaccatctacccaggccagagcatccaggagctgcccctcttcttcaccttccccccacctggggacacctgggagctggcctacatccccagccacagtgatgctgccaagacagtgacagagaccgtgcggcgggccctggtgatcaacatgagggtgcggggcttccccagcgagaaggactttgaggactacatccgctatgacaactgcagcagctctgtgctggccgctgtggtgtttgagcaccccttcaaccacagcaaggagcccctgcccctggccgtgaagtaccacctgcgcttctcctacaccaggaggaactacatgtggacccagacaggcagcttcttcctgaaggagacagagggctggcacaccaccagcctcttccccctcttccccaaccctggcccccgggagcccaccagcccagatggaggagagcccggctacatccgggagggcttcctggccgtgcagcacgctgtggaccgggccatcatggagtaccacgcagatgctgccacccggcagctgttccagaggctgactgtgaccatcaagcgcttcccctacccacccttcatcgctgaccccttcctggtggccatccagtaccagctgcccctgctgctgctgctgtccttcacctacacagccctgaccatcgcccgggctgtggtgcaggagaaggagcggcggctgaaggagtacatgaggatgatgggcctgagctcctggctgcactggagcgcctggttcctgctcttcttcctgttcctgctgattgctgccagcttcatgaccctgctcttctgtgtgaaggtgaagcccaacgtggccgtgctgagcagaagtgaccccagcctggtgctggccttcctgctgtgctttgccatcagcaccatctccttctccttcatggtgtccaccttcttcagcaaggccaacatggctgctgcctttggaggcttcctgtacttcttcacctacatcccctacttctttgtggccccccgctacaactggatgaccctgagccagaagctgtgcagctgcctgctgagcaatgtggccatggccatgggcgcccagctgattggcaagtttgaggccaagggcatgggcatccagtggagggacctgctgagccctgtgaatgtggatgatgacttctgcttcggccaggtgctgggcatgctgctgctggacagcgtgctgtatggcctggtgacctggtacatggaggccgtgtttcctggccagtttggagtgccccagccctggtacttcttcatcatgcccagctactggtgtgggaagcccagggctgtggccggcaaggaggaggaggacagcgaccctgagaaggccctgagaaatgagtactttgaagctgagcctgaggacctggtggccggcatcaagatcaagcacctgagcaaggtgttccgggtgggcaacaaggacagagctgctgtgcgggacctgaacctgaacctgtatgagggccagatcaccgtgctgctgggccacaacggggccggcaagaccaccaccctgtccatgctgaccggcctcttcccccccaccagcggccgggcctacatcagcggctatgagatcagccaggacatggtgcagatcaggaagagcctgggcctgtgcccccagcacgacatcctgtttgacaacctgactgtggccgagcacctgtacttctacgcccagctgaagggcctgagccggcagaagtgcccagaggaggtgaagcagatgctgcacatcatcggcctggaggacaagtggaacagccgcagccgcttcctgagcggcggcatgaggaggaagctgagcattggaattgccctgattgctggcagcaaggtgctgatcctggatgagcccaccagcggcatggatgccatcagccggcgggccatctgggacctgctgcagaggcagaagagtgacaggaccatcgtgctgaccacccacttcatggatgaggccgacctgctgggggacagaattgccatcatggccaagggggagctgcagtgctgcggcagcagcctcttcctgaagcagaagtacggggccggctaccacatgaccctggtgaaggagccccactgcaaccctgaggacatcagccagctggtgcaccaccacgtgcccaatgccaccctggagagcagcgctggagctgagctgtccttcatcctgccccgggagagcacccacagatttgagggcctgtttgccaagctggagaagaagcagaaggagctgggcatcgccagctttggagccagcatcaccaccatggaggaggtgttcctgcgggtgggcaagctggtggacagctccatggacatccaggccatccagctgcctgccctgcagtaccagcatgaaagaagagccagtgactgggccgtggacagcaacctgtgtggggccatggaccccagtgatggcatcggggccctgattgaggaggagaggacagctgtgaagctgaacacaggcctggccctgcactgccagcagttctgggccatgttcctgaagaaggccgcctacagctggagggagtggaagatggtggccgcccaggtgctggtgcccctgacctgtgtgaccctggccctgctggccatcaactacagcagcgagctgtttgatgaccccatgctgcggctgaccctgggggagtatggccgcacagtggtgcccttctctgtgcccggcaccagccagctgggccagcagctgtctgagcacctgaaggatgccctgcaggccgagggccaggagccccgggaggtgctgggggacctggaggagttcctgatcttccgggcctctgtggagggcggcggcttcaatgaacgctgcctggtggccgccagcttcagagatgtgggggagaggacagtggtgaatgccctcttcaacaaccaggcctaccacagccctgccacagccctggccgtggtggacaacctgctcttcaagctgctgtgtggcccccacgccagcatcgtggtgagcaacttcccccagcccaggtctgccctgcaggccgccaaggaccagttcaatgaaggaaggaagggctttgacatcgccctgaacctgctgtttgccatggccttcctggccagcaccttcagcatcctggccgtgtctgaaagagctgtgcaggccaagcacgtgcagtttgtgtctggagtgcacgtggccagcttctggctgagcgccctgctgtgggacctgatctccttcctgatccccagcctgctgctgctggtggtgttcaaggcctttgatgtgcgggccttcaccagagatggccacatggctgacaccctgctgctgctgctgctgtatggctgggccatcatccccctgatgtacctgatgaacttcttcttcctgggcgccgccacagcctacacccggctgaccatcttcaacatcctgagcggcatcgccaccttcctgatggtgaccatcatgaggatcccagctgtgaagctggaggagctgagcaagaccctggaccacgtgttcctggtgctgcccaaccactgcctgggcatggctgtgtcctccttctatgagaactatgagacccggcgctactgcaccagcagcgaggtggccgcccactactgcaagaagtacaacatccagtaccaggagaacttctacgcctggagcgcccctggggtgggccgctttgtggcctccatggccgccagcggctgtgcctacctgatcctgctcttcctgattgagaccaacctgctgcagaggctgcggggcatcctgtgtgccctgcggcggcggaggaccctgacagagctgtacaccaggatgcctgtgctgcctgaggaccaggatgtggctgatgagaggacccgcatcctggcccccagcccagacagcctgctgcacacccccctcatcatcaaggagctgagcaaggtgtatgagcagagggtgcccctgctggccgtggaccggctgagcctggccgtgcagaagggggagtgcttcggcctgctgggcttcaacggggccggcaagaccaccaccttcaagatgctgaccggggaggagagcctgaccagcggagatgcctttgtgggcggccaccgcatcagcagtgatgtgggcaaggtgcggcagagaattggctactgcccccagtttgatgccctgctggaccacatgacaggccgggagatgctggtgatgtatgcccggctgcggggcatccctgagcggcacatcggggcctgtgtggagaacaccctgcggggcctgctgctggagccccacgccaacaagctggtgaggacctacagcggcggcaacaagaggaagctgagcactggaattgccctgattggagagcctgctgtgatcttcctggatgagcccagcacaggcatggaccctgtggcccggcggctgctgtgggacacagtggcccgggcccgggagagcggcaaggccatcatcatcaccagccacagcatggaggagtgtgaggccctgtgcacccggctggccatcatggtgcagggccagttcaagtgcctgggcagcccccagcacctgaagagcaagtttggaagtggctacagcctgcgggccaaggtgcagagcgagggccagcaggaggccctggaggagttcaaggcctttgtggacctgaccttccctggctctgtgctggaggatgagcaccagggcatggtgcactaccacctgcccggccgggacctgtcctgggccaaggtgtttggcatcctggagaaggccaaggagaagtatggagtggatgactacagcgtgtcccagatcagcctggagcaggtgttcctgagctttgcccacctgcagcccccaacagctgaggagggccgctag

SEQ ID NO: 38169 - DNA, 5127 bp, Artificial Sequence
  derived and/or modified sequence
acagcccccccacccagccccagcctgcccctgcaggacagagctgccaccagcgcccacctggccctcttcaccctgtccttccagagcaccttcctgctcttccctgctggctgcagcgcctacctgaacctgctgcggccccccaccagcctggccgccctgggcgtgcccttcagcaagaccatggctgtgctgcggcagctggccctgctgctgtggaagaactacaccctgcagaagaggaaggtgctggtgacagtgctggagctgttcctgcccctgctcttcagcggcatcctgatctggctgcggctgaagatccagagtgaaaatgtgcccaatgccaccatctacccaggccagagcatccaggagctgcccctcttcttcaccttccccccacctggggacacctgggagctggcctacatccccagccacagtgatgctgccaagacagtgacagagaccgtgcggcgggccctggtgatcaacatgagggtgcggggcttccccagcgagaaggactttgaggactacatccgctatgacaactgcagcagctctgtgctggccgctgtggtgtttgagcaccccttcaaccacagcaaggagcccctgcccctggccgtgaagtaccacctgcgcttctcctacaccaggaggaactacatgtggacccagacaggcagcttcttcctgaaggagacagagggctggcacaccaccagcctcttccccctcttccccaaccctggcccccgggagcccaccagcccagatggaggagagcccggctacatccgggagggcttcctggccgtgcagcacgctgtggaccgggccatcatggagtaccacgcagatgctgccacccggcagctgttccagaggctgactgtgaccatcaagcgcttcccctacccacccttcatcgctgaccccttcctggtggccatccagtaccagctgcccctgctgctgctgctgtccttcacctacacagccctgaccatcgcccgggctgtggtgcaggagaaggagcggcggctgaaggagtacatgaggatgatgggcctgagctcctggctgcactggagcgcctggttcctgctcttcttcctgttcctgctgattgctgccagcttcatgaccctgctcttctgtgtgaaggtgaagcccaacgtggccgtgctgagcagaagtgaccccagcctggtgctggccttcctgctgtgctttgccatcagcaccatctccttctccttcatggtgtccaccttcttcagcaagggcatgggcatccagtggagggacctgctgagccctgtgaatgtggatgatgacttctgcttcggccaggtgctgggcatgctgctgctggacagcgtgctgtatggcctggtgacctggtacatggaggccgtgtttcctggccagtttggagtgccccagccctggtacttcttcatcatgcccagctactggtgtgggaagcccagggctgtggccggcaaggaggaggaggacagcgaccctgagaaggccctgagaaatgagtactttgaagctgagcctgaggacctggtggccggcatcaagatcaagcacctgagcaaggtgttccgggtgggcaacaaggacagagctgctgtgcgggacctgaacctgaacctgtatgagggccagatcaccgtgctgctgggccacaacggggccggcaagaccaccaccctgtccatgctgaccggcctcttcccccccaccagcggccgggcctacatcagcggctatgagatcagccaggacatggtgcagatcaggaagagcctgggcctgtgcccccagcacgacatcctgtttgacaacctgactgtggccgagcacctgtacttctacgcccagctgaagggcctgagccggcagaagtgcccagaggaggtgaagcagatgctgcacatcatcggcctggaggacaagtggaacagccgcagccgcttcctgagcggcggcatgaggaggaagctgagcattggaattgccctgattgctggcagcaaggtgctgatcctggatgagcccaccagcggcatggatgccatcagccggcgggccatctgggacctgctgcagaggcagaagagtgacaggaccatcgtgctgaccacccacttcatggatgaggccgacctgctgggggacagaattgccatcatggccaagggggagctgcagtgctgcggcagcagcctcttcctgaagcagaagtacggggccggctaccacatgaccctggtgaaggagccccactgcaaccctgaggacatcagccagctggtgcaccaccacgtgcccaatgccaccctggagagcagcgctggagctgagctgtccttcatcctgccccgggagagcacccacagatttgagggcctgtttgccaagctggagaagaagcagaaggagctgggcatcgccagctttggagccagcatcaccaccatggaggaggtgttcctgcgggtgggcaagctggtggacagctccatggacatccaggccatccagctgcctgccctgcagtaccagcatgaaagaagagccagtgactgggccgtggacagcaacctgtgtggggccatggaccccagtgatggcatcggggccctgattgaggaggagaggacagctgtgaagctgaacacaggcctggccctgcactgccagcagttctgggccatgttcctgaagaaggccgcctacagctggagggagtggaagatggtggccgcccaggtgctggtgcccctgacctgtgtgaccctggccctgctggccatcaactacagcagcgagctgtttgatgaccccatgctgcggctgaccctgggggagtatggccgcacagtggtgcccttctctgtgcccggcaccagccagctgggccagcagctgtctgagcacctgaaggatgccctgcaggccgagggccaggagccccgggaggtgctgggggacctggaggagttcctgatcttccgggcctctgtggagggcggcggcttcaatgaacgctgcctggtggccgccagcttcagagatgtgggggagaggacagtggtgaatgccctcttcaacaaccaggcctaccacagccctgccacagccctggccgtggtggacaacctgctcttcaagctgctgtgtggcccccacgccagcatcgtggtgagcaacttcccccagcccaggtctgccctgcaggccgccaaggaccagttcaatgaaggaaggaagggctttgacatcgccctgaacctgctgtttgccatggccttcctggccagcaccttcagcatcctggccgtgtctgaaagagctgtgcaggccaagcacgtgcagtttgtgtctggagtgcacgtggccagcttctggctgagcgccctgctgtgggacctgatctccttcctgatccccagcctgctgctgctggtggtgttcaaggcctttgatgtgcgggccttcaccagagatggccacatggctgacaccctgctgctgctgctgctgtatggctgggccatcatccccctgatgtacctgatgaacttcttcttcctgggcgccgccacagcctacacccggctgaccatcttcaacatcctgagcggcatcgccaccttcctgatggtgaccatcatgaggatcccagctgtgaagctggaggagctgagcaagaccctggaccacgtgttcctggtgctgcccaaccactgcctgggcatggctgtgtcctccttctatgagaactatgagacccggcgctactgcaccagcagcgaggtggccgcccactactgcaagaagtacaacatccagtaccaggagaacttctacgcctggagcgcccctggggtgggccgctttgtggcctccatggccgccagcggctgtgcctacctgatcctgctcttcctgattgagaccaacctgctgcagaggctgcggggcatcctgtgtgccctgcggcggcggaggaccctgacagagctgtacaccaggatgcctgtgctgcctgaggaccaggatgtggctgatgagaggacccgcatcctggcccccagcccagacagcctgctgcacacccccctcatcatcaaggagctgagcaaggtgtatgagcagagggtgcccctgctggccgtggaccggctgagcctggccgtgcagaagggggagtgcttcggcctgctgggcttcaacggggccggcaagaccaccaccttcaagatgctgaccggggaggagagcctgaccagcggagatgcctttgtgggcggccaccgcatcagcagtgatgtgggcaaggtgcggcagagaattggctactgcccccagtttgatgccctgctggaccacatgacaggccgggagatgctggtgatgtatgcccggctgcggggcatccctgagcggcacatcggggcctgtgtggagaacaccctgcggggcctgctgctggagccccacgccaacaagctggtgaggacctacagcggcggcaacaagaggaagctgagcactggaattgccctgattggagagcctgctgtgatcttcctggatgagcccagcacaggcatggaccctgtggcccggcggctgctgtgggacacagtggcccgggcccgggagagcggcaaggccatcatcatcaccagccacagcatggaggagtgtgaggccctgtgcacccggctggccatcatggtgcagggccagttcaagtgcctgggcagcccccagcacctgaagagcaagtttggaagtggctacagcctgcgggccaaggtgcagagcgagggccagcaggaggccctggaggagttcaaggcctttgtggacctgaccttccctggctctgtgctggaggatgagcaccagggcatggtgcactaccacctgcccggccgggacctgtcctgggccaaggtgtttggcatcctggagaaggccaaggagaagtatggagtggatgactacagcgtgtcccagatcagcctggagcaggtgttcctgagctttgcccacctgcagcccccaacagctgaggagggccgctag

SEQ ID NO: 38170 - DNA, 5115 bp, Artificial Sequence
  derived and/or modified sequence
atggccgtgctgcggcagctggccctgctgctgtggaagaactacacactacagaagaggaaggtgcttgtcacagtgttggaacttttcttgcccctcttgttttctgggattttaatctggctccgattgaagatccagagcgagaatgtgccgaacgccacaatttaccctggccagagcatccaagaactacccctatttttcacatttccccccccaggcgacacatgggaactggcatatatccccagccactcggatgcagccaagactgtcacagagacagttcgaagggcgttggtgataaacatgagagtgagaggattccccagcgagaaagacttcgaagactacattcgatacgataactgctcttccagcgtactcgcagcagtggtgttcgagcatcctttcaaccacagtaaggaaccactgcccttggcggtcaaataccacctgcgcttcagttacacaaggagaaactacatgtggacgcagactgggtcattctttctcaaggaaacagagggatggcatacaaccagcttatttcctctatttccgaacccaggtcctagggaacctactagcccagatggaggcgaacctggctatatcagggagggcttcctggcagtgcagcacgcagtggatagagccattatggaatatcatgcggatgcagccacgaggcagctgtttcaacgacttacagttacaatcaagcgctttccatatccccccttcatcgctgaccccttcctagtggcaattcagtaccagctgcccttactgctgctgctttcattcacttatacagccttaactatcgcacgcgctgtggtccaggaaaaggagaggcgtttaaaggaatacatgaggatgatgggtttgtcaagctggctgcactggtcagcatggttcctcctctttttcctgtttctgctgattgcagctagctttatgactctgctgttctgtgtcaaggtaaaacccaacgtagctgtcttgtcccgcagtgacccaagccttgtgttggccttcctgctgtgcttcgctatcagtactatctctttttcttttatggtatcaacctttttttcaaaggcaaacatggccgctgcattcggggggtttttgtatttctttacatacattccctatttctttgtcgctccacggtataattggatgacattgagtcagaaattgtgttcctgcttactatctaacgtggcaatggctatgggggcccaacttattggaaaatttgaggctaagggtatgggtatccagtggcgcgacctgctctcgcctgtgaatgtggacgacgacttctgtttcggccaggtcttggggatgctacttctggattccgttctatacggcctggtcacgtggtatatggaggcggtattcccaggtcaatttggcgttccgcaaccctggtacttttttatcatgccgtcctactggtgcggaaagccaagggcggtagccggaaaggaggaggaggattctgacccggaaaaggctttaagaaatgaatacttcgaggccgaaccagaggatctggtggccggcatcaaaattaaacatttgtcgaaagtgtttagagtgggcaataaggatagagcagcagttcgggacctgaatctgaacctgtatgagggccaaattactgttttgttgggacacaatggcgcagggaagactaccacgttgagcatgctgactggactttttcctcctacttccggccgtgcctatataagtggatatgaaattagccaggacatggttcagatcaggaaaagtctcggattgtgtccccaacacgacatcctgttcgacaacctaactgtggcggagcacctgtacttctatgctcagcttaagggtctctcaagacaaaagtgcccggaagaggtcaaacagatgctccacattatcggactggaggacaagtggaacagcaggagtcgatttctgagcggtgggatgagacgtaagctctctattgggatcgctttgatagccggtagcaaagtgctcattttggacgagccaacctccggcatggatgccatttctaggcgcgccatctgggacctcctgcagagacaaaagtccgatcggactatcgtgctcaccacacacttcatggacgaggccgacttgctcggggacagaatcgctataatggctaaaggggagctgcagtgctgtgggtcttcactcttcctgaagcagaaatacggagctggatatcacatgactctcgttaaagagccgcactgtaatcccgaggacatctcacagctggtgcatcaccatgtgcctaacgctactctcgagagctctgccggcgcagaactgtcatttatactccctcgcgaatcaactcaccggttcgagggcttattcgcaaagttggagaagaagcagaaggagctaggaatcgcatctttcggtgcaagcatcactacaatggaagaagttttcctaagggtcggcaaactggttgactcctccatggacatccaggctatacagttacctgccctgcaataccagcacgagcggagagcctccgactgggcagtggattccaatctatgcggcgccatggacccgagcgatggaattggtgcactaatcgaggaggagagaacagctgtgaaactgaatacgggactggccctacactgccaacagttttgggccatgttcctgaaaaaggcagcatactcctggcgcgagtggaagatggtggcggcacaggtcctggtaccacttacgtgcgtgacactggctctgctggcgatcaactattcttcggagctgttcgacgatcccatgctacgattaacgctaggcgaatatgggagaacagtggtcccttttagtgtgcctggaacatcgcagttgggtcagcagctttctgaacatcttaaagatgctctgcaagccgaggggcaggagccaagggaggtgttgggagatctggaggagttcctcatttttagagccagtgtggagggtgggggattcaatgagaggtgtctggtggccgcatctttccgcgacgtgggagaacgaaccgtggtaaacgctctgttcaacaatcaggcctaccactctcccgccacagcactggccgtcgtagacaacctattgtttaagcttctgtgtgggcctcatgcctctatagttgttagcaatttccctcagccccggagtgcattacaagccgctaaggatcaatttaacgagggtagaaaaggcttcgacatagccctcaacctgttatttgcaatggcctttctggcaagtaccttcagcattctcgctgtcagtgaacgagcagtccaggcaaaacacgttcaattcgttagtggcgtgcacgtggctagtttttggctctctgcacttctgtgggacctgatctcctttctgataccgagcctgttgctgttggtggtcttcaaagcattcgacgttagagccttcactcgcgacggtcatatggctgatactctgctgctcctcctgctgtatgggtgggcaataattcctctgatgtatctgatgaactttttcttcctgggcgctgcaacggcttatacccgcctcaccatattcaatattctctccggcatcgctacctttctgatggtgaccatcatgcgcatcccggcagtgaaactggaagagctgagtaagacactggaccacgtgtttctggtgttgcccaaccattgtctgggaatggccgtgtccagtttctacgaaaattacgagacccgacgatattgcaccagtagcgaagtagctgctcactactgtaagaagtataacatccagtaccaggagaatttttacgcctggtccgctccaggcgtgggtcggtttgttgcaagtatggcagcatcaggctgcgcatacctgattcttctgtttttaatagaaactaacttactacagaggctcagaggcatattgtgtgcccttcgaaggaggaggaccctcaccgaactctatacgagaatgccggtactgcctgaggaccaagatgtagcagacgagagaacccggatcctcgctccgagcccggatagcctgctccataccccactgataataaaggaattgagcaaggtgtatgagcaaagagtgcctctcctcgcagtggataggcttagcctcgccgtccagaaaggcgaatgttttggactcttagggttcaatggcgccggtaagacgacgacgttcaagatgctgactggtgaggagtctctcacttcaggcgacgccttcgttggaggacaccggatcagtagcgacgttggaaaggtgcgacagagaatcggctattgtcctcaatttgatgccttgctagaccatatgaccggccgggaaatgctcgtaatgtacgctcggttgcgcgggattcccgaacggcatatcggtgcatgtgtcgagaacacactaagggggctgctcctggagccacacgccaacaaacttgtgcgcacatacagcggcggtaataagcggaagttaagcactggcattgccctgatcggcgaaccggccgtgatttttctcgatgaaccttccacgggcatggaccccgtcgcacggagactgctgtgggatacagtggcacgggcccgcgagagcggaaaagcaattataataacctcccactcaatggaagagtgcgaggctctgtgtacccggttggctatcatggtccagggtcagtttaagtgcctgggcagtcctcagcatttaaaatcaaagttcgggtcaggttattctttgcgagctaaagttcagtcagagggacagcaggaggctctggaagagtttaaggcgtttgtcgacctgaccttcccaggaagcgtgctggaagatgaacatcagggtatggtgcattatcatcttccaggccgtgatctctcttgggcaaaagtcttcgggatcctcgagaaagccaaggaaaagtatggcgtagatgattattctgtgtcccagatctctttggaacaggtcttcttgagttttgcacaccttcagcccccgaccgcagaggaaggtagatag

SEQ ID NO: 38171 - DNA, 5127 bp, Artificial Sequence
  derived and/or modified sequence
accgcccccccccccagccccagcctgcccctgcaggaccgggccgctactagcgcccacctcgccctctttaccctgtcctttcagagcacgttcttgctgtttcccgctggatgctcagcatatctgaatttgttacgcccaccaacttctctggccgccctaggcgtacccttttcaaagacaatggccgtgttacggcagctcgcacttctgttatggaaaaactacacactgcagaagcgtaaggtccttgtgacagtgcttgaactatttcttcctctcctcttttctggtattctaatctggctgcggctcaagatacaatccgagaatgtgcccaacgccaccatctaccccggccaatctattcaagaacttcccctcttttttacattcccaccacccggcgacacctgggaacttgcctacatcccatctcactctgatgccgcgaagaccgtgactgagaccgtacgcagggccttggtcatcaacatgcgtgttaggggattcccgagtgagaaggactttgaagattatattcggtacgataattgtagctcatctgtgttggccgccgttgttttcgagcaccccttcaaccatagcaaagagcccttgcctctcgccgtcaaataccacttgagattcagctatacaaggaggaattatatgtggacccaaaccggaagtttctttctgaaggagacagagggctggcatacgacctccttatttcctctttttcctaaccctgggcctcgggagcccactagtcccgacggcggagagccggggtatatcagagaggggttcctggccgtgcagcacgctgtggatcgtgccatcatggaatatcatgccgatgcagctactcgtcagctgtttcaacggctcactgtaacaataaagcgctttccttatccccccttcatcgcggatccattcctcgtcgccatccagtatcagctgcctctcctgcttcttttaagttttacttacaccgccctgaccattgcaagggcagtggtgcaagaaaaggagcgccgattaaaggagtatatgaggatgatgggcctgagctcgtggctccactggagcgcttggttcctcttatttttcctttttctgctgatcgcagcctcattcatgacgctcctcttctgtgtcaaggtcaaacccaatgttgctgtgctgtccaggtccgacccctcccttgtcttggccttcctcctgtgctttgccatatctactatttccttttccttcatggtcagcacatttttttccaagggcatggggattcagtggagagatctgctatcacctgtcaatgttgatgatgacttctgctttgggcaggtcctgggtatgctactgttggatagcgtcctgtacggactggtcacatggtacatggaagcagtctttcctggtcaattcggcgtgccgcagccttggtatttcttcatcatgccatcctactggtgcggcaagcctcgggccgttgcaggcaaggaggaggaggatagtgatccagaaaaagcactaaggaacgaatatttcgaagccgagcctgaagacttggtggcggggattaagatcaaacacttatccaaggtgtttagagtgggcaataaggaccgcgccgccgtccgcgatctgaaccttaacctgtatgagggtcagatcacagttctcctgggccacaatggagctgggaaaaccacaactctgtccatgctgaccggactgtttcccccgacctccggacgtgcgtacatctccggctacgaaattagccaggacatggtgcagatccgtaaatccctcgggctttgtccacagcatgacatcctctttgataatttaaccgtagctgagcatctgtacttttatgcacagctaaagggcttgagcagacagaaatgccccgaagaggtcaaacagatgctccatatcatcggactggaggataaatggaatagtaggagtagatttttatctggcgggatgcggcgcaaattatcgataggtattgctctgatcgcaggaagcaaagttctcattctagatgaaccaacttccggcatggatgccatcagcagaagggcaatttgggatttgctgcagcggcaaaagagtgatcgcaccattgtcctgaccacacacttcatggacgaagcagacctgctgggcgaccggatcgcaatcatggctaaaggtgaacttcagtgttgtgggagttccctattcctgaagcaaaagtacggggctggctatcacatgactctggttaaggaacctcactgcaaccccgaagacatcagtcagcttgtgcaccaccatgtccctaatgccaccctggaatcttccgccggtgccgagctctctttcatcctcccccgggagtcaactcaccgctttgagggacttttcgctaaactagagaaaaaacagaaggaattaggtattgccagtttcggagcaagtattactacgatggaggaggttttccttagagtggggaagctagtagactcgtcaatggacatccaagctatccagttaccggcactgcagtaccagcacgagcgtcgggctagcgattgggctgttgatagcaacctgtgtggagccatggacccctctgacggtataggggctcttatcgaggaggaaagaaccgcagtcaagttaaacactggcctcgcattacactgtcaacagttttgggcaatgtttctgaagaaggccgcctatagctggcgcgaatggaagatggtggccgctcaggtgctagtaccattgacttgcgtcacactggcactcttagctattaactacagttctgagctgttcgatgatcccatgctgcgcctgaccttaggagagtatggacggaccgtggtgccttttagcgtgccaggaacatctcagttgggtcagcaactgtccgagcacctgaaggacgcactgcaggcagaaggacaggaaccccgggaagtgctgggggatctcgaagagttcctgatcttccgggccagtgtagaaggaggcggatttaacgagcgatgcctagtggccgctagctttagggatgtaggagaacgtactgtggtgaacgccctgttcaataatcaggcataccactctcccgccaccgctttagcggtggtggataacctgctgtttaaactgctgtgtgggccacacgctagtatcgtggttagcaacttccctcagccaagatcagcactgcaggccgcaaaggaccaattcaacgagggtcgcaaaggattcgatattgccctcaatcttctgttcgcaatggcgtttctggcaagcacctttagcatcttggccgtcagcgagagggcagtgcaagcaaagcacgtccagttcgtatctggggttcatgtagcaagcttctggctgtcagctctactttgggatctcatatccttcctaattccgtccctgctgctgctggtcgtctttaaggcgttcgacgtgcgagccttcacgcgggatggtcatatggccgatacactgctgttacttctgctttatggatgggccatcataccactgatgtacctcatgaacttcttttttctgggcgccgccactgcatatactcgcctgacaatctttaacatactcagcgggatcgccactttcctcatggtgactatcatgaggatccctgcggtaaagctggaggaactctcgaaaactttggaccacgtcttcttggttctacctaaccactgtcttggtatggcagtaagctctttttatgaaaactatgagacacggcggtattgtacttcctcagaagttgctgctcattactgtaaaaaatataacattcaatatcaggaaaacttctatgcctggagcgctcccggggtgggtcggtttgttgctagtatggcagcatctggttgcgcttacctcatccttttatttctcatcgagacaaacttgttgcagaggctgcgaggaattctctgtgccctgaggcgccggcggactctgactgaactgtatacccggatgccagtactgccagaagaccaggatgtggcagacgagcgaactcgtatcctcgctccatcaccagactcactcctccacacaccactgattatcaaggagctgagcaaggtgtacgaacagcgcgtgccccttctcgccgtcgatcgtctctctctggcagtgcagaagggcgagtgctttggccttctaggattcaacggcgcggggaaaactactacattcaagatgctgacaggcgaggaatctctgacttccggggatgcctttgttggagggcacagaatttcatcggacgtcggtaaggtgcggcagcggattggatactgtccacagttcgacgccctgctcgatcatatgacaggacgggagatgctcgtaatgtacgctaggctgcggggcattcccgagcggcatattggagcatgcgtcgagaacactctcaggggcttgctcctcgagccacacgctaacaagctcgtacggacatattcaggcgggaacaagaggaaactgtccacagggatcgcactgatcggagagcccgcagtgatcttcctggatgagccctcaacaggaatggatcccgtcgcccgcagactcctgtgggacacagtggctcgggcccgcgaaagcggaaaggcaataatcatcacaagccacagcatggaagagtgcgaagctttgtgcacacgtctggcaataatggtgcagggccagttcaagtgcttgggatcccctcagcatctgaagagtaaatttggatccggatactctctgcgggcgaaggtgcagtcagaagggcagcaggaggccttggaggaattcaaggccttcgtggatctcacctttccgggctcagtgctggaagacgaacaccaggggatggtacactatcacctgcccggacgggacctctcctgggccaaagtgttcggaatccttgaaaaagctaaggagaagtatggagttgacgactactcagtgtcgcagatctcccttgagcaagtatttctgtcgtttgcccacctccagcctcccaccgctgaagaaggccgctag

SEQ ID NO: 38172 - DNA, 5114 bp, Artificial Sequence
  derived and/or modified sequence
atggcagtcttacgacagctcgctctgctcctctggaaaaactatacactgcagaagaggaaggtgctggtgacagtgctcgagctgtttctgcccctgctgttctccggcatattgatttggttgcgcttgaagatacaatccgagaacgtacctaatgccacaatttaccccggtcagagcatccaggagctccctctcttctttacttttcctcctcccggtgacacatgggaacttgcttatatcccgagccattccgatgccgcaaaaacagtgaccgagaccgtccggagggccctcgtgatcaatatgcgcgtacgaggctttcccagcgagaaagacttcgaagattatatcaggtacgacaactgttcctctagtgttttagccgctgtggttttcgagcatccgtttaatcacagcaaggagccacttcctctggccgtgaagtaccatctacgcttttcatatactcgaagaaactatatgtggacccagacaggctctttcttcctgaaagaaactgagggttggcataccaccagtctgtttccactctttcctaaccccggtcctagagagccgacttccccagacggcggtgagcctgggtacattagggagggatttctggcggttcagcatgctgtggatcgggctatcatggagtatcatgccgacgccgctacacggcagctctttcaacggctgaccgtcaccatcaaaaggttcccgtaccccccattcatcgcagacccttttctcgtggctattcagtatcagctcccactgctgctactgcttagctttacatacaccgccctgactattgcgcgagctgtggttcaagaaaaagagcgaaggctgaaagaatatatgcggatgatgggcctttcttcctggttgcactggtctgcatggtttctgttattctttctcttccttttaattgcagcctcgttcatgacgttactgttctgtgtgaaggtcaaaccaaatgtggccgttttgtcccggtccgatccgtcgttggttctggccttcctgttgtgcttcgccatatcgacaattagcttttctttcatggtgtccacttttttcagcaaggcaaacatggcggcagcattcgggggattcctgtatttcttcacatacatcccctatttcttcgttgcgccacgatacaattggatgacactgtcccagaaattgtgcagctgtctgctgagtaacgttgccatggccatgggcgcacagctgatcggaaagtttgaggcaaaaggcatgggcatccagtggcgtgacctacttagtcccgtgaatgtggacgatgacttctgtttcggccaggtcctgggtatgcttctgctcgattccgtcctctatggcttggtgacctggtacatggaagccgtgttccctggacaattcggtgtaccacagccatggtacttttttattatgccatcatactggtgcgggaaaccgagagcggtcgcaggcaaagaagaagaggatagcgaccctgaaaaggctttgaggaacgagtattttgaagctgaaccggaggacttagttgcgggaattaagattaagcatctctcgaaggtgtttcgggtgggaaacaaggaccgcgctgcagtgcgggacttgaatctgaatctttatgaggggcaaattaccgtgcttctgggccacaatggagctggcaaaactaccaccttgtccatgcttacagggctgtttccaccgacatctggcagagcttacatttctggctatgaaatatcacaggatatggtgcaaatccgaaaaagcctgggcctttgtcctcagcatgatattctatttgataacctgacagttgcggaacacttatatttctacgcccaactaaagggactatcgaggcagaaatgtcccgaagaagttaagcagatgctgcatattataggcctggaggacaaatggaattccaggtctaggttcctctctggtgggatgaggagaaaactatcaatcgggattgctctcattgcaggatctaaagtcctcattctggacgaaccgaccagtggcatggacgccatcagccggcgagcgatctgggacctgcttcagcgccagaagagcgaccggacgattgtgcttactacgcactttatggatgaggcagatctcctgggggaccggatcgcaatcatggcgaagggagagctacagtgttgtggatcaagtctgtttctcaaacagaagtatggcgcaggctaccatatgaccctagttaaggaaccccactgcaatcccgaggacatttcacagctcgtgcaccatcatgtgccaaacgccactttggagtcttccgcaggagcagagttatcatttatcctgcccagagagagcacccacagattcgagggactgtttgcaaagcttgagaagaagcagaaggaactcggcatcgcaagtttcggagcgtctattactaccatggaagaagtcttcctgcgtgtgggaaagcttgtggatagtagcatggatatccaggctatacagctacctgcgctccagtaccaacatgagcggagggcctccgattgggcagtcgatagtaatctgtgcggcgcaatggatccaagtgatggtattggagcgttaatcgaggaagaacgaaccgcggtcaaactcaatacgggtctggctctccactgccagcagttctgggcaatgttcctgaagaaggcagcttactcttggcgggagtggaaaatggtcgccgctcaggtcctggtcccgctgacctgcgtcaccttggctttacttgccattaattattccagtgagctgtttgatgaccccatgctgagacttacgctcggcgaatatggtcgcactgtcgtacccttttcagtaccaggtacgtctcaattgggccagcaactgtccgaacacctcaaggatgctctgcaggcggaggggcaggaaccccgtgaggtgttaggcgacctggaggagttcttgatcttcagggccagcgttgagggaggaggatttaacgaaagatgcctggtcgctgcttccttcagagacgtgggtgaaaggactgtggtaaacgcactgttcaataatcaggcctaccattcacccgcaactgctttggccgtggtcgataacctcctatttaaactgttgtgcggtcctcacgcatctattgtcgtcagtaactttccacagcctaggagtgctctgcaggccgcaaaagaccagttcaacgagggcaggaagggttttgacatcgctctgaacttgctgtttgcaatggccttcctcgcaagcacgttcagtatactggcggtgtctgagcgcgcagttcaggctaaacacgtgcagttcgtcagcggtgtgcatgtggcctccttctggctgtctgcactcctatgggatttgatctcatttctcatcccgtccctgttattattggtcgtctttaaggccttcgacgtgagagcatttacaagagacggacacatggctgacacccttctgcttctcctactgtacgggtgggccatcattcctctcatgtacttgatgaattttttttttctgggtgctgcaactgcatatacaagactcaccatcttcaacatcctcagtggcatcgcaaccttcttgatggtcaccataatgagaattccggctgtaaagctggaggagctctccaaaactctggaccacgtttttttggtcctgcccaaccattgcttaggcatggccgtgagctcattttatgagaactacgagacacgtaggtattgtaccagctccgaagtagctgctcactactgcaagaagtataacatccagtaccaggaaaacttttatgcgtggtctgcccctggcgttgggagatttgtggcctctatggctgcctcaggctgtgcttatctgatcttgctctttctcattgagactaatttgttgcagaggctccgaggcattttgtgtgcgctgagacgcagacgaacactcaccgagctgtatactaggatgccagtcttaccagaggatcaggacgtcgctgacgagaggactcggattctcgccccatccccagattctttgttgcatacacccctgatcattaaggagctttccaaggtgtatgaacagcgagttccacttcttgctgtcgataggttgagtctggcagtgcagaaaggggaatgtttcggcctgctgggcttcaacggagcgggaaaaaccactacgtttaaaatgttgacaggcgaggaatcactaacctctggagatgctttcgtgggagggcaccggatctcgtccgatgtgggaaaggtgcgccagaggattggatactgccctcagttcgatgccctcctggaccacatgactgggagggagatgctggtgatgtatgctagactgcgaggaattccagagcgccatattggagcctgtgtggagaataccctacggggactcctgttagaacctcacgcaaataagcttgtgagaacttacagtggtggaaacaagcgcaagctttctacaggcattgcactgatcggtgagcccgctgtgattttcttggatgagcccagtacaggaatggaccctgtggcccgaaggctcctttgggataccgttgcgcgagccagagagagcggtaaggctattataattacttctcacagcatggaagaatgcgaggccctctgtacacggctggctattatggttcaggggcagtttaagtgcctgggtagccctcagcacctcaaatccaagtttgggtccggttactccttgagagccaaggtgcagtcggagggccaacaggaggcactcgaagagttcaaagcctttgttgatcttacctttcctggttcagtgctggaggatgaacatcagggtatggtgcattatcacctgccagggagagatctctcttgggctaaggtgttcgggatcctcgaaaaggctaaagaaaagtatggagtggacgattacagtgtgtcccagataagcttagaacaggtctttcttagtttcgctcacctccaacccccaacagcggaggaaggccgtta

SEQ ID NO: 38173 - DNA, 5126 bp, Artificial Sequence
  derived and/or modified sequence
actgcccctcctcctagcccttcactccccctacaagatcgcgctgccacgagtgcccacctggctctctttacactttctttccagtcgacgtttctgttattccccgcagggtgtagcgcttatctgaacttgctgagacctcctaccagtttggctgctttgggtgtaccattttcaaagacaatggctgtgctacgccaactcgcgctgctcttgtggaagaattacactcttcagaaaaggaaggtccttgtgacagtacttgaactgttcttgcccctcctcttcagcggcatcctaatctggcttaggctaaaaattcagtccgagaacgtacctaatgccaccatttatcctgggcagtctatacaggagttacccttattttttactttcccacccccaggcgacacatgggaactcgcctacataccctctcatagtgatgccgctaagaccgtaactgaaacagtacgacgcgcactcgttatcaacatgcgggtgcgaggcttccctagtgagaaagacttcgaggactacatccggtacgataattgttcctcaagcgtgctagcagccgtcgtatttgagcacccctttaaccattctaaagaacccttgcctctggcggtgaaataccacctccggttttcttatacacgtcgaaactacatgtggacgcaaacaggttcattcttcctaaaggagacggaaggctggcacactacgtcattatttccattattccccaacccgggtccacgagagccaacttcacccgatggcggtgaacccggatatataagggagggattcctggccgtacaacatgcagtggaccgcgcaatcatggagtaccacgctgacgctgcaactagacaactgtttcagagactcactgtcacaataaagagattcccttaccctcctttcatcgccgatccgttcctggttgccattcagtaccagttgcccctccttctcctgctatcatttacgtacactgctttgacgatagctcgcgcagtggtgcaggaaaaggaaaggcggctcaaggagtatatgaggatgatgggcctctccagctggctccactggagcgcttggttcttgctattctttttgttcctactgattgccgctagctttatgacactgctattctgtgtgaaggttaaaccaaacgtagccgtgctaagccgatccgacccctccctggtgctcgctttcctgttgtgtttcgccattagtaccatctcatttagtttcatggtgtctacatttttctcaaaggggatgggtatccagtggcgggacctcttgtctcctgttaacgtggacgatgacttttgtttcggccaggtactgggcatgctgctcttggatagcgtgctgtacggcctcgtgacctggtacatggaggccgtgtttcccggacaattcggggtccctcaaccctggtatttcttcattatgccctcctactggtgcggcaaaccgagagcagtggccggaaaggaggaggaggattccgatcctgaaaaggccttacgcaacgaatacttcgaagcagagcccgaggatctcgtcgccggaattaagatcaagcatctgtccaaagtgttcagagtggggaacaaggacagagctgcagtgagggacctgaatctgaatctctatgagggccagatcacagtcctgttaggtcacaacggcgctgggaagaccacaacattaagtatgctcactgggctcttcccccctacttcaggcagggcatacatctcaggctatgaaatttcccaggatatggttcagatccgtaaatccctggggctctgcccacagcacgacatcttgttcgataacctgaccgtggctgagcacctgtatttttacgcacagctgaaaggcctgagcaggcagaagtgcccggaagaggtgaagcagatgctgcacataatcggactggaagacaagtggaactcccgcagccggttcttgtctgggggaatgcgacggaagctatctatcggcatcgccctcattgccggatcaaaggttctgatcttggacgaaccaacttcagggatggacgccatcagccgaagagctatctgggatctcctgcagaggcagaaaagtgataggacaatagtattgaccacacacttcatggatgaagctgacctgctgggagacagaattgcgattatggcaaagggggaattgcagtgttgcggaagtagcttatttctgaaacaaaagtacggcgcagggtaccacatgaccctggtcaaggagcctcattgcaacccagaggatatatctcaacttgtgcatcatcatgtccctaacgccacccttgaatcttcggcaggagccgagctcagcttcatcttaccacgagaaagcactcataggttcgagggcctgttcgctaagcttgagaagaagcagaaggagttgggaatcgccagtttcggagcaagcatcacgactatggaggaggtctttctgagagtggggaaactcgtggatagctcgatggacatccaggccatccagctcccagccctccagtaccaacacgagagaagggcttcggactgggctgttgacagtaacttgtgcggcgctatggacccatctgatggaataggcgcattgatcgaggaggaaagaactgcagttaagctaaatacaggtctcgcactccattgtcagcaattttgggctatgttcctgaagaaagccgcttattcttggcgggaatggaagatggttgccgcacaggtactagtgcctctcacttgtgtgaccctggcactgctggcaattaactacagtagcgaactattcgatgacccgatgctgcgcctcaccttaggcgaatatggaagaacagtggtgccattctccgtgcccggaacaagccagctgggtcaacagctcagcgagcatcttaaagatgctcttcaagctgaaggtcaagaaccgagggaagtgttgggtgacctggaagagtttctgatttttagggcctccgtagagggcggaggcttcaatgagagatgcctcgtggccgcatcatttcgggacgtcggcgagcgtacggtggtgaacgccctcttcaacaaccaagcatatcactccccagcgacagctttagccgtggtagataatctcctgttcaaactgctgtgtggaccccatgcatctatagtcgtgtcgaactttccccagccgaggagcgctttacaagctgcaaaagatcagtttaacgaggggaggaaaggctttgatatagcccttaacctcttatttgccatggcatttttggcatcaacctttagcatactcgctgtttctgagagggctgtccaagctaagcatgtccaatttgtgtccggcgtgcatgttgcttcattttggctttctgcgctgttgtgggatttgatctcgttcctgattccctccttactgctactggtggtttttaaagccttcgacgtgcgagcttttacaagagacggccacatggccgatacactactgctcctacttctgtatggctgggcaatcatcccgctgatgtacttgatgaactttttttttctgggtgccgcaacagcctacaccaggctgactattttcaacattctgtctggcatcgcgacgttcctaatggtgactatcatgagaatccctgcggtaaagctggaggaactgtctaaaactctggaccacgttttcctcgtgttgcccaaccactgcttgggtatggcagtgagctcattctacgagaattatgagacccggcgatattgcacatcatccgaggtggctgcccattactgcaaaaagtacaatatccagtatcaggagaatttctacgcctggtcggccccaggggtagggagattcgttgctagtatggccgcttctggatgcgcttacctgatcctgttgttcttgatcgaaaccaatctactccagcggcttaggggaattctgtgcgcactgcgtcggcgaagaacactcaccgagttatacacccgcatgccagtactgcccgaggatcaggacgtggcagatgagagaaccaggatcctcgccccatcaccagacagcctcctgcatactccactgatcattaaagaactttctaaggtgtacgaacagagggtccctttgctggcagtcgaccggctgtccctcgctgttcagaagggggagtgtttcggactgcttggtttcaatggtgctggaaagaccactacttttaagatgctgaccggggaagagtctctgaccagtggcgatgcgttcgtcggagggcataggatcagctctgacgtggggaaagtgagacagcgcatcgggtactgtccacagtttgatgcgctgctggatcacatgacaggccgtgagatgttagtcatgtatgctagactgcgcggtatccctgagagacatatcggagcatgtgtcgagaacaccctgaggggactcctgctggagcctcacgccaacaagctcgttagaacttactcagggggtaataaacgaaaactgagcaccgggattgccctgattggagagcctgccgtcatttttttggatgaaccctccaccgggatggaccccgtggcacggaggctcctctgggataccgtggcacgggcacgcgaatcaggcaaggctataatcattacctctcatagtatggaagaatgtgaggccttgtgtaccagactggctattatggtccaggggcagtttaagtgtctgggcagccctcagcacctgaagtctaaatttggcagcgggtatagtctgagagcaaaagtccagagcgaggggcaacaggaggctctcgaggagtttaaagcgtttgtggacttgactttccccggaagtgtgcttgaggatgagcatcagggcatggtccactaccatctgccaggccgagatctgtcttgggcgaaggtgttcgggatcttggagaaagccaaagagaaatacggggtcgatgactactctgtgagccagatctctctagagcaggtcttcctcagcttcgcccatctgcagcctccaaccgcagaggagggaaggta

SEQ ID NO: 38174 - DNA, 6472 bp, Artificial Sequence
  derived and/or modified sequence
ccgccccggcgcccaggctcggtgctggagagtcatgcctgtgagccctgggcacctcctgatgtcctgcgaggtcacggtgttcccaaacctcagggttgccctgccccactccagaggctctcaggccccaccccggagccctctgtgcggagccgcctcctcctggccagttccccagtagtcctgaagggagacctgctgtgtggagcctcttctgggacccagccatgagtgtggagctgagcaactgaacctgaaactcttccactgtgagtcaaggaggcttttccgcacatgaaggacgctgagcgggaaggactcctctctgcctgcagttgtagcgagtggaccagcaccaggggctctctagactgcccctcctccatcgccttccctgcctctccaggacagagcagccacgtctgcacacctcgccctctttacactcagttttcagagcacgtttctcctatttcctgcgggttgcagcgcctacttgaacttactcagaccacctacttctctagcagcactgggcgtccctttcagcaagacgatggctgtgctcaggcagctggcgctcctcctctggaagaactacaccctgcagaagcggaaggtcctggtgacggtcctggaactcttcctgccattgctgttttctgggatcctcatctggctccgcttgaagattcagtcggaaaatgtgcccaacgccaccatctacccgggccagtccatccaggagctgcctctgttcttcaccttccctccgccaggagacacctgggagcttgcctacatcccttctcacagtgacgctgccaagaccgtcactgagacagtgcgcagggcacttgtgatcaacatgcgagtgcgcggctttccctccgagaaggactttgaggactacattaggtacgacaactgctcgtccagcgtgctggccgccgtggtcttcgagcaccccttcaaccacagcaaggagcccctgccgctggcggtgaaatatcacctacggttcagttacacacggagaaattacatgtggacccaaacaggctcctttttcctgaaagagacagaaggctggcacactacttcccttttcccgcttttcccaaacccaggaccaagggaacctacatcccctgatggcggagaacctgggtacatccgggaaggcttcctggccgtgcagcatgctgtggaccgggccatcatggagtaccatgccgatgccgccacacgccagctgttccagagactgacggtgaccatcaagaggttcccgtacccgccgttcatcgcagaccccttcctcgtggccatccagtaccagctgcccctgctgctgctgctcagcttcacctacaccgcgctcaccattgcccgtgctgtcgtgcaggagaaggaaaggaggctgaaggagtacatgcgcatgatggggctcagcagctggctgcactggagtgcctggttcctcttgttcttcctcttcctcctcatcgccgcctccttcatgaccctgctcttctgtgtcaaggtgaagccaaatgtagccgtgctgtcccgcagcgacccctccctggtgctcgccttcctgctgtgcttcgccatctctaccatctccttcagcttcatggtcagcaccttcttcagcaaagccaacatggcagcagccttcggaggcttcctctacttcttcacctacatcccctacttcttcgtggcccctcggtacaactggatgactctgagccagaagctctgctcctgcctcctgtctaatgtcgccatggcaatgggagcccagctcattgggaaatttgaggcgaaaggcatgggcatccagtggcgagacctcctgagtcccgtcaacgtggacgacgacttctgcttcgggcaggtgctggggatgctgctgctggactctgtgctctatggcctggtgacctggtacatggaggccgtcttcccagggcagttcggcgtgcctcagccctggtacttcttcatcatgccctcctattggtgtgggaagccaagggcggttgcagggaaggaggaagaagacagtgaccccgagaaagcactcagaaacgagtactttgaagccgagccagaggacctggtggcggggatcaagatcaagcacctgtccaaggtgttcagggtgggaaataaggacagggcggccgtcagagacctgaacctcaacctgtacgagggacagatcaccgtcctgctgggccacaacggtgccgggaagaccaccaccctctccatgctcacaggtctctttccccccaccagtggacgggcatacatcagcgggtatgaaatttcccaggacatggttcagatccggaagagcctgggcctgtgcccgcagcacgacatcctgtttgacaacttgacagtcgcagagcacctttatttctacgcccagctgaagggcctgtcacgtcagaagtgccctgaagaagtcaagcagatgctgcacatcatcggcctggaggacaagtggaactcacggagccgcttcctgagcgggggcatgaggcgcaagctctccatcggcatcgccctcatcgcaggctccaaggtgctgatactggacgagcccacctcgggcatggacgccatctccaggagggccatctgggatcttcttcagcggcagaaaagtgaccgcaccatcgtgctgaccacccacttcatggacgaggctgacctgctgggagaccgcatcgccatcatggccaagggggagctgcagtgctgcgggtcctcgctgttcctcaagcagaaatacggtgccggctatcacatgacgctggtgaaggagccgcactgcaacccggaagacatctcccagctggtccaccaccacgtgcccaacgccacgctggagagcagcgctggggccgagctgtctttcatccttcccagagagagcacgcacaggtttgaaggtctctttgctaaactggagaagaagcagaaagagctgggcattgccagctttggggcatccatcaccaccatggaggaagtcttccttcgggtcgggaagctggtggacagcagtatggacatccaggccatccagctccctgccctgcagtaccagcacgagaggcgcgccagcgactgggctgtggacagcaacctctgtggggccatggacccctccgacggcattggagccctcatcgaggaggagcgcaccgctgtcaagctcaacactgggctcgccctgcactgccagcaattctgggccatgttcctgaagaaggccgcatacagctggcgcgagtggaaaatggtggcggcacaggtcctggtgcctctgacctgcgtcaccctggccctcctggccatcaactactcctcggagctcttcgacgaccccatgctgaggctgaccttgggcgagtacggcagaaccgtcgtgcccttctcagttcccgggacctcccagctgggtcagcagctgtcagagcatctgaaagacgcactgcaggctgagggacaggagccccgcgaggtgctcggtgacctggaggagttcttgatcttcagggcttctgtggaggggggcggctttaatgagcggtgccttgtggcagcgtccttcagagatgtgggagagcgcacggtcgtcaacgccttgttcaacaaccaggcgtaccactctccagccactgccctggccgtcgtggacaaccttctgttcaagctgctgtgcgggcctcacgcctccattgtggtctccaacttcccccagccccggagcgccctgcaggctgccaaggaccagtttaacgagggccggaagggattcgacattgccctcaacctgctcttcgccatggcattcttggccagcacgttctccatcctggcggtcagcgagagggccgtgcaggccaagcatgtgcagtttgtgagtggagtccacgtggccagtttctggctctctgctctgctgtgggacctcatctccttcctcatccccagtctgctgctgctggtggtgtttaaggccttcgacgtgcgtgccttcacgcgggacggccacatggctgacaccctgctgctgctcctgctctacggctgggccatcatccccctcatgtacctgatgaacttcttcttcttgggggcggccactgcctacacgaggctgaccatcttcaacatcctgtcaggcatcgccaccttcctgatggtcaccatcatgcgcatcccagctgtaaaactggaagaactttccaaaaccctggatcacgtgttcctggtgctgcccaaccactgtctggggatggcagtcagcagtttctacgagaactacgagacgcggaggtactgcacctcctccgaggtcgccgcccactactgcaagaaatataacatccagtaccaggagaacttctatgcctggagcgccccgggggtcggccggtttgtggcctccatggccgcctcagggtgcgcctacctcatcctgctcttcctcatcgagaccaacctgcttcagagactcaggggcatcctctgcgccctccggaggaggcggacactgacagaattatacacccggatgcctgtgcttcctgaggaccaagatgtagcggacgagaggacccgcatcctggcccccagtccggactccctgctccacacacctctgattatcaaggagctctccaaggtgtacgagcagcgggtgcccctcctggccgtggacaggctctccctcgcggtgcagaaaggggagtgcttcggcctgctgggcttcaatggagccgggaagaccacgactttcaaaatgctgaccggggaggagagcctcacttctggggatgcctttgtcgggggtcacagaatcagctctgatgtcggaaaggtgcggcagcggatcggctactgcccgcagtttgatgccttgctggaccacatgacaggccgggagatgctggtcatgtacgctcggctccggggcatccctgagcgccacatcggggcctgcgtggagaacactctgcggggcctgctgctggagccacatgccaacaagctggtcaggacgtacagtggtggtaacaagcggaagctgagcaccggcatcgccctgatcggagagcctgctgtcatcttcctggacgagccgtccactggcatggaccccgtggcccggcgcctgctttgggacaccgtggcacgagcccgagagtctggcaaggccatcatcatcacctcccacagcatggaggagtgtgaggccctgtgcacccggctggccatcatggtgcaggggcagttcaagtgcctgggcagcccccagcacctcaagagcaagttcggcagcggctactccctgcgggccaaggtgcagagtgaagggcaacaggaggcgctggaggagttcaaggccttcgtggacctgacctttccaggcagcgtcctggaagatgagcaccaaggcatggtccattaccacctgccgggccgtgacctcagctgggcgaaggttttcggtattctggagaaagccaaggaaaagtacggcgtggacgactactccgtgagccagatctcgctggaacaggtcttcctgagcttcgcccacctgcagccgcccaccgcagaggaggggcgatgaggggtggcggctgtctcgccatcaggcagggacaggacgggcaagcagggcccatcttacatcctctctctccaagtttatctcatcctttatttttaatcacttttttctatgatggatatgaaaaattcaaggcagtatgcacagaatggacgagtgcagcccagccctcatgcccaggatcagcatgcgcatctccatgtctgcatactctggagttcactttcccagagctggggcaggccgggcagtctgcgggcaagctccggggtctctgggtggagagctgacccaggaagggctgcagctgagctgggggttgaatttctccaggcactccctggagagaggacccagtgacttgtccaagtttacacacgacactaatctcccctggggaggaagcgggaagccagccaggttgaactgtagcgaggcccccaggccgccaggaatggaccatgcagatcactgtcagtggagggaagctgctgactgtgattaggtgctggggtcttagcgtccagcgcagcccgggggcatcctggaggctctgctccttagggcatggtagtcaccgcgaagccgggcaccgtcccacagcatctcctagaagcagccggcacaggagggaaggtggccaggctcgaagcagtctctgtttccagcactgcaccctcaggaagtcgcccgccccaggacacgcagggaccaccctaagggctgggtggctgtctcaaggacacattgaatacgttgtgaccatccagaaaataaatgctgaggggacacagtcac

SEQ ID NO: 38175 - DNA, 6449 bp, Artificial Sequence
  derived and/or modified sequence
gcggccgctgcgtccgccagtagcgggttgcaggcgcaccctcccctccagggcggccacgcagctgtcagtgccgccgccactgcgaggctggagcggagcccgggtggccgagggaggggaccccgcgagagggccgcgcgccggccgccgccgccccggcgcccaggctcggtgctggagagtcatgcctgtgagccctgggcacctcctgatgtcctgcgaggtcacggtgttcccaaacctcagggttgccctgccccactccagaggctctcaggccccaccccggagccctctgtgcggagccgcctcctcctggccagttccccagtagtcctgaagggagacctgctgtgtggagcctcttctgggacccagccatgagtgtggagctgagcaactgaacctgaaactcttccactgtgagtcaaggaggcttttccgcacatgaaggacgctgagcgggaaggactcctctctgcctgcagttgtagcgagtggaccagcaccaggggctctctagactgcccctcctccatcgccttccctgcctctccaggacagagcagccacgtctgcacacctcgccctctttacactcagttttcagagcacgtttctcctatttcctgcgggttgcagcgcctacttgaacttactcagaccacctacttctctagcagcactgggcgtccctttcagcaagacgatggctgtgctcaggcagctggcgctcctcctctggaagaactacaccctgcagaagcggaaggtcctggtgacggtcctggaactcttcctgccattgctgttttctgggatcctcatctggctccgcttgaagattcagtcggaaaatgtgcccaacgccaccatctacccgggccagtccatccaggagctgcctctgttcttcaccttccctccgccaggagacacctgggagcttgcctacatcccttctcacagtgacgctgccaagaccgtcactgagacagtgcgcagggcacttgtgatcaacatgcgagtgcgcggctttccctccgagaaggactttgaggactacattaggtacgacaactgctcgtccagcgtgctggccgccgtggtcttcgagcaccccttcaaccacagcaaggagcccctgccgctggcggtgaaatatcacctacggttcagttacacacggagaaattacatgtggacccaaacaggctcctttttcctgaaagagacagaaggctggcacactacttcccttttcccgcttttcccaaacccaggaccaagggaacctacatcccctgatggcggagaacctgggtacatccgggaaggcttcctggccgtgcagcatgctgtggaccgggccatcatggagtaccatgccgatgccgccacacgccagctgttccagagactgacggtgaccatcaagaggttcccgtacccgccgttcatcgcagaccccttcctcgtggccatccagtaccagctgcccctgctgctgctgctcagcttcacctacaccgcgctcaccattgcccgtgctgtcgtgcaggagaaggaaaggaggctgaaggagtacatgcgcatgatggggctcagcagctggctgcactggagtgcctggttcctcttgttcttcctcttcctcctcatcgccgcctccttcatgaccctgctcttctgtgtcaaggtgaagccaaatgtagccgtgctgtcccgcagcgacccctccctggtgctcgccttcctgctgtgcttcgccatctctaccatctccttcagcttcatggtcagcaccttcttcagcaaaggcatgggcatccagtggcgagacctcctgagtcccgtcaacgtggacgacgacttctgcttcgggcaggtgctggggatgctgctgctggactctgtgctctatggcctggtgacctggtacatggaggccgtcttcccagggcagttcggcgtgcctcagccctggtacttcttcatcatgccctcctattggtgtgggaagccaagggcggttgcagggaaggaggaagaagacagtgaccccgagaaagcactcagaaacgagtactttgaagccgagccagaggacctggtggcggggatcaagatcaagcacctgtccaaggtgttcagggtgggaaataaggacagggcggccgtcagagacctgaacctcaacctgtacgagggacagatcaccgtcctgctgggccacaacggtgccgggaagaccaccaccctctccatgctcacaggtctctttccccccaccagtggacgggcatacatcagcgggtatgaaatttcccaggacatggttcagatccggaagagcctgggcctgtgcccgcagcacgacatcctgtttgacaacttgacagtcgcagagcacctttatttctacgcccagctgaagggcctgtcacgtcagaagtgccctgaagaagtcaagcagatgctgcacatcatcggcctggaggacaagtggaactcacggagccgcttcctgagcgggggcatgaggcgcaagctctccatcggcatcgccctcatcgcaggctccaaggtgctgatactggacgagcccacctcgggcatggacgccatctccaggagggccatctgggatcttcttcagcggcagaaaagtgaccgcaccatcgtgctgaccacccacttcatggacgaggctgacctgctgggagaccgcatcgccatcatggccaagggggagctgcagtgctgcgggtcctcgctgttcctcaagcagaaatacggtgccggctatcacatgacgctggtgaaggagccgcactgcaacccggaagacatctcccagctggtccaccaccacgtgcccaacgccacgctggagagcagcgctggggccgagctgtctttcatccttcccagagagagcacgcacaggtttgaaggtctctttgctaaactggagaagaagcagaaagagctgggcattgccagctttggggcatccatcaccaccatggaggaagtcttccttcgggtcgggaagctggtggacagcagtatggacatccaggccatccagctccctgccctgcagtaccagcacgagaggcgcgccagcgactgggctgtggacagcaacctctgtggggccatggacccctccgacggcattggagccctcatcgaggaggagcgcaccgctgtcaagctcaacactgggctcgccctgcactgccagcaattctgggccatgttcctgaagaaggccgcatacagctggcgcgagtggaaaatggtggcggcacaggtcctggtgcctctgacctgcgtcaccctggccctcctggccatcaactactcctcggagctcttcgacgaccccatgctgaggctgaccttgggcgagtacggcagaaccgtcgtgcccttctcagttcccgggacctcccagctgggtcagcagctgtcagagcatctgaaagacgcactgcaggctgagggacaggagccccgcgaggtgctcggtgacctggaggagttcttgatcttcagggcttctgtggaggggggcggctttaatgagcggtgccttgtggcagcgtccttcagagatgtgggagagcgcacggtcgtcaacgccttgttcaacaaccaggcgtaccactctccagccactgccctggccgtcgtggacaaccttctgttcaagctgctgtgcgggcctcacgcctccattgtggtctccaacttcccccagccccggagcgccctgcaggctgccaaggaccagtttaacgagggccggaagggattcgacattgccctcaacctgctcttcgccatggcattcttggccagcacgttctccatcctggcggtcagcgagagggccgtgcaggccaagcatgtgcagtttgtgagtggagtccacgtggccagtttctggctctctgctctgctgtgggacctcatctccttcctcatccccagtctgctgctgctggtggtgtttaaggccttcgacgtgcgtgccttcacgcgggacggccacatggctgacaccctgctgctgctcctgctctacggctgggccatcatccccctcatgtacctgatgaacttcttcttcttgggggcggccactgcctacacgaggctgaccatcttcaacatcctgtcaggcatcgccaccttcctgatggtcaccatcatgcgcatcccagctgtaaaactggaagaactttccaaaaccctggatcacgtgttcctggtgctgcccaaccactgtctggggatggcagtcagcagtttctacgagaactacgagacgcggaggtactgcacctcctccgaggtcgccgcccactactgcaagaaatataacatccagtaccaggagaacttctatgcctggagcgccccgggggtcggccggtttgtggcctccatggccgcctcagggtgcgcctacctcatcctgctcttcctcatcgagaccaacctgcttcagagactcaggggcatcctctgcgccctccggaggaggcggacactgacagaattatacacccggatgcctgtgcttcctgaggaccaagatgtagcggacgagaggacccgcatcctggcccccagtccggactccctgctccacacacctctgattatcaaggagctctccaaggtgtacgagcagcgggtgcccctcctggccgtggacaggctctccctcgcggtgcagaaaggggagtgcttcggcctgctgggcttcaatggagccgggaagaccacgactttcaaaatgctgaccggggaggagagcctcacttctggggatgcctttgtcgggggtcacagaatcagctctgatgtcggaaaggtgcggcagcggatcggctactgcccgcagtttgatgccttgctggaccacatgacaggccgggagatgctggtcatgtacgctcggctccggggcatccctgagcgccacatcggggcctgcgtggagaacactctgcggggcctgctgctggagccacatgccaacaagctggtcaggacgtacagtggtggtaacaagcggaagctgagcaccggcatcgccctgatcggagagcctgctgtcatcttcctggacgagccgtccactggcatggaccccgtggcccggcgcctgctttgggacaccgtggcacgagcccgagagtctggcaaggccatcatcatcacctcccacagcatggaggagtgtgaggccctgtgcacccggctggccatcatggtgcaggggcagttcaagtgcctgggcagcccccagcacctcaagagcaagttcggcagcggctactccctgcgggccaaggtgcagagtgaagggcaacaggaggcgctggaggagttcaaggccttcgtggacctgacctttccaggcagcgtcctggaagatgagcaccaaggcatggtccattaccacctgccgggccgtgacctcagctgggcgaaggttttcggtattctggagaaagccaaggaaaagtacggcgtggacgactactccgtgagccagatctcgctggaacaggtcttcctgagcttcgcccacctgcagccgcccaccgcagaggaggggcgatgaggggtggcggctgtctcgccatcaggcagggacaggacgggcaagcagggcccatcttacatcctctctctccaagtttatctcatcctttatttttaatcacttttttctatgatggatatgaaaaattcaaggcagtatgcacagaatggacgagtgcagcccagccctcatgcccaggatcagcatgcgcatctccatgtctgcatactctggagttcactttcccagagctggggcaggccgggcagtctgcgggcaagctccggggtctctgggtggagagctgacccaggaagggctgcagctgagctgggggttgaatttctccaggcactccctggagagaggacccagtgacttgtccaagtttacacacgacactaatctcccctggggaggaagcgggaagccagccaggttgaactgtagcgaggcccccaggccgccaggaatggaccatgcagatcactgtcagtggagggaagctgctgactgtgattaggtgctggggtcttagcgtccagcgcagcccgggggcatcctggaggctctgctccttagggcatggtagtcaccgcgaagccgggcaccgtcccacagcatctcctagaagcagccggcacaggagggaaggtggccaggctcgaagcagtctctgtttccagcactgcaccctcaggaagtcgcccgccccaggacacgcagggaccaccctaagggctgggtggctgtctcaaggacacattgaatacgttgtgaccatccagaaaataaatgctgaggggacacagtc

SEQ ID NO: 38176 - DNA, 5115 bp, Artificial Sequence
  derived and/or modified sequence
atggccgtgctgagacagctggccctgctgctgtggaagaactacaccctgcagaagagaaaggtgctggtgaccgtgctggagctgttcctgcccctgctgttcagcggcatcctgatctggctgagactgaagatccagagcgagaacgtgcccaacgccaccatctaccccggccagagcatccaggagctgcccctgttcttcaccttccccccccccggcgacacctgggagctggcctacatccccagccacagcgacgccgccaagaccgtgaccgagaccgtgagaagagccctggtgatcaacatgagagtgagaggcttccccagcgagaaggacttcgaggactacatcagatacgacaactgcagcagcagcgtgctggccgccgtggtgttcgagcaccccttcaaccacagcaaggagcccctgcccctggccgtgaagtaccacctgagattcagctacaccagaagaaactacatgtggacccagaccggcagcttcttcctgaaggagaccgagggctggcacaccaccagcctgttccccctgttccccaaccccggccccagagagcccaccagccccgacggcggcgagcccggctacatcagagagggcttcctggccgtgcagcacgccgtggacagagccatcatggagtaccacgccgacgccgccaccagacagctgttccagagactgaccgtgaccatcaagagattcccctacccccccttcatcgccgaccccttcctggtggccatccagtaccagctgcccctgctgctgctgctgagcttcacctacaccgccctgaccatcgccagagccgtggtgcaggagaaggagagaagactgaaggagtacatgagaatgatgggcctgagcagctggctgcactggagcgcctggttcctgctgttcttcctgttcctgctgatcgccgccagcttcatgaccctgctgttctgcgtgaaggtgaagcccaacgtggccgtgctgagcagaagcgaccccagcctggtgctggccttcctgctgtgcttcgccatcagcaccatcagcttcagcttcatggtgagcaccttcttcagcaaggccaacatggccgccgccttcggcggcttcctgtacttcttcacctacatcccctacttcttcgtggcccccagatacaactggatgaccctgagccagaagctgtgcagctgcctgctgagcaacgtggccatggccatgggcgcccagctgatcggcaagttcgaggccaagggcatgggcatccagtggagagacctgctgagccccgtgaacgtggacgacgacttctgcttcggccaggtgctgggcatgctgctgctggacagcgtgctgtacggcctggtgacctggtacatggaggccgtgttccccggccagttcggcgtgccccagccctggtacttcttcatcatgcccagctactggtgcggcaagcccagagccgtggccggcaaggaggaggaggacagcgaccccgagaaggccctgagaaacgagtacttcgaggccgagcccgaggacctggtggccggcatcaagatcaagcacctgagcaaggtgttcagagtgggcaacaaggacagagccgccgtgagagacctgaacctgaacctgtacgagggccagatcaccgtgctgctgggccacaacggcgccggcaagaccaccaccctgagcatgctgaccggcctgttcccccccaccagcggcagagcctacatcagcggctacgagatcagccaggacatggtgcagatcagaaagagcctgggcctgtgcccccagcacgacatcctgttcgacaacctgaccgtggccgagcacctgtacttctacgcccagctgaagggcctgagcagacagaagtgccccgaggaggtgaagcagatgctgcacatcatcggcctggaggacaagtggaacagcagaagcagattcctgagcggcggcatgagaagaaagctgagcatcggcatcgccctgatcgccggcagcaaggtgctgatcctggacgagcccaccagcggcatggacgccatcagcagaagagccatctgggacctgctgcagagacagaagagcgacagaaccatcgtgctgaccacccacttcatggacgaggccgacctgctgggcgacagaatcgccatcatggccaagggcgagctgcagtgctgcggcagcagcctgttcctgaagcagaagtacggcgccggctaccacatgaccctggtgaaggagccccactgcaaccccgaggacatcagccagctggtgcaccaccacgtgcccaacgccaccctggagagcagcgccggcgccgagctgagcttcatcctgcccagagagagcacccacagattcgagggcctgttcgccaagctggagaagaagcagaaggagctgggcatcgccagcttcggcgccagcatcaccaccatggaggaggtgttcctgagagtgggcaagctggtggacagcagcatggacatccaggccatccagctgcccgccctgcagtaccagcacgagagaagagccagcgactgggccgtggacagcaacctgtgcggcgccatggaccccagcgacggcatcggcgccctgatcgaggaggagagaaccgccgtgaagctgaacaccggcctggccctgcactgccagcagttctgggccatgttcctgaagaaggccgcctacagctggagagagtggaagatggtggccgcccaggtgctggtgcccctgacctgcgtgaccctggccctgctggccatcaactacagcagcgagctgttcgacgaccccatgctgagactgaccctgggcgagtacggcagaaccgtggtgcccttcagcgtgcccggcaccagccagctgggccagcagctgagcgagcacctgaaggacgccctgcaggccgagggccaggagcccagagaggtgctgggcgacctggaggagttcctgatcttcagagccagcgtggagggcggcggcttcaacgagagatgcctggtggccgccagcttcagagacgtgggcgagagaaccgtggtgaacgccctgttcaacaaccaggcctaccacagccccgccaccgccctggccgtggtggacaacctgctgttcaagctgctgtgcggcccccacgccagcatcgtggtgagcaacttcccccagcccagaagcgccctgcaggccgccaaggaccagttcaacgagggcagaaagggcttcgacatcgccctgaacctgctgttcgccatggccttcctggccagcaccttcagcatcctggccgtgagcgagagagccgtgcaggccaagcacgtgcagttcgtgagcggcgtgcacgtggccagcttctggctgagcgccctgctgtgggacctgatcagcttcctgatccccagcctgctgctgctggtggtgttcaaggccttcgacgtgagagccttcaccagagacggccacatggccgacaccctgctgctgctgctgctgtacggctgggccatcatccccctgatgtacctgatgaacttcttcttcctgggcgccgccaccgcctacaccagactgaccatcttcaacatcctgagcggcatcgccaccttcctgatggtgaccatcatgagaatccccgccgtgaagctggaggagctgagcaagaccctggaccacgtgttcctggtgctgcccaaccactgcctgggcatggccgtgagcagcttctacgagaactacgagaccagaagatactgcaccagcagcgaggtggccgcccactactgcaagaagtacaacatccagtaccaggagaacttctacgcctggagcgcccccggcgtgggcagattcgtggccagcatggccgccagcggctgcgcctacctgatcctgctgttcctgatcgagaccaacctgctgcagagactgagaggcatcctgtgcgccctgagaagaagaagaaccctgaccgagctgtacaccagaatgcccgtgctgcccgaggaccaggacgtggccgacgagagaaccagaatcctggcccccagccccgacagcctgctgcacacccccctgatcatcaaggagctgagcaaggtgtacgagcagagagtgcccctgctggccgtggacagactgagcctggccgtgcagaagggcgagtgcttcggcctgctgggcttcaacggcgccggcaagaccaccaccttcaagatgctgaccggcgaggagagcctgaccagcggcgacgccttcgtgggcggccacagaatcagcagcgacgtgggcaaggtgagacagagaatcggctactgcccccagttcgacgccctgctggaccacatgaccggcagagagatgctggtgatgtacgccagactgagaggcatccccgagagacacatcggcgcctgcgtggagaacaccctgagaggcctgctgctggagccccacgccaacaagctggtgagaacctacagcggcggcaacaagagaaagctgagcaccggcatcgccctgatcggcgagcccgccgtgatcttcctggacgagcccagcaccggcatggaccccgtggccagaagactgctgtgggacaccgtggccagagccagagagagcggcaaggccatcatcatcaccagccacagcatggaggagtgcgaggccctgtgcaccagactggccatcatggtgcagggccagttcaagtgcctgggcagcccccagcacctgaagagcaagttcggcagcggctacagcctgagagccaaggtgcagagcgagggccagcaggaggccctggaggagttcaaggccttcgtggacctgaccttccccggcagcgtgctggaggacgagcaccagggcatggtgcactaccacctgcccggcagagacctgagctgggccaaggtgttcggcatcctggagaaggccaaggagaagtacggcgtggacgactacagcgtgagccagatcagcctggagcaggtgttcctgagcttcgcccacctgcagccccccaccgccgaggagggcagatag

SEQ ID NO: 38177 - DNA, 5127 bp, Artificial Sequence
  derived and/or modified sequence
accgcccccccccccagccccagcctgcccctgcaggacagagccgccaccagcgcccacctggccctgttcaccctgagcttccagagcaccttcctgctgttccccgccggctgcagcgcctacctgaacctgctgagaccccccaccagcctggccgccctgggcgtgcccttcagcaagaccatggccgtgctgagacagctggccctgctgctgtggaagaactacaccctgcagaagagaaaggtgctggtgaccgtgctggagctgttcctgcccctgctgttcagcggcatcctgatctggctgagactgaagatccagagcgagaacgtgcccaacgccaccatctaccccggccagagcatccaggagctgcccctgttcttcaccttccccccccccggcgacacctgggagctggcctacatccccagccacagcgacgccgccaagaccgtgaccgagaccgtgagaagagccctggtgatcaacatgagagtgagaggcttccccagcgagaaggacttcgaggactacatcagatacgacaactgcagcagcagcgtgctggccgccgtggtgttcgagcaccccttcaaccacagcaaggagcccctgcccctggccgtgaagtaccacctgagattcagctacaccagaagaaactacatgtggacccagaccggcagcttcttcctgaaggagaccgagggctggcacaccaccagcctgttccccctgttccccaaccccggccccagagagcccaccagccccgacggcggcgagcccggctacatcagagagggcttcctggccgtgcagcacgccgtggacagagccatcatggagtaccacgccgacgccgccaccagacagctgttccagagactgaccgtgaccatcaagagattcccctacccccccttcatcgccgaccccttcctggtggccatccagtaccagctgcccctgctgctgctgctgagcttcacctacaccgccctgaccatcgccagagccgtggtgcaggagaaggagagaagactgaaggagtacatgagaatgatgggcctgagcagctggctgcactggagcgcctggttcctgctgttcttcctgttcctgctgatcgccgccagcttcatgaccctgctgttctgcgtgaaggtgaagcccaacgtggccgtgctgagcagaagcgaccccagcctggtgctggccttcctgctgtgcttcgccatcagcaccatcagcttcagcttcatggtgagcaccttcttcagcaagggcatgggcatccagtggagagacctgctgagccccgtgaacgtggacgacgacttctgcttcggccaggtgctgggcatgctgctgctggacagcgtgctgtacggcctggtgacctggtacatggaggccgtgttccccggccagttcggcgtgccccagccctggtacttcttcatcatgcccagctactggtgcggcaagcccagagccgtggccggcaaggaggaggaggacagcgaccccgagaaggccctgagaaacgagtacttcgaggccgagcccgaggacctggtggccggcatcaagatcaagcacctgagcaaggtgttcagagtgggcaacaaggacagagccgccgtgagagacctgaacctgaacctgtacgagggccagatcaccgtgctgctgggccacaacggcgccggcaagaccaccaccctgagcatgctgaccggcctgttcccccccaccagcggcagagcctacatcagcggctacgagatcagccaggacatggtgcagatcagaaagagcctgggcctgtgcccccagcacgacatcctgttcgacaacctgaccgtggccgagcacctgtacttctacgcccagctgaagggcctgagcagacagaagtgccccgaggaggtgaagcagatgctgcacatcatcggcctggaggacaagtggaacagcagaagcagattcctgagcggcggcatgagaagaaagctgagcatcggcatcgccctgatcgccggcagcaaggtgctgatcctggacgagcccaccagcggcatggacgccatcagcagaagagccatctgggacctgctgcagagacagaagagcgacagaaccatcgtgctgaccacccacttcatggacgaggccgacctgctgggcgacagaatcgccatcatggccaagggcgagctgcagtgctgcggcagcagcctgttcctgaagcagaagtacggcgccggctaccacatgaccctggtgaaggagccccactgcaaccccgaggacatcagccagctggtgcaccaccacgtgcccaacgccaccctggagagcagcgccggcgccgagctgagcttcatcctgcccagagagagcacccacagattcgagggcctgttcgccaagctggagaagaagcagaaggagctgggcatcgccagcttcggcgccagcatcaccaccatggaggaggtgttcctgagagtgggcaagctggtggacagcagcatggacatccaggccatccagctgcccgccctgcagtaccagcacgagagaagagccagcgactgggccgtggacagcaacctgtgcggcgccatggaccccagcgacggcatcggcgccctgatcgaggaggagagaaccgccgtgaagctgaacaccggcctggccctgcactgccagcagttctgggccatgttcctgaagaaggccgcctacagctggagagagtggaagatggtggccgcccaggtgctggtgcccctgacctgcgtgaccctggccctgctggccatcaactacagcagcgagctgttcgacgaccccatgctgagactgaccctgggcgagtacggcagaaccgtggtgcccttcagcgtgcccggcaccagccagctgggccagcagctgagcgagcacctgaaggacgccctgcaggccgagggccaggagcccagagaggtgctgggcgacctggaggagttcctgatcttcagagccagcgtggagggcggcggcttcaacgagagatgcctggtggccgccagcttcagagacgtgggcgagagaaccgtggtgaacgccctgttcaacaaccaggcctaccacagccccgccaccgccctggccgtggtggacaacctgctgttcaagctgctgtgcggcccccacgccagcatcgtggtgagcaacttcccccagcccagaagcgccctgcaggccgccaaggaccagttcaacgagggcagaaagggcttcgacatcgccctgaacctgctgttcgccatggccttcctggccagcaccttcagcatcctggccgtgagcgagagagccgtgcaggccaagcacgtgcagttcgtgagcggcgtgcacgtggccagcttctggctgagcgccctgctgtgggacctgatcagcttcctgatccccagcctgctgctgctggtggtgttcaaggccttcgacgtgagagccttcaccagagacggccacatggccgacaccctgctgctgctgctgctgtacggctgggccatcatccccctgatgtacctgatgaacttcttcttcctgggcgccgccaccgcctacaccagactgaccatcttcaacatcctgagcggcatcgccaccttcctgatggtgaccatcatgagaatccccgccgtgaagctggaggagctgagcaagaccctggaccacgtgttcctggtgctgcccaaccactgcctgggcatggccgtgagcagcttctacgagaactacgagaccagaagatactgcaccagcagcgaggtggccgcccactactgcaagaagtacaacatccagtaccaggagaacttctacgcctggagcgcccccggcgtgggcagattcgtggccagcatggccgccagcggctgcgcctacctgatcctgctgttcctgatcgagaccaacctgctgcagagactgagaggcatcctgtgcgccctgagaagaagaagaaccctgaccgagctgtacaccagaatgcccgtgctgcccgaggaccaggacgtggccgacgagagaaccagaatcctggcccccagccccgacagcctgctgcacacccccctgatcatcaaggagctgagcaaggtgtacgagcagagagtgcccctgctggccgtggacagactgagcctggccgtgcagaagggcgagtgcttcggcctgctgggcttcaacggcgccggcaagaccaccaccttcaagatgctgaccggcgaggagagcctgaccagcggcgacgccttcgtgggcggccacagaatcagcagcgacgtgggcaaggtgagacagagaatcggctactgcccccagttcgacgccctgctggaccacatgaccggcagagagatgctggtgatgtacgccagactgagaggcatccccgagagacacatcggcgcctgcgtggagaacaccctgagaggcctgctgctggagccccacgccaacaagctggtgagaacctacagcggcggcaacaagagaaagctgagcaccggcatcgccctgatcggcgagcccgccgtgatcttcctggacgagcccagcaccggcatggaccccgtggccagaagactgctgtgggacaccgtggccagagccagagagagcggcaaggccatcatcatcaccagccacagcatggaggagtgcgaggccctgtgcaccagactggccatcatggtgcagggccagttcaagtgcctgggcagcccccagcacctgaagagcaagttcggcagcggctacagcctgagagccaaggtgcagagcgagggccagcaggaggccctggaggagttcaaggccttcgtggacctgaccttccccggcagcgtgctggaggacgagcaccagggcatggtgcactaccacctgcccggcagagacctgagctgggccaaggtgttcggcatcctggagaaggccaaggagaagtacggcgtggacgactacagcgtgagccagatcagcctggagcaggtgttcctgagcttcgcccacctgcagccccccaccgccgaggagggcagatag

SEQ ID NO: 38178 - protein, 807 aa, Artificial Sequence
  derived and/or modified sequence
MPKAPKQQPPEPEWIGDGESTSPSDKVVKKGKKDKKIKKTFFEELAVEDKQAGEEEKVLKEKEQQQQQQQQQQKKKRDTRKGRRKKDVDDDGEEKELMERLKKLSVPTSDEEDEVPAPKPRGGKKTKGGNVFAALIQDQSEEEEEEEKHPPKPAKPEKNRINKAVSEEQQPALKGKKGKEEKSKGKAKPQNKFAALDNEEEDKEEEIIKEKEPPKQGKEKAKKAEQMEYERQVASLKAANAAENDFSVSQAEMSSRQAMLENASDIKLEKFSISAHGKELFVNADLYIVAGRRYGLVGPNGKGKTTLLKHIANRALSIPPNIDVLLCEQEVVADETPAVQAVLRADTKRLKLLEEERRLQGQLEQGDDTAAERLEKVYEELRATGAAAAEAKARRILAGLGFDPEMQNRPTQKFSGGWRMRVSLARALFMEPTLLMLDEPTNHLDLNAVIWLNNYLQGWRKTLLIVSHDQGFLDDVCTDIIHLDAQRLHYYRGNYMTFKKMYQQKQKELLKQYEKQEKKLKELKAGGKSTKQAEKQTKEALTRKQQKCRRKNQDEESQEAPELLKRPKEYTVRFTFPDPPPLSPPVLGLHGVTFGYQGQKPLFKNLDFGIDMDSRICIVGPNGVGKSTLLLLLTGKLTPTHGEMRKNHRLKIGFFNQQYAEQLRMEETPTEYLQRGFNLPYQDARKCLGRFGLESHAHTIQICKLSGGQKARVVFAELACREPDVLILDEPTNNLDIESIDALGEAINEYKGAVIVVSHDARLITETNCQLWVVEEQSVSQIDGDFEDYKREVLEALGEVMVSRPRE

SEQ ID NO: 38179 - DNA, 2424 bp, Artificial Sequence
  derived and/or modified sequence
atgccaaaggccccgaaacagcagccgcctgagccggaatggatcggggacggggaaagtactagccctagcgacaaggtggtgaagaaaggcaagaaagataagaagattaaaaaaactttctttgaagagctggccgtagaagacaagcaggctggcgaagaagaaaaggtgcttaaagagaaagaacaacagcaacaacagcaacaacagcagcaaaagaagaagcgcgacaccagaaagggccgaagaaaaaaagatgtggatgacgatggcgaggaaaaggagctcatggagcgcttaaagaaattgtctgtcccaacaagtgacgaggaagacgaagtcccggctcccaagccccgtggaggcaagaagaccaaggggggcaatgtatttgccgcactcatccaagaccagtctgaggaagaggaggaagaagagaaacacccccctaagccagcaaaaccagagaaaaacaggatcaacaaggccgtgagtgaggaacaacaacctgcgctgaaaggaaagaaggggaaagaggagaaaagcaagggaaaagccaaaccacagaacaagttcgccgccctggataacgaggaggaagacaaagaggaagaaattatcaaggagaaagagcctccgaaacagggtaaggagaaggccaagaaggcggagcagatggagtacgagcgccaggttgcctcgctcaaggcagccaacgctgcggagaatgacttctcagtcagtcaggcagaaatgtcaagccgccaagcgatgttggagaacgcctccgacattaagctggagaagtttagtattagcgcccacggtaaggagctttttgtgaatgccgacctctacatagtggccggtcgtagatacggactggtaggtcccaacggaaaggggaaaacgacgctactcaagcacatagccaatagagcactgtctataccacccaacatcgatgtcttgttgtgcgagcaagaggtagtggcagatgagacccccgctgtgcaggccgtgttgagagcagacaccaagcgactgaagttgttagaagaggagagacggctgcaaggacagctcgaacaaggcgacgatactgccgcagagaggctagaaaaggtctatgaggagttaagggccaccggcgccgctgccgctgaggcgaaagctaggcggattctggctggacttggctttgaccccgagatgcagaaccgccccactcaaaagtttagcggggggtggaggatgagggtgtcactcgcaagggctttgtttatggagccgaccctactgatgctagacgaacccacaaatcatttggacctcaacgccgttatctggctgaataactatctccaaggctggcgaaagacactgttaatcgtgagccatgatcagggtttcctggacgacgtatgcactgacatcattcacctagacgcccagagattgcactactaccggggtaattacatgacattcaagaaaatgtaccagcagaagcaaaaggaactgttgaagcagtatgaaaagcaggaaaaaaagcttaaggaactgaaagctggtggcaaatcaacgaagcaggcggagaagcagactaaagaggcgctcacccgcaaacagcaaaaatgtagaagaaagaaccaggatgaagaaagtcaggaagcccctgagcttctgaaaagacctaaagagtatactgtgcgctttaccttccctgatcctccccctttaagccctccagtcctgggcttgcatggcgtcaccttcggctatcagggacagaaacccctctttaaaaatctggatttcgggatagacatggacagtcggatctgtattgttgggccaaacggagtcgggaagtccactcttctgctactcctcactggcaagctgacgcctacccacggcgagatgaggaaaaatcaccggctgaagattggcttcttcaaccaacaatatgctgagcagctgcgaatggaggaaaccccaactgagtatttgcaacggggctttaacctgccctaccaggacgcacgcaaatgcctgggacgttttggcctcgagtcccacgctcataccattcagatttgtaaactgtcaggggggcaaaaagcacgagttgtgttcgccgaacttgcttgtcgcgagccggacgttctgattctggacgagccaaccaacaacctggatatcgaatcgattgacgccttaggtgaggccatcaatgaatataagggtgccgtgattgtggtaagccatgacgcacgcttgataaccgagacaaactgccagctttgggtcgtggaagagcagtctgtgagccaaatagacggtgattttgaggactacaaaagagaggtcctggaagcccttggagaagttatggtatcgaggcctcgtgagtag

SEQ ID NO: 38180 - DNA, 2424 bp, Artificial Sequence
  derived and/or modified sequence
atgccaaaggccccaaaacagcagcctccagagcccgagtggatcggcgacggggagagcacttccccttccgacaaggtggtgaagaaaggcaagaaggataaaaagattaagaaaacattctttgaagaactggccgtcgaggataagcaggccggcgaggaggagaaagtcctaaaagagaaggaacaacagcagcaacagcagcagcagcaacagaaaaagaagagagacaccagaaaaggtcggcgcaaaaaagatgtggatgatgatggggaagagaaagaactgatggagagattaaaaaagctttcggtgccaacatctgatgaagaagacgaagttcccgctcctaagccacggggcggtaagaagaccaaggggggtaatgtgttcgctgccttaattcaggaccaaagcgaagaggaagaggaggaggagaagcacccccctaaacctgctaagccagaaaaaaaccggatcaataaagccgtgagtgaggaacagcagccagctctgaaggggaaaaagggaaaagaagaaaagtccaagggcaaagctaaaccacaaaacaaattcgccgctctagataacgaagaggaggacaaggaggaggaaattatcaaagagaaagagccgccaaaacaagggaaggagaaggcaaagaaagcagagcaaatggagtacgaacggcaagtcgcttcacttaaggctgctaatgccgccgaaaacgacttcagcgtgagtcaggcagagatgtcatccaggcaagccatgctggagaatgcctccgatattaagctcgaaaaatttagcatttccgcgcacggcaaggagctcttcgtcaacgccgatctgtacatcgtggccggccgcagatacggcctggtaggtccaaacgggaaaggaaagacaaccctgctgaaacacatcgcaaacagggcactttccatccctcctaacatagacgttctgctgtgtgagcaggaagtcgttgccgatgagacaccagccgtgcaagccgtgttgcgcgctgacaccaaacgtttgaagctattggaagaggaacgtaggctacagggacaacttgaacagggggatgatacggctgccgagcggttagaaaaggtctacgaggagctgagggccacgggcgcagccgccgccgaggcaaaggcgcgcaggatcctagcaggacttggctttgatcccgagatgcagaaccgccccacgcagaagtttagtggggggtggcgcatgcgtgttagcctggctcgagccctgtttatggaacctacgctattgatgctggatgagccaacaaatcatctagatcttaatgctgtcatttggctcaacaattaccttcagggatggcggaaaactcttctgatcgtgtcacatgatcaaggcttcctggatgatgtgtgtactgacatcatccatctcgacgcccaacgtctccactactatcgcggaaactatatgacctttaaaaaaatgtaccaacagaaacagaaggaactgctcaagcagtacgagaagcaggaaaagaaactcaaagaactgaaggcgggaggcaagtcaaccaagcaggcagagaagcagactaaggaagcacttacacggaagcagcagaaatgcagacgtaaaaaccaggatgaggagtctcaagaggctcctgaactcctaaaacgccccaaagagtacacagtccggttcacctttcctgaccctccccccctgtccccccccgtgctgggcttacacggcgttacctttggataccaaggtcagaaacccctcttcaaaaacctcgattttgggatcgatatggactcgaggatctgcatcgtggggcccaatggcgtcgggaagtcaaccctgctgctgctgctgacagggaagttaacacctacccatggtgaaatgcgcaaaaaccatagactgaaaatcggcttcttcaatcagcagtacgctgagcaactccgaatggaggaaacgccgactgagtatcttcagcggggctttaacctgccgtatcaggatgcgagaaagtgccttggtaggtttggactggagtctcatgcccatactatacagatatgtaagttgagcggcgggcagaaggcaagggtggttttcgctgagctggcctgccgggagcctgatgttttgatcctggatgagcccactaataatttagacatcgagagtattgatgctctcggcgaggccatcaacgagtacaagggcgcagtgattgtggtgagccatgatgccaggttaattaccgaaactaattgccagctgtgggtggtggaagaacagtcagtatcacagattgacggagacttcgaggattacaagcgagaggttttagaagctctaggtgaggtgatggtcagccggcctcgggagtag

SEQ ID NO: 38181 - DNA, 717 bp, Artificial Sequence
  derived and/or modified sequence
atgcccaaggctccgaagcaacagcctcccgagccggaatggatcggagacggggaaagcacatccccaagcgataaagtagtgaaaaaaggcaaaaaggataagaagattaaaaaaaccttcttcgaggaactcgctgttgaagataaacaggctggcgaggaggaaaaagtcctgaaggagaaggagcaacagcaacagcagcagcagcagcagcagaagaagaaacgtgacactagaaagggtaggcgcaagaaagacgtggacgatgacggagaagagaaggaattgatggagcgcttgaagaagttgtccagaggtttcaatctgccttatcaggatgccaggaaatgtttaggacgatttgggctcgaaagtcatgcccatacaatacagatctgcaagctttcaggcgggcagaaagcaagagtcgtcttcgccgaactcgcctgcagggagccagacgtcctgattctggacgaacccactaacaatctggacattgaaagtatcgacgccctgggagaagccatcaatgaatataaaggagctgtcatcgtcgtgtctcacgatgccagattgatcaccgagaccaattgtcagctctgggtcgtggaggaacagagcgttagtcagattgacggagactttgaggattacaagcgcgaggtgttggaggccctaggggaagtgatggttagtagaccacgtgaatag

SEQ ID NO: 38182 - DNA, 2424 bp, Artificial Sequence
  derived and/or modified sequence
atgccaaaagccccaaaacagcagccccccgagccggaatggattggggacggcgaaagtaccagcccttccgataaagtcgtgaagaagggcaagaaggataaaaaaattaagaagacgttttttgaggagctggccgtggaagacaaacaagcgggggaagaagaaaaagtgttaaaggagaaggagcagcaacaacagcaacagcaacagcagcagaagaaaaagcgtgatacacgcaaaggtcggcgtaaaaaagacgtcgacgacgatggtgaagagaaagaactgatggagaggctcaagaagctctccgtgcccactagcgacgaggaggatgaggttcctgcacctaagccaaggggcggcaagaaaacgaaaggaggaaatgttttcgctgctttgattcaggatcagtcggaggaggaagaggaagaggaaaaacacccccccaaaccagccaagcccgagaaaaataggatcaacaaagccgtgtctgaggagcagcaacctgcactgaaaggcaagaagggcaaagaggagaagagcaagggcaaagcaaaaccacaaaataagttcgctgctctggataacgaggaggaagataaggaggaagaaatcataaaggagaaagaacctcctaagcagggcaaagaaaaggctaagaaggccgagcagatggagtatgaacggcaggtcgcatcattgaaggctgccaatgccgcagaaaacgatttcagtgtgagtcaggcagagatgagttccagacaggcaatgctggaaaacgcatctgacattaaactggaaaagttcagcatctcggctcacgggaaagagctattcgtcaacgcagacctctacattgtagccggacggcggtacggcctcgttggccctaacggcaagggtaagaccaccctgctgaaacatatagccaatagggctctcagcattcctccaaatatcgacgtacttctgtgtgagcaggaagttgtggccgacgaaacgccagccgtccaggccgtgctgcgggctgacacgaagaggcttaagcttctcgaggaagaaagacgccttcaggggcaattggagcagggtgatgacactgcagccgaacgcctagagaaggtatacgaggagttgcgtgccacgggagctgcagcagcagaggccaaagcccgcaggatactggccgggcttggtttcgatccagagatgcaaaacaggccaacgcagaagttctcaggtggctggcgcatgagggtctctctagctagggccctattcatggagcctaccctgctaatgctggacgagccaacaaatcacctggacctcaacgccgtgatctggctgaacaactatttacaagggtggagaaaaacccttttgatcgtatcacatgaccaagggttcctggatgatgtgtgcacagatattatccatctggatgctcaacgtttgcattattacaggggcaactatatgacttttaagaaaatgtatcagcagaagcagaaagagcttttgaagcagtatgagaagcaggagaagaagctgaaggagttaaaggccggtggaaagagcactaagcaagccgagaaacaaacaaaagaagctcttacgaggaagcagcaaaaatgccgccggaagaaccaggatgaagaatctcaggaagcgcccgaactcctgaagagacccaaggaatacacggtgcgcttcacatttccagatccccctccactatccccacccgttctggggcttcatggcgtgacctttggataccagggtcagaaaccactttttaaaaacctggatttcggcattgacatggactcccggatctgcattgtcggacctaacggggtaggaaaaagcactctgctcttgctgctgacaggaaagctgactcccactcatggtgagatgagaaaaaaccataggctgaagattggctttttcaatcagcaatacgctgagcagctacgcatggaggaaacacctacagaatacctgcagcgcggatttaacttgccttaccaggatgcccgaaaatgcctaggaaggttcggactggaatcgcacgcccacacgattcagatttgcaaattgtctggcggacagaaggcccgggtagtgttcgccgaactggcatgtcgggagccagacgtactgatactagatgaacctacgaataacctcgacattgagagcatcgacgccctaggggaagcaataaatgaatacaaaggtgctgtgatcgtcgtttctcatgatgccagattgattaccgagactaactgtcaactttgggttgtggaggagcaatctgtgtcccagatcgatggcgactttgaggactacaagcgcgaggtcttggaggccctcggtgaggtcatggtatctcggccacgtgagtag

SEQ ID NO: 38183 - DNA, 717 bp, Artificial Sequence
  derived and/or modified sequence
atgcccaaagccccgaaacagcagccccctgagccggagtggatcggcgacggggagtcaacttctcctagtgataaggtcgtgaaaaaaggtaagaaagataagaagatcaagaagactttcttcgaggagcttgcagtggaggataagcaggctggagaagaggagaaagtcctgaaggagaaagaacagcagcagcagcagcaacagcagcagcagaagaaaaaacgggatacacgtaaagggcggagaaagaaagacgtcgatgacgatggtgaggagaaagaactcatggagcgattaaaaaagctgagccgcggcttcaatctgccataccaagatgcccgtaagtgcctcgggagatttggtctggagagccacgcacacaccatccagatctgtaagctttccggcgggcagaaggcccgtgtggtcttcgccgagctcgcttgtcgcgagcccgacgtcttgattctggacgaacccactaataatctggacatcgagagcattgacgccttaggagaggctattaacgaatataaaggtgcggttattgtggtgtctcatgacgcccgcttgatcaccgaaaccaactgtcaactgtgggtcgttgaggagcagagtgtcagtcagatcgacggagatttcgaggactataaacgggaagtgctggaggcactgggagaggtcatggtgagccggccgcgagagtag

SEQ ID NO: 38184 - DNA, 2424 bp, Artificial Sequence
  derived and/or modified sequence
atgccaaaggcccctaaacagcagcctcccgaaccggagtggataggagatggcgagtcaacatctccttcagataaagtggtgaagaaaggaaaaaaggataagaagattaagaagactttctttgaagagctggcagttgaagataagcaagctggggaagaggagaaagttttaaaagagaaggagcaacagcagcagcagcagcaacagcagcagaaaaagaaaagagatacacgaaagggtcgtcgtaaaaaggacgtcgacgacgatggcgaggaaaaagagctgatggaaaggcttaaaaagctctcagtgcctacttccgatgaggaggacgaggtaccagcccctaagccgcggggagggaagaaaaccaaaggcggcaacgtgtttgctgcccttatacaggaccagagcgaggaggaagaagaagaggaaaaacatcctccaaaacctgcaaagcctgagaagaaccgtattaacaaagcggtgtctgaggagcagcagccagccctcaaaggaaaaaaagggaaggaggagaagtcaaagggaaaagcaaagccgcagaacaaattcgctgctctggacaacgaagaggaagacaaggaggaagaaattattaaggagaaggagccacctaagcaggggaaagaaaaggctaagaaggccgagcagatggagtatgaaaggcaggtggcatccctcaaggccgctaacgccgctgagaacgatttctctgtctcccaggccgagatgtcatcacgacaggcgatgctggaaaatgcctctgatatcaagctcgagaagttttcgattagcgcccacggcaaggagctcttcgtcaacgcggacctttacatcgttgctggcaggcgctacgggcttgttgggccaaacggcaaaggtaagacaaccttgttgaaacacattgcaaacagggccctgtccatacctccaaacatcgacgtcctgctatgcgagcaggaggtcgtggcagacgaaactcccgctgtgcaggctgtactgagagctgacactaagcgtcttaaactgcttgaggaggagcgcaggctccaaggccagctcgaacaaggagacgatacagccgccgaacgcttggagaaagtctacgaggagctacgtgcgacgggcgcagctgcagctgaagctaaggctaggcgcatcttggccgggctgggctttgaccctgaaatgcagaatcgaccgactcaaaagttcagtggaggttggcggatgcgggtgagtctggctcgcgccctgttcatggaacctaccttgttgatgctcgacgaacccaccaatcatcttgatctgaatgctgtcatttggcttaacaactacctgcaagggtggcgaaagacgctcttaattgtgtcccacgatcaaggatttctggacgatgtatgcaccgacattatccacttagacgcccagcgcctgcattattatcggggcaactatatgacatttaaaaagatgtaccagcagaaacaaaaggagttacttaagcaatacgagaagcaggagaaaaagttgaaggagctgaaggcgggcggcaaaagcaccaagcaggccgaaaagcagaccaaagaagctctgactcggaaacagcaaaagtgcagacgaaaaaatcaggacgaggaaagccaagaagcgccagaattgctcaagcggccaaaagaatacacagtgagatttacatttcctgacccccccccgctctctccccccgtcttgggcctgcacggggtcactttcggttaccaaggacagaagcctctttttaaaaacctggattttggaatcgatatggatagcaggatctgtatcgtgggcccaaacggggtgggaaagtccacgttactcctgctgttgaccggtaagctgactcccacccacggagagatgaggaagaaccacaggctcaaaataggtttttttaatcagcaatatgctgagcaactgaggatggaggaaacgccaactgaatacctgcagaggggctttaacttgccatatcaggacgccaggaagtgtctcggtcgattcggtcttgaatcgcatgctcacacaattcaaatttgcaaattgtcagggggtcagaaagccagagtggtttttgcagagcttgcctgccgggagccagatgttctgatcctggatgaaccaaccaacaatctggatatagagagcattgacgcgctgggcgaagcaatcaatgagtataagggtgcggttatagtggtctcgcacgatgcgagacttattaccgagactaattgtcaactgtgggtagtagaggaacagagcgtgagtcaaattgacggagactttgaggactataaacgagaggtactagaggcgctgggggaagtgatggtgtctagaccaagagagtag

SEQ ID NO: 38185 - DNA, 2424 bp, Artificial Sequence
  derived and/or modified sequence
atgcccaaggctcctaaacaacagccgccagagcccgaatggatcggagatggcgaatccacgagtccaagtgacaaggtggtgaaaaagggcaagaaagacaagaagataaagaagacattctttgaggagttagccgtggaagacaagcaggcgggagaagaggagaaggttttgaaagaaaaagagcagcagcaacagcaacagcagcagcagcagaagaaaaaacgagacactagaaaaggcagaagaaaaaaggacgtggacgacgacggcgaggaaaaagagttgatggagaggttgaagaagctgagcgtgccaacatccgacgaagaggatgaggttccagccccaaaaccacggggaggaaagaaaactaaaggtggcaatgtttttgcggcgctgatccaggatcagagcgaggaggaagaagaagaggaaaagcacccccccaaacctgccaagcctgagaagaacaggattaataaagcagtgagcgaggagcagcaacctgccctgaagggcaagaaaggaaaagaggaaaaatcaaaggggaaagccaaaccccagaacaagttcgctgctttggataacgaagaggaggataaagaagaggagattataaaagagaaagagcctccaaagcaggggaaggaaaaggcaaagaaggctgaacagatggagtatgagcgccaggtggcctccctcaaagcggctaatgccgcagagaacgatttcagtgtatcacaggctgagatgtcatcgagacaggccatgctggagaacgcttcagacatcaagctcgaaaaattctctatcagtgctcacggcaaggaactcttcgtaaatgcggatttgtacattgtggctggcaggaggtacggtctggtgggtccgaacgggaaaggtaaaaccacgcttctcaagcatatagccaatcgagctctgtccattccccccaacattgacgtgcttctttgtgaacaagaagtggtggccgatgaaacccctgccgtccaggctgtgctgagggctgataccaagaggctgaagttgcttgaagaggagcgacggctacaaggccagctggaacagggagatgatacggcagccgagagactggagaaggtttatgaggaattgcgcgccacaggcgccgctgctgccgaggctaaggcgaggagaatcctcgccggcctcgggtttgaccccgagatgcaaaaccggccaacgcagaagttttccggaggctggcgaatgagggtcagcttagccagagccttgtttatggagcccacccttcttatgctcgacgagccaaccaatcacctggacctaaatgccgtgatctggctcaacaactatttgcagggttggcgcaagacccttctcatcgtgtcacacgaccagggctttttagatgacgtgtgcacagatattatccatcttgacgcacagagactgcactactatcggggcaactacatgacgttcaaaaaaatgtaccagcagaagcaaaaagaactgctaaaacaatacgaaaagcaggaaaagaagctaaaagaactcaaagctggtggaaaaagtacaaagcaggctgagaaacagacaaaagaagctctgaccagaaaacagcaaaagtgtcgccgcaagaaccaagacgaggaatcccaagaggcacccgagctcctcaagagacctaaggagtatacagtgaggtttacctttccggacccgcctcccctctcccccccggttctcggccttcatggagtaacctttggttatcaaggtcagaagcctctcttcaagaaccttgactttggcatcgatatggatagccgcatctgtattgtgggacccaacggagtagggaagtcaaccctgttgctcctgctgaccggaaaactcactccaactcacggcgagatgcgtaaaaaccaccggctgaaaatcggtttttttaatcagcagtacgctgagcagctgagaatggaggagactccgaccgagtacctccagaggggttttaacctgccctaccaagacgctcgcaagtgcctcggccgctttggccttgagagccatgctcatacaatacagatttgtaagctttcaggtggtcagaaggccagagtggtctttgctgaactcgcatgcagagaacctgacgtgctgatcttggacgagcctaccaataatctggacatcgagtctattgacgcactcggcgaagccattaacgaatataaaggagccgtgatcgtagtgagccatgatgctcgattaatcaccgagacaaattgtcagttgtgggttgtggaggaacaaagcgtctcccaaatcgatggcgactttgaggactacaaaagagaagtactggaagcgctgggggaagttatggtatcacgccccagagagtag

SEQ ID NO: 38186 - DNA, 717 bp, Artificial Sequence
  derived and/or modified sequence
atgcctaaagccccaaagcaacaacccccagagcccgagtggatcggggatggagagagcactagcccatctgacaaagtggtcaaaaagggaaagaaagacaagaaaataaagaagacattcttcgaagagctggccgtcgaagacaagcaggctggcgaggaggaaaaggttctaaaggagaaagagcagcagcagcagcagcagcagcaacagcaaaaaaagaaacgcgacaccaggaagggacggcgtaagaaagacgtcgatgatgatggtgaagagaaggaactaatggagcggttaaaaaaactgtcacgcggctttaacctgccatatcaagatgcccggaagtgcctgggcaggtttggactagagtcgcatgcccataccattcagatttgtaagttgtccggtggccagaaggcacgcgttgttttcgctgagctcgcttgtcgcgagccggatgtgttaatcctggatgagcccacaaacaatctcgatatagagtccatagatgccctgggggaggcaatcaacgaatataaaggtgcagtgattgtcgtcagtcatgacgcccggttaattactgagacaaactgccagctatgggtggtggaagaacaatctgttagccagatagatggcgatttcgaggattacaagagagaggtcttggaagctctgggggaagtgatggtgagccggccaagggagtag

SEQ ID NO: 38187 - DNA, 2424 bp, Artificial Sequence
  derived and/or modified sequence
atgcccaaggctcccaagcagcaacctccggaacctgagtggatcggcgatggagagtctacaagtcccagcgacaaggtggttaaaaaaggaaaaaaagataagaaaataaagaaaactttttttgaagaacttgcagtcgaggacaaacaggccggagaggaggaaaaagtcttgaaagagaaagagcagcagcaacagcaacagcagcagcagcagaagaagaagcgtgacactagaaaaggccgtagaaagaaggatgtcgacgacgatggggaggaaaaagagctcatggagcgactgaaaaagctgtctgtccccactagcgacgaggaggacgaagtgcccgccccaaagccaaggggggggaagaagactaagggcggtaatgtgttcgccgccttgatacaggatcagtccgaggaagaggaggaagaagagaagcaccccccaaaacctgccaagccagagaagaacagaatcaacaaagctgtgagtgaagagcagcagccagcactcaaggggaaaaaggggaaggaggagaagtcaaaggggaaggctaagcctcagaacaaattcgctgctctcgataatgaggaagaggataaagaggaggaaatcatcaaagaaaaggagcctcccaaacagggaaaagagaaagctaagaaagcagagcagatggagtacgaacggcaggtggcgtcactgaaagccgctaatgctgccgaaaacgattttagcgtctcccaggctgagatgtctagtagacaggccatgctcgaaaacgcatcggacataaagctggaaaagttctctataagcgcccacggaaaggaactgtttgttaacgcagacctgtacatcgtggccgggcgacggtatggcctggtgggacccaacggtaagggcaaaactactctgctaaagcatatagccaacagagcgctgtccattccacctaatattgatgtgctgctgtgcgagcaggaagtcgtggcagacgagactcctgccgtacaagcagtgctccgggcggacactaagaggttaaaattactggaggaagagcggcggctgcagggacagctcgagcagggagacgacacagccgccgagcgtctggaaaaagtgtacgaagaactgcgagccaccggggcggcggctgccgaagccaaagcccggcggatactggcagggttgggcttcgacccggagatgcagaatagacccacccagaagttttctggtgggtggagaatgcgcgtctcactggccagagcattgttcatggaacctactctgctgatgctggacgaacctaccaatcacctggatctcaacgccgtcatctggttgaacaattacctgcaggggtggcgcaagaccctgctgatagtgagccacgatcagggttttctcgacgatgtctgcacggacattattcacctggatgcccagcgactgcactactaccgcggaaactacatgaccttcaagaaaatgtatcagcagaaacagaaagagctcctcaagcaatacgaaaagcaggagaagaaactcaaggagttgaaggctggagggaagtccaccaaacaggcagaaaaacagaccaaggaagctctgactaggaagcagcagaagtgcagaagaaagaatcaggatgaggagtcgcaggaggccccggaattgctcaagcgccctaaagaatacacggtgcggttcacctttcctgaccctcctcctctcagtccaccagtgctgggacttcatggagttacatttggctaccaaggacaaaagcccttgttcaagaatttggatttcgggatagatatggacagtcgcatatgcattgtggggcctaatggagtggggaagtcgacgcttctgttacttttgacaggcaaactgacccccactcatggcgagatgaggaagaaccatcggctgaaaataggcttcttcaaccagcaatatgcggagcagttgcgaatggaggaaacacctaccgagtatctgcagcgtggattcaacctcccctaccaggacgcaaggaagtgcctcggaaggttcggccttgagagccacgcccacacaattcagatctgtaaactttcaggaggccaaaaggccagagtagtgttcgctgagctggcttgccgagagccggacgtcctcattttagacgagccgaccaacaacctcgacattgaatcaatcgacgcgcttggtgaggcaattaatgagtataagggggctgttattgtggtgagccatgacgctcgcctgatcacagagaccaactgccagttgtgggtagtggaggaacagtccgtttcccagatagatggagacttcgaagactacaagagggaggtccttgaggctttaggcgaagttatggttagccgcccaagagagtag

SEQ ID NO: 38188 - DNA, 2424 bp, Artificial Sequence
  derived and/or modified sequence
atgcccaaggccccgaaacaacagccccccgagcctgaatggataggcgatggcgagtcgacttccccctccgacaaagtcgtgaagaaaggcaaaaaagacaagaagatcaagaagactttcttcgaagagctggccgttgaagacaagcaggcaggcgaggaggaaaaagtcctgaaggaaaaggagcagcagcagcagcagcagcagcaacaacaaaaaaagaaacgagacacccggaagggtcggcggaagaaagacgtggatgatgacggggaagagaaggagctcatggaacgcttgaagaagctgtccgtccctacaagtgacgaagaagatgaagtgcccgcccccaaacctaggggaggcaaaaaaactaagggaggaaatgtgtttgcggcgttaatccaggaccagtcagaagaggaagaagaggaagagaagcacccaccgaaacccgccaaacctgaaaagaatcgaataaataaggccgtgtcagaggagcaacagcctgccctgaaagggaagaagggaaaggaagaaaaaagtaaggggaaggcaaaaccccagaataaatttgccgccctggataatgaggaggaagacaaggaggaggagatcatcaaagaaaaagaaccaccaaagcaggggaaggaaaaagctaaaaaagctgaacagatggaatatgagagacaggtcgcctcacttaaggccgccaacgccgcagagaacgatttcagcgtgtcgcaggcggagatgtccagccgccaggcgatgctcgagaacgcctccgatatcaaactcgaaaaattcagtatcagcgcccatggaaaggagttgttcgttaacgcagacctctatatcgttgcaggacgaaggtacggactcgttgggcctaacggcaaggggaaaaccacacttctgaaacatatcgctaacagagctcttagcatcccacccaacattgacgtactgctttgcgagcaggaggtcgtggccgatgaaacacccgctgttcaggccgtgctccgtgcagatacgaaacgccttaagttattggaggaagaaaggagactacaaggccagctggagcagggggacgacaccgccgctgagaggcttgaaaaggtttacgaagagctcagggccaccggggcagcagccgccgaggccaaggcccggcggattctggctggcctcggctttgaccccgaaatgcagaatcgcccaacccaaaagttttccgggggctggcgtatgcgcgtctctctcgcgcgtgcactctttatggaacccaccctgctcatgctggacgagcccaccaaccatctggatctgaatgcagttatttggctgaataactacctccagggttggagaaagacgctgctgatagttagtcacgatcaggggtttttggacgatgtgtgcactgatattatacacttggatgcgcagcgcctgcattattacaggggaaactacatgacttttaaaaagatgtaccagcagaaacagaaggagttgcttaaacagtacgagaagcaggaaaagaagctcaaagagctgaaggctgggggcaaaagcaccaagcaggctgagaaacagactaaggaagcattaaccaggaaacagcagaagtgtaggcgcaaaaatcaggatgaagaaagccaagaagctccagagctgctgaaacgtcctaaggaatatacagtgcgctttactttccctgaccctcccccactctcaccacccgtgcttggcctgcatggtgtgactttcgggtaccagggccagaaaccgctgttcaagaatctcgacttcggaatcgacatggatagcagaatatgtatcgtaggtccgaatggcgtgggcaaatccacccttctgcttctcctgaccggcaaactcactccaacccatggggagatgcgtaaaaaccaccgtctgaaaataggattctttaaccagcagtacgctgagcaattaaggatggaggagacccccaccgaatatctgcagagaggctttaacttgccataccaagacgctcggaaatgtttgggacgatttggactggagtcacacgcacatacaatccagatttgcaagttgagcggcggccagaaggcgcgggtcgtcttcgctgaacttgcctgcagagagcctgacgttctcatcctggacgagccaacgaacaatcttgacatcgaatcgattgatgccctcggggaggcgatcaatgaatacaagggtgccgtcatcgttgtgtctcatgatgcaaggctcattaccgaaactaattgccagctttgggtggtggaagagcaatccgtgtctcaaattgatggcgacttcgaagattataagagggaggtgttggaggctttgggggaagtgatggttagtcgtcctagggagtag

SEQ ID NO: 38189 - DNA, 717 bp, Artificial Sequence
  derived and/or modified sequence
atgcctaaggcccccaaacagcaacccccggagcctgaatggatcggcgatggggagtccacatcccctagcgataaagtggtgaaaaaaggaaaaaaggataagaagatcaagaagactttttttgaagaactggcagttgaggacaagcaggccggggaggaggagaaggtgttgaaggagaaagagcagcagcaacagcagcaacaacaacaacagaaaaaaaagagagacacccgaaaaggtcgcagaaagaaggatgtggatgatgatggggaagagaaagagctgatggaacgcctgaagaaactatctaggggttttaacctgccttatcaagatgcccgaaagtgtctgggaagattcggtctcgaatcacacgcccacacaatacagatatgcaaattgtccggcgggcagaaggctcgggttgtgttcgctgagctggcctgtcgtgaaccagacgtcctcatcctcgacgagcccacgaataacctcgatattgagagcatcgatgcactcggagaggccattaacgaatacaagggagccgtgatcgttgtctctcacgacgctaggttaatcaccgaaaccaactgccaactatgggtcgtggaggaacagtctgtaagtcagattgacggagactttgaggactataagagggaggtgctggaggcattaggagaggtgatggtctccaggccacgcgagtag

SEQ ID NO: 38190 - DNA, 717 bp, Artificial Sequence
  derived and/or modified sequence
atgccaaaagcacccaagcaacaacctccagaacccgaatggatcggggatggggaaagcacctcacctagcgacaaggtggtgaagaagggcaaaaaagacaagaaaattaaaaaaacctttttcgaagagcttgccgttgaggacaaacaagccggcgaggaggaaaaggtactgaaagagaaggagcaacagcagcaacaacaacagcagcaacagaaaaagaagcgagatacacgcaaggggaggcgcaagaaggacgtggacgatgatggcgaggagaaagagttgatggaaagattgaagaaactctcgcgcgggttcaatctgccttatcaagatgcccggaaatgccttggacgcttcggcctagaaagccacgcgcatactatacaaatctgcaagttgagcgggggacaaaaggccagggtagtctttgccgagttggcctgtagagagcccgatgttttgattcttgatgaacctaccaacaacttagatatagagtcgattgatgctctaggggaggccatcaacgagtacaagggcgcggttatcgtagtgtcgcacgatgcccgattgatcacagagactaactgccagctgtgggtggtcgaagaacaaagcgtgagtcagatcgatggagatttcgaagattacaaaagggaagtgttggaggcactgggtgaggtgatggtgtctcgccctcgcgaatag

SEQ ID NO: 38191 - DNA, 717 bp, Artificial Sequence
  derived and/or modified sequence
atgcccaaagctcctaaacagcagcctccagagccagagtggatcggcgacggcgagtcaaccagcccttccgacaaggtagtgaagaaggggaagaaggataaaaagatcaagaagactttcttcgaagaactggcagttgaggataagcaggcgggagaggaggaaaaggtgctaaaggaaaaagagcagcaacagcagcaacagcaacagcagcaaaagaagaagcgggacacgagaaagggccgaagaaagaaggacgtggacgacgatggcgaggagaaggaactcatggagcgccttaaaaagcttagtcgggggtttaatctgccttatcaggacgccagaaaatgcttgggtagattcggactggaatctcatgcgcacaccatccagatctgcaaactctcaggcggccagaaggcccgcgtcgtgtttgcagagttagcatgccgcgagcctgacgtgctgatcctggatgagcccacaaacaaccttgatatcgagagcatagacgcactgggagaggctattaatgaatacaagggagccgttatcgtcgtatcccatgatgcccgcctcattacagagacgaattgtcagttatgggtggtggaggaacagtcagtgtctcagattgacggagactttgaggactataaacgtgaggttttagaagcactcggggaggtcatggtttctcgcccccgtgagtag

SEQ ID NO: 38192 - DNA, 2424 bp, Artificial Sequence
  derived and/or modified sequence
atgcccaaggcccccaagcagcagcccccagagcctgagtggattggagatggagagagcaccagccccagcgacaaggtggtgaagaagggcaagaaggacaagaagatcaagaagaccttctttgaggagctggccgtggaggacaagcaggccggggaggaggagaaggtgctgaaggagaaggagcagcagcagcagcagcagcagcagcagcagaagaagaagagggacaccaggaaaggaagaaggaagaaggatgtggatgatgatggagaggagaaggagctgatggagcggctgaagaagctgtctgtgcccaccagtgatgaggaggatgaggtgcctgcccccaagccccggggcggcaagaagaccaagggcggcaatgtgtttgctgccctgatccaggaccagagcgaggaggaggaggaggaggagaagcacccccccaagccagccaagccagagaagaaccgcatcaacaaggctgtgtctgaggagcagcagcctgccctgaagggcaagaagggcaaggaggagaagagcaagggcaaggccaagccccagaacaagtttgctgccctggacaatgaggaggaggacaaggaggaggagatcatcaaggagaaggagccccccaagcagggcaaggagaaggccaagaaggccgagcagatggagtatgagcggcaggtggccagcctgaaggccgccaatgctgctgaaaatgacttctctgtgtcccaggccgagatgagcagccggcaggccatgctggagaatgccagtgacatcaagctggagaagttcagcatcagcgcccacggcaaggagctgtttgtgaatgctgacctgtacatcgtggccggccgccgctatggcctggtgggccccaacgggaagggcaagaccaccctgctgaagcacatcgccaacagagccctgagcatcccccccaacattgatgtgctgctgtgtgagcaggaggtggtggctgatgagaccccagctgtgcaggccgtgctgcgggctgacaccaagaggctgaagctgctggaggaggagcggcggctgcagggccagctggagcagggagatgacacagctgctgagcggctggagaaggtgtatgaggagctgcgggccaccggggctgctgctgctgaggccaaggcccggcgcatcctggccggcctgggctttgatcctgagatgcagaaccggcccacccagaagttcagcggcggctggaggatgagggtgtccctggcccgggccctcttcatggagcccaccctgctgatgctggatgagcccaccaaccacctggacctgaatgctgtgatctggctgaacaactacctgcagggctggaggaagaccctgctgattgtgtcccatgaccagggcttcctggatgatgtgtgcacagacatcatccacctggatgcccagaggctgcactactaccggggcaactacatgaccttcaagaagatgtaccagcagaagcagaaggagctgctgaagcagtatgagaagcaggagaagaagctgaaggagctgaaggccggcggcaagagcaccaagcaggccgagaagcagaccaaggaggccctgaccaggaagcagcagaagtgcaggaggaagaaccaggatgaggagagccaggaggcccctgagctgctgaagaggcccaaggagtacacagtgcgcttcaccttcccagaccccccacccctgagcccccctgtgctgggcctgcacggcgtgaccttcggctaccagggccagaagcccctcttcaagaacctggactttggcatcgacatggacagccgcatctgcatcgtgggccccaacggggtgggcaagagcaccctgctgctgctgctgaccgggaagctgacccccacccatggagagatgaggaagaaccaccggctgaagattggcttcttcaaccagcagtatgcagagcagctgaggatggaggagacccccacagagtacctgcagaggggcttcaacctgccctaccaggatgccaggaagtgcctgggccgcttcggcctggagagccacgcccacaccatccagatctgcaagctgagcggcggccagaaggcccgggtggtgtttgctgagctggcctgccgggagccagatgtgctgatcctggatgagcccaccaacaacctggacatcgagagcattgatgccctgggggaggccatcaatgagtacaagggagctgtgattgtggtgtcccatgatgcccggctcatcacagagaccaactgccagctgtgggtggtggaggagcagagcgtgtcccagattgatggagactttgaggactacaagcgggaggtgctggaggccctgggggaggtgatggtgtcccggccccgggagtag

SEQ ID NO: 38193 - DNA, 717 bp, Artificial Sequence
  derived and/or modified sequence
atgcccaaggcccccaagcagcagcccccagagcctgagtggattggagatggagagagcaccagccccagcgacaaggtggtgaagaagggcaagaaggacaagaagatcaagaagaccttctttgaggagctggccgtggaggacaagcaggccggggaggaggagaaggtgctgaaggagaaggagcagcagcagcagcagcagcagcagcagcagaagaagaagagggacaccaggaaaggaagaaggaagaaggatgtggatgatgatggagaggagaaggagctgatggagcggctgaagaagctgagccggggcttcaacctgccctaccaggatgccaggaagtgcctgggccgcttcggcctggagagccacgcccacaccatccagatctgcaagctgagcggcggccagaaggcccgggtggtgtttgctgagctggcctgccgggagccagatgtgctgatcctggatgagcccaccaacaacctggacatcgagagcattgatgccctgggggaggccatcaatgagtacaagggggccgtcatcgtggtgtcccatgatgcccggctcatcacagagaccaactgccagctgtgggtggtggaggagcagagcgtgtcccagattgatggagactttgaggactacaagcgggaggtgctggaggccctgggggaggtgatggtgtcccggccccgggagtag

SEQ ID NO: 38194 - DNA, 2424 bp, Artificial Sequence
  derived and/or modified sequence
atgcccaaggcccccaagcagcagccccccgagcccgagtggatcggggatggtgaatctactagtccatcagataaggtggtaaagaagggaaagaaggacaagaaaatcaagaaaactttctttgaggagttagcagtcgaagacaaacaggcgggagaggaggaaaaagtactgaaagaaaaagagcagcaacagcagcagcagcagcaacagcagaagaaaaagagggacacacggaagggcaggcgcaagaaagatgtcgacgatgatggtgaagagaaggagttgatggagcgactcaagaagctgtcagtgccaacgagtgacgaagaagatgaggtccccgcccccaaaccccgaggcggtaagaaaactaaaggaggtaacgtgtttgctgccctcattcaggaccagtctgaagaggaagaggaggaagagaaacatccccccaagccggcaaaaccggaaaaaaatcgcattaataaagcggtcagtgaggagcagcaacccgctctaaaaggcaagaaaggcaaagaagaaaaaagtaagggcaaagccaagcctcagaacaaatttgctgctcttgataatgaagaagaagataaagaggaggaaattatcaaggagaaggagcctccaaagcagggaaaagagaaagctaaaaaagccgagcaaatggaatatgaacgacaagtggcctctctaaaagccgccaacgcagcagagaacgacttctcagtttctcaggctgaaatgtcttctcggcaagctatgctggaaaatgcctcagacataaagctggagaaattctcaatttcggcccatggaaaggagcttttcgtcaacgccgatctttatatcgtggccggtaggagatatggtcttgtgggcccaaacggcaaagggaaaaccaccctcctcaaacacattgccaaccgagcactatctatcccaccgaatatcgacgtgttattgtgtgagcaagaggtcgtggcagacgaaacacccgctgttcaggccgtgctgagagctgatacaaagcgtctcaagctcctggaggaggagcgccgcctccagggacagctcgagcagggtgacgacacagctgcggagcgattagagaaagtctatgaagaactgcgggcgaccggcgccgctgctgcggaggccaaggctcggagaatcctggctggcctcggcttcgaccccgaaatgcagaatagacccacacagaaattttctggaggatggcgcatgcgggtttcactcgcacgggccctttttatggaacccacactgctgatgctggacgagcccaccaaccatttggatttgaacgctgtgatttggcttaataattatcttcagggctggagaaaaacactcctcattgtgagtcacgatcaggggttcctggatgacgtctgtactgacattatccacctcgatgcacagcgcctgcactattacagaggaaattacatgacattcaaaaagatgtaccagcaaaagcagaaagagttgctgaaacagtacgagaagcaggaaaagaagctgaaggagctgaaagccggcggtaaaagtaccaagcaagccgagaagcagacaaaagaagccttaacacgcaagcaacagaaatgcagacggaaaaatcaggacgaagagagtcaggaggcccctgaactcctcaaacgtcctaaggagtacacggttcggtttacgtttcccgaccccccacccctctcccctcccgtcttaggtctccatggggtcacattcggataccagggacaaaaacctctgttcaaaaacctggacttcggcattgatatggactcccgcatctgtatagtgggtccaaacggtgtggggaaatcgacgctgttgctgctgttaaccggaaaacttactcctacccatggtgagatgagaaagaaccaccgactcaagattggattttttaatcaacagtacgctgaacaactgagaatggaagaaacccccactgaatacctccaaagagggttcaacctgccttatcaggacgctagaaaatgtctgggcaggtttggtttggagtcacacgcacataccatccagatctgcaagctgtccggcggacagaaagccagagtggtgttcgcagagctcgcctgtcgggagcccgacgtactgatccttgacgagcccacaaacaatctggacattgagtctatcgatgccctgggagaagccataaatgaatataaaggggcagtcatcgtagtgagccacgacgcccgactgattaccgagacgaactgccaactatgggtagtggaggagcagagcgtcagtcagattgatggcgatttcgaggattacaaaagggaggtgctggaagcgctgggggaggttatggtctctcgccccagagaatag

SEQ ID NO: 38195 - DNA, 2424 bp, Artificial Sequence
  derived and/or modified sequence
atgcccaaggcccccaagcagcagccccccgagcccgagtggatcggagacggcgagtccaccagtccctcggataaggtggtcaagaaagggaagaaagataagaagattaaaaagaccttttttgaggagctggcagtggaggataagcaagccggtgaggaggagaaggtgctgaaagagaaagaacagcagcagcagcagcagcagcaacaacagaaaaaaaagcgcgatactaggaagggcagacgcaagaaggacgtggacgacgatggtgaggaaaaggaattaatggagcgactaaagaaactgtctgtaccaacctccgacgaggaggacgaagttccggccccaaagccccggggagggaaaaagaccaagggcggtaatgtttttgccgctttgatccaggaccagtctgaggaagaagaggaggaggaaaagcacccacccaaaccagctaagccagagaaaaaccggatcaataaggccgtcagcgaagagcagcagcccgcgttaaagggcaaaaagggcaaggaggaaaaatcaaaggggaaggcaaaaccacagaacaagtttgccgccctggacaatgaggaagaggacaaggaagaagagatcattaaggagaaggaaccacctaagcaaggcaaagagaaagccaaaaaggctgagcagatggaatacgaacgtcaggtggccagcctgaaggccgctaatgccgctgaaaatgattttagcgtgagtcaggccgaaatgagttcaaggcaagctatgctggaaaatgcatctgatatcaaattggagaaatttagtataagcgcgcatggaaaagagctctttgttaatgctgatttatacatcgtcgcaggtaggcgctacggccttgtggggccaaacgggaaaggaaagactaccctcctcaagcatattgccaatcgtgccctgtcaatcccacccaatattgacgtccttctgtgcgagcaggaagttgtggccgacgaaacaccggcagttcaggccgtgcttcgggcagataccaaaaggctaaaactgctagaagaggagagacggctgcaggggcaactggaacagggtgacgacacggccgccgaacgcttagagaaggtttatgaagagcttcgggctaccggagctgcggcagctgaggccaaagcaaggcggatcctggcagggttgggatttgatccagagatgcaaaacaggccaactcaaaaattttccggcggatggagaatgagagtttccctggctagggccctctttatggagccgacgctcctgatgctggacgagcctacaaaccacttagatctaaacgcggtaatttggctgaataactacctacaaggatggcggaaaactctgctaatcgtctctcacgatcaggggttcctagacgatgtttgtaccgacatcatccaccttgatgcgcagagactgcattactaccggggcaattatatgacctttaagaaaatgtatcaacagaaacagaaagaactgttgaaacaatacgagaaacaagagaaaaagctgaaagagctcaaagccgggggcaaaagcactaaacaggccgagaagcagaccaaggaagcgttaacgaggaagcagcagaaatgtcggaggaagaaccaagacgaagagagccaagaagctcccgaattgctgaaaaggccaaaggaatacacagtgagattcaccttcccagaccctccaccattgtctccacctgtattgggacttcatggcgtaacctttgggtatcagggccagaagcccctctttaagaatctggatttcgggatcgatatggattcccgaatctgtatcgttggaccaaacggggtcggcaagtcaactctcctactgctgttgaccggcaaactcacccctacacatggagagatgcggaagaatcacaggcttaagatcgggttctttaatcagcagtatgctgaacagctcagaatggaagagacgcctacagaatacctacagagagggttcaacctgccgtatcaggacgctcgtaaatgtctcgggcgatttggcctcgaaagtcatgcccatactatccagatctgtaaactctctggcggacagaaagcaagagtggtttttgctgaactggcctgcagggagccagacgtgctgattctggacgaaccgaccaacaatctggatatagagagtattgatgctctgggggaggcaatcaatgagtacaagggagctgtgattgtggtaagtcacgatgccaggttgataaccgagacaaattgccagctatgggtggtcgaggaacagagtgtgagccagatcgacggtgacttcgaggattacaagcgagaagtactcgaggctttgggggaagtgatggtgtctcgccccagagagtag

SEQ ID NO: 38196 - DNA, 717 bp, Artificial Sequence
  derived and/or modified sequence
atgcccaaggcccccaagcagcagccccccgagcccgagtggatcggagacggtgaatcaaccagcccttccgataaagtggttaagaagggtaagaaggacaagaaaatcaaaaagacattcttcgaggagctcgcagttgaggacaagcaagccggagaggaagagaaggtgctcaaggaaaaagagcagcagcagcagcagcagcagcaacagcagaaaaagaagcgcgacacccgtaagggacggcgcaagaaggacgtggacgatgacggtgaagaaaaagagctcatggagcgcctgaagaaactgagccgggggttcaatctcccataccaagacgcacgcaaatgcctggggcggttcggccttgaaagccacgcccataccatccagatttgcaagctttccgggggccagaaagccagagtcgtgtttgctgaactggcctgccgcgaaccggacgtcctgatactggacgagcctacaaataatctggacatcgagagtattgacgccctgggtgaggctataaacgagtataagggggccgtgattgtggtctcacacgatgcacgactgatcaccgagaccaattgtcagttatgggttgttgaggagcagtcagtgagccagatcgacggagactttgaggactacaagcgcgaggtcctggaagcgctgggggaagtgatggtctctcggcctcgggaatag

SEQ ID NO: 38197 - DNA, 2424 bp, Artificial Sequence
  derived and/or modified sequence
atgcccaaggcccccaagcagcagccccccgagcccgagtggatcggtgacggggaatcaacgagcccttccgataaggtggtaaagaagggcaagaaggataagaaaattaagaaaacatttttcgaggagctggccgtggaggataagcaggccggcgaggaggagaaggtcctgaaagaaaaggaacagcagcagcagcagcagcagcagcagcagaagaagaaaagggataccaggaagggtagacgcaagaaggacgttgacgacgacggagaagagaaggagctaatggaacgtctgaagaagctgtctgtgcctacaagcgacgaagaagacgaagtgcccgcaccaaagccacggggcggaaagaagacaaaaggcgggaatgtgtttgctgcactgattcaagatcagagcgaagaggaggaggaggaagagaagcacccgccaaagccagccaagcccgagaaaaatcgtataaacaaagctgtctcagaggaacagcaacccgctctgaagggtaagaaaggcaaggaagagaaatctaagggtaaagccaaaccccagaacaaattcgccgccctcgataatgaagaagaggacaaggaggaagaaattatcaaagaaaaggagccacccaaacaggggaaggagaaagcaaagaaagctgagcaaatggaatacgaacggcaggtcgcctctctgaaggcagctaacgcagctgagaatgatttctcagtgtcgcaggctgagatgtctagcagacaggcaatgctcgaaaacgcctctgatattaagctggaaaaattttcaataagtgcacacgggaaggaactcttcgtgaatgccgatctgtacattgtcgcaggcagaagatatggtctggtgggaccaaacggcaagggtaagactaccttactgaagcacatcgccaaccgcgccctttcaattccccctaatatagatgttctgctgtgtgagcaagaagtggtcgctgacgaaactcctgcggtgcaggccgtgctccgagccgacactaaacgactgaagctcctcgaagaagaaagacggctgcaaggccagctggaacagggcgacgataccgcagctgaaaggctggagaaggtgtacgaagagctgagagctactggcgcagcggctgccgaggctaaagctcgccggatcctggcaggcctcgggttcgaccccgaaatgcagaaccggcctacacagaaattttcaggaggctggagaatgagagtgagtctggcgcgagctttatttatggaacccactcttcttatgttagacgagccaactaaccacctcgatttgaacgcagtgatttggttgaataactatctgcagggttggagaaaaacacttctgatcgtgagccacgaccagggatttctggatgacgtatgcaccgacattatacatctggatgcccagcgcctgcactactatcgcggcaattacatgacctttaagaaaatgtaccaacagaaacagaaggaactgctgaagcagtacgaaaagcaggagaaaaagctcaaagaattgaaggccggtggaaaaagcactaagcaggccgaaaaacagacgaaagaagctctgacgagaaagcagcagaagtgtagacgcaaaaaccaggacgaagaatctcaggaggctcctgagttgctgaagaggcccaaggagtacactgtacggttcacatttcctgaccctccacctttaagccccccagtcctgggcttgcatggtgtcaccttcggctatcagggccaaaagcctctgttcaagaatttagactttggcatcgatatggatagcagaatatgcatcgttggcccgaacggcgtggggaaatcaaccctacttctgcttctcaccgggaagttgactcctacacacggcgaaatgaggaagaaccaccggctgaaaatcggcttctttaatcaacagtacgctgaacagcttcgcatggaggaaaccccaacggaatacctgcagcgggggttcaacttgccctaccaggacgccagaaaatgcctgggtcgctttggtctcgaatcacatgcccatacaatccagatttgcaagttgtctggaggacaaaaggccagagttgtatttgccgaattggcctgtagagaaccagatgtcctgatcctcgatgagcccaccaacaacctcgacattgagagtatcgatgccttgggggaagcaatcaacgagtacaaaggggccgtgatagtggtgtcacacgatgcaaggcttattacagagacaaactgccagttatgggtcgttgaagagcagagcgtgtcacagatcgacggcgattttgaagattacaaaagggaagtgttggaagcactcggagaggtgatggtctcgcgcccgagagagtag

SEQ ID NO: 38198 - DNA, 717 bp, Artificial Sequence
  derived and/or modified sequence
atgcccaaggcccccaagcagcagccccccgagcccgagtggatcggtgacggcgaatctaccagccccagcgacaaggtcgttaaaaaaggtaagaaagataagaaaatcaagaagactttctttgaagaactcgccgtcgaggacaaacaagctggggaagaggaaaaagtgttaaaggagaaggaacaacagcaacagcagcagcagcagcagcagaagaaaaagagagatacacgtaagggtagacgtaagaaagatgttgatgacgacggcgaagagaaggaactgatggaaagactgaagaagctgagccgcgggttcaatttgccctaccaggacgcacggaaatgcctggggcggttcggcctggaatcccatgcacatactatccaaatctgtaaactgtctggaggccagaaagctagagtcgtctttgccgagttagcgtgtcgggaacctgatgtcctgattctggatgaaccgactaacaatcttgatattgaatccatcgacgcactgggcgaggcaatcaacgaatacaaaggagcagtcatcgtggtcagccacgacgcaaggctgataaccgagaccaactgccagctgtgggtcgtggaggagcaaagtgtgtcccagatcgacggggacttcgaagactacaaacgggaagttctggaggctctgggagaagtgatggtgagtcggcctagggagtag

SEQ ID NO: 38199 - DNA, 2424 bp, Artificial Sequence
  derived and/or modified sequence
atgcccaaggcccccaagcagcagccccccgagcccgagtggatcggcgacggggagtcaactagcccaagtgacaaggtggtaaagaaagggaagaaggacaagaagattaagaagactttcttcgaggaactcgcagtggaagataaacaagctggagaggaagagaaggtcttgaaggagaaggagcaacagcagcagcagcagcagcagcagcagaagaaaaagagggacacgaggaaaggccgtcggaagaaggacgtcgacgacgacggcgaggagaaggagcttatggaaaggttaaagaagctcagcgtgccgaccagcgatgaagaggacgaggttcccgctcccaaacctcgcggcggcaaaaagactaaaggtgggaatgtttttgctgccctgattcaggatcagtctgaggaagaagaggaggaagagaagcacccccctaagcccgccaagccagagaaaaaccggatcaataaggcagtaagtgaggagcagcaacctgctctgaagggcaaaaaaggaaaggaggagaagagcaaggggaaagctaagccgcagaataagttcgcggcacttgataacgaagaagaggacaaagaagaggaaattataaaggagaaagaacctccaaaacagggaaaagaaaaggcaaagaaggctgaacagatggagtatgaaaggcaagtcgcttcattaaaggctgcgaacgctgccgagaacgatttctctgtctcacaggccgagatgtcgagccgacaggccatgttggagaacgcctcagatattaaactggaaaagtttagtatcagtgcccacgggaaggagctttttgtgaacgcagacctgtacatagtggccggcagacggtacgggctggtagggccaaatgggaaagggaaaaccaccctgctgaagcatattgccaatcgggctctatccattccaccaaacattgatgtgttactgtgtgaacaggaggtggttgcagatgaaacgccagcagttcaggctgtccttcgagcggataccaaaagactgaagctgctggaagaggagcggagactgcaaggacagctcgaacagggagatgataccgccgccgagcgcctcgagaaagtgtatgaagagctgcgcgcaactggggctgcagccgctgaggcaaaagcacgccggattctagccggcctagggtttgaccccgaaatgcagaaccgccccactcagaaattttcaggagggtggcgcatgagggtatcactggcaagagccctcttcatggaacccacacttctaatgctagacgagcccaccaatcacctggatcttaacgcagtcatttggctcaataactacctgcagggctggagaaagacactactcatcgtctcccacgatcagggatttttagatgatgtctgtaccgatattatccatctagacgctcagagattgcactactaccgaggcaattacatgaccttcaagaaaatgtatcaacagaaacagaaagaactactaaagcagtatgagaagcaggagaagaagctgaaagaactgaaggccggagggaagagcacaaaacaggcagaaaaacaaaccaaggaggcactcacgaggaagcagcagaagtgccgaagaaagaaccaggatgaagagtcccaagaagcacccgagctgctgaagaggcccaaggaatacacagttaggtttaccttcccagatccacctcccctcagtcctcctgtgttgggactccacggggtgacttttgggtaccagggacaaaaacctctgttcaagaacctcgatttcggcatcgacatggacagtaggatttgtatcgtggggcctaacggtgttggcaaatctactcttctgttactcctgaccggaaagctcactccaacgcacggcgagatgaggaaaaaccacaggctcaagatcgggtttttcaatcagcagtacgcggagcagcttcggatggaggagacgcctaccgaatatttgcagagaggtttcaacttgccatatcaggacgcccgaaagtgcctcggccgcttcgggcttgagagtcatgcacatactattcagatctgtaaactgtcaggaggacagaaggcacgcgtcgtcttcgcagaacttgcctgccgtgagcccgatgttctaattctcgacgagcccacgaacaatctggatatcgaatcaattgatgcgctgggcgaggccattaacgagtacaaaggcgctgtgatcgtcgttagccacgatgctcggctgatcactgaaacgaactgtcagctgtgggttgtggaagagcagagcgtttctcagatcgatggggacttcgaggactataagcgcgaggtcttagaggcactgggcgaggtgatggtgtcccgccctcgagagtag

SEQ ID NO: 38200 - DNA, 2424 bp, Artificial Sequence
  derived and/or modified sequence
atgcccaaggcccccaagcagcagccccccgagcccgagtggatcggggatggtgagtctacttctccaagcgacaaagtcgtaaagaaaggtaagaaagacaagaagatcaaaaaaacctttttcgaagaacttgctgtggaggacaagcaggctggagaggaggagaaagtcctgaaagaaaaagagcagcagcagcagcagcagcagcagcagcagaaaaagaagcgcgacactcgcaaaggacggcgaaagaaggacgttgatgacgacggcgaggaaaaagagctgatggagaggctgaaaaaactgagtgtacctaccagtgatgaagaagacgaggtgcccgcgcccaagccacgggggggcaaaaagactaaagggggaaacgttttcgcggcgttaatccaagatcagtcagaggaggaagaggaagaagagaagcatcctcccaaaccagcgaagcctgagaaaaataggattaataaggccgtgtcagaagagcaacaacctgctctgaaaggaaaaaagggtaaagaggaaaagtcaaaagggaaagccaagccgcagaataagtttgcagccctggacaatgaagaagaagacaaagaagaggagataattaaggaaaaggaacctcctaagcagggtaaggaaaaggcaaaaaaagctgagcagatggagtacgagcgacaggtagctagcctgaaggctgctaatgcagccgaaaacgattttagcgtgagccaagccgagatgtcctcccggcaggcaatgctggagaatgcttctgacattaaactggaaaaattttcgatttcagctcatggaaaggaacttttcgtgaatgccgacctgtatatcgttgcaggacggaggtatggactcgtgggccctaatgggaagggcaagaccaccttgttaaagcatatcgccaatagggcgctgtccattccgcctaatattgatgtgcttctctgtgagcaggaggtggtcgccgatgagaccccagctgtgcaggccgtccttcgcgccgacaccaagagactcaagcttttagaggaagaaaggcgactgcagggccaacttgagcagggcgatgacaccgcagccgaacgtctggagaaggtgtacgaggagctgcgcgctaccggcgccgccgccgctgaggccaaggcacgacgcatcctggcgggcctgggatttgacccggagatgcagaatagacccacgcaaaagttctcagggggatggcgaatgcgagtgagtcttgctcgggccttatttatggaacccactctattaatgctcgacgagccgactaatcacttggacctgaatgcggtaatttggctgaataactacttgcaagggtggcgcaagaccctgctgatcgtatctcacgatcaggggttcttagacgacgtgtgtacggatattattcacctggacgctcaacgcctccactactataggggcaactatatgacctttaagaagatgtatcagcagaagcagaaggagctcttgaaacaatatgagaagcaggagaagaaactgaaagaattgaaggccgggggcaaatccacgaaacaggccgagaagcagaccaaagaggccctgactagaaaacaacaaaaatgccggaggaagaatcaagacgaggaaagtcaggaagctcccgagctgcttaaacgtcccaaggagtacaccgtgcgatttaccttccccgatcccccaccactgtctcctccagttctcggactccacggggttacctttggatatcagggccagaaaccgctatttaagaacctggatttcggaattgatatggattcgcggatctgcattgtaggtccgaatggggttggcaagagtaccctgttattgcttttaaccggcaagttgactcccactcacggcgaaatgcgcaaaaatcataggctcaagattggtttcttcaatcagcagtacgccgagcaactgagaatggaagagaccccaaccgagtatcttcaacggggcttcaatctgccataccaggatgcccgcaaatgcttggggagattcggcctggaatcccacgcccacacgattcagatatgcaaactgagcgggggccagaaggctagagtcgtgttcgccgagctcgcttgcagagagcctgatgttcttatcttggacgagcctacgaacaacctcgacattgagagcattgacgcgttgggggaggcaataaatgaatataagggagcagtgattgtcgtatcccacgatgcacgtctgatcacagaaacgaattgccaattgtgggtggtggaggagcagtccgtgagccagatcgatggggattttgaggactacaaaagggaggtcctggaggcattgggcgaggtcatggtgtcaagaccgcgggaatag

SEQ ID NO: 38201 - DNA, 717 bp, Artificial Sequence
  derived and/or modified sequence
atgcccaaggcccccaagcagcagccccccgagcccgagtggatcggcgacggggaaagtacctctccaagcgacaaggttgtgaaaaagggcaagaaagataaaaaaattaaaaagaccttcttcgaggagcttgcagttgaagacaagcaggccggggaggaagagaaggtcctcaaggagaaagagcagcagcagcagcagcagcagcagcagcagaaaaaaaaaagggacacaaggaagggccggcgcaaaaaggatgtggacgacgacggggaggagaaagaacttatggagcggctcaagaaactctcccgaggctttaacctgccgtatcaggatgctagaaaatgcctgggtaggtttggcctggaatctcacgcacatacaatccagatttgcaagctcagtggcggacagaaggccagggtcgtttttgccgagctggcgtgtcgcgaacctgatgtactaatcctggatgagcccaccaacaacttggatatagagtccatcgacgccctgggcgaagctatcaatgagtataaaggggccgtgatagttgtatcacacgacgcaaggctcatcactgagacaaattgtcagctctgggtggtggaggaacagagcgtgagccagattgatggtgactttgaagactacaaaagggaggttctggaggcactgggagaggtgatggtaagccggcctagagaatag

SEQ ID NO: 38202 - DNA, 2424 bp, Artificial Sequence
  derived and/or modified sequence
atgcccaaggcccccaagcagcagccccccgagcccgagtggatcggggacggtgaaagcaccagcccatcagataaggtggtgaagaagggcaagaaggataagaagatcaagaagaccttcttcgaggaattggctgtggaagataagcaagctggggaggaagagaaggttctgaaagaaaaagagcagcagcagcaacaacagcagcagcagcaaaaaaaaaaaagagacacacgtaagggaaggcgcaaaaaggacgtggatgatgatggagaggaaaaagaactgatggaacgtctgaaaaaactctccgtgcccactagcgatgaagaggacgaagtgcccgctcctaagcctaggggggggaagaagaccaaagggggcaacgtgttcgcagccctgatacaagatcagtccgaggaagaagaggaagaggagaaacaccctccaaaacccgcaaagcccgaaaagaaccgcattaacaaagccgttagcgaagaacagcagcccgcattgaaaggtaagaaagggaaggaggagaagagtaagggcaaagccaaaccccagaacaaattcgccgccttggacaacgaagaggaagataaggaggaggaaatcataaaggagaaggagcctccaaaacaaggtaaagaaaaagccaagaaagccgagcagatggaatatgagcgccaggttgctagccttaaggctgccaatgcagctgagaatgacttttcagtgagccaggcggaaatgagctccagacaggcgatgctcgagaacgcctctgacatcaaattagagaagttctccatcagtgcacacggtaaagaactgttcgtgaacgccgacttatatattgtggctggtcggcggtatgggttggtcggaccgaatggtaagggaaagaccactttattaaagcacattgccaacagggcgctgtcaataccgccaaacattgacgtgctcttatgcgagcaggaagtagtggcagacgaaacaccggccgtgcaggccgtgctgagagccgatacgaagaggttaaaactgctggaagaggaacgccgtctgcaaggtcagcttgagcaaggtgatgacacagccgcagagaggctggaaaaggtgtatgaagagctgcgcgccaccggcgctgctgccgccgaagctaaggcacggcgtattctggcaggtctgggatttgatcccgagatgcaaaatagacccacccagaagttttctggcggctggcgaatgcgcgtatcactggcaagagccctgttcatggaacccacccttctcatgctggacgaaccaaccaaccatctcgacctgaatgcggtgatatggctgaataactatctccagggatggcgaaaaaccttgctgattgtgtcacatgatcagggtttcctcgacgacgtttgtaccgatatcatccaccttgacgctcaacggttacactattataggggcaactacatgaccttcaaaaaaatgtaccagcagaagcagaaagaactgctgaaacagtatgagaaacaggaaaagaagttgaaagaattgaaggccggaggcaaaagtacaaagcaggctgaaaagcaaaccaaagaggcactcacaaggaagcaacagaaatgcagacggaaaaatcaagacgaggaaagtcaggaagcacctgagcttttgaagagacccaaagaatatacagtgcgctttacattcccagatcctcctcccttgagtccgccagtactagggctccatggggtcacgtttgggtatcagggacagaaacctctttttaaaaacctcgatttcggcatcgacatggattcgcgaatttgcatcgtggggccaaatggagtcggaaaatcaacattgcttctgctcttgacaggcaagctaacccctactcatggggagatgcgaaagaatcacaggctgaaaattggcttctttaaccagcagtacgccgaacagctaagaatggaggaaacacctaccgagtacctccagcgagggtttaatctgccgtatcaagatgcccggaagtgtctgggcaggtttgggctagagagtcatgctcacaccatccagatctgcaaactgagcggtgggcaaaaggcaagggtcgtcttcgctgagttggcttgccgtgagccagacgtgctcatcctagatgagcctaccaataacctggacatagaatcaatcgacgccctgggcgaggccattaatgaatacaaaggtgccgtgattgttgtctcacacgatgcccgactcataaccgagaccaactgccagctctgggtagtggaagagcagtccgtttcacaaattgatggggactttgaggactataagcgggaagttctcgaagctctcggcgaagtgatggtttctagaccgcgggagtag

SEQ ID NO: 38203 - DNA, 2424 bp, Artificial Sequence
  derived and/or modified sequence
atgcccaaggcccccaagcagcagccccccgagcccgagtggatcggcgacggcgaatccacctctccctccgacaaggttgtgaaaaaaggcaagaaagacaagaaaatcaaaaaaacgtttttcgaggaattagcagtagaggacaagcaggcaggagaagaggagaaagtgctcaaggaaaaggaacagcagcaacagcagcagcagcagcagcagaagaaaaaaagagataccaggaagggacgccgcaagaaagacgtcgatgacgacggcgaggagaaggaactcatggaaagactaaagaaattatccgtacccacaagtgatgaagaggacgaagtcccagctcctaaaccaagaggtggtaaaaagaccaaaggcggtaatgtgtttgccgccctcatacaggaccagtccgaggaggaagaagaggaggaaaaacaccctcctaagcccgcaaaaccggaaaaaaataggattaacaaggcagtcagtgaagaacagcaaccagccttgaagggcaaaaaaggcaaggaggaaaagtcgaagggtaaagccaagccccagaacaaattcgccgcattagacaatgaggaggaggataaggaggaggaaatcataaaagaaaaggaaccacctaaacagggtaaggaaaaagctaaaaaagctgagcaaatggagtatgaaagacaagtcgcctcactgaaagccgctaatgcggctgagaacgactttagtgtgtctcaggccgagatgtcctctagacaggccatgcttgaaaatgctagtgacattaagctggaaaagtttagcatctcagctcacggcaaagagttgtttgtgaacgcagacttgtatatcgttgccggccgtagatacggtctcgtaggccctaacggaaaaggtaagaccacacttctcaagcatatagccaatagggccttaagcatccccccaaacattgacgtgctcctctgtgaacaggaggtcgtggctgacgagacgccagccgtccaggcagtgctcagggccgacacaaagcggctcaaactgctcgaagaggagaggcgactgcaaggtcagctagaacagggggacgataccgctgccgaacggttggagaaggtgtatgaggagttgcgggccaccggcgccgcggctgctgaggctaaagcacgtaggatcctcgcaggactgggttttgaccccgagatgcagaatagacccactcagaaattttctggtggatggcgcatgcgtgtatctcttgcgcgggccctgttcatggagccgactctcttgatgctggacgagccgacaaaccaccttgacctgaatgccgtgatctggctgaacaactatctccagggatggcgcaagacacttttgatcgtgagccacgaccagggcttcctcgacgacgtgtgcacagatatcattcatctggacgcccagaggctgcattattatcgaggcaattacatgaccttcaagaaaatgtaccagcaaaagcagaaggaattgctcaaacagtatgagaaacaagagaaaaaactgaaggagctcaaagcagggggcaagagcacgaaacaagccgaaaagcagaccaaagaagcactaacccggaagcaacagaagtgccgtcgaaaaaaccaagacgaggaaagtcaagaagcaccggaactgctgaagcgaccgaaggaatacacagtgaggttcactttccctgaccctcctcctttgagccctccggtgctcgggctccatggcgtcacctttggctatcaggggcagaaacccctctttaaaaatctggattttggtatcgacatggactcaaggatatgcattgtcggtcctaatggcgtcgggaaatccactctgttgctccttctgactggaaaactaacacccactcacggagagatgagaaagaaccaccgcctgaagatcggattcttcaaccagcagtacgcggagcagctcaggatggaggagaccccaacagagtacctacagagagggttcaatctgccttaccaagatgcccgaaagtgcctaggccgttttgggctcgaatcccacgctcacacaatccaaatctgcaagctgtctggcggtcagaaagccagggttgtgtttgcggaactcgcctgccgggagccagacgttctgattctggacgagcctacaaacaatttggatatcgagtctattgatgccctcggtgaggcaatcaacgaatacaaaggggctgtgattgtggtgtctcacgatgcacgcctgattacggagaccaactgccaattatgggttgtggaagaacaatccgtctcccagatcgacggggacttcgaggattacaagagagaggtgctggaggctctaggagaagtgatggtcagccggcctcgggaatag

SEQ ID NO: 38204 - DNA, 717 bp, Artificial Sequence
  derived and/or modified sequence
atgcccaaggcccccaagcagcagccccccgagcccgagtggatcggagatggcgaaagcaccagcccttctgacaaggtagttaagaagggcaaaaaggacaaaaaaatcaaaaaaacattttttgaggaactggcggttgaggataagcaggcaggcgaagaagaaaaggtgttaaaagagaaggagcagcagcagcagcagcagcaacagcagcagaagaaaaaacgtgatacacgcaaagggaggaggaagaaagatgtggacgacgacggggaggagaaagagctcatggaaaggctgaagaagctgtcacgtggtttcaatctgccctatcaagacgccagaaaatgtctgggccggtttgggctcgaatcacacgctcacaccatccagatctgcaaactctccggcggtcaaaaggcaagggttgtgtttgccgaactagcgtgccgagagccagatgtgcttattctcgatgaacctactaacaacctcgatattgagagcatcgatgccctgggggaggcaatcaacgaatacaagggcgcggtgattgtcgtgtctcacgatgcaaggctcattactgaaacaaactgccaattatgggtcgtggaagaacagagcgtgagtcagatagatggtgatttcgaagactacaaacgggaagtgctcgaagcgctgggcgaggtgatggtgtccaggcctagggaatag

SEQ ID NO: 38205 - DNA, 717 bp, Artificial Sequence
  derived and/or modified sequence
atgcccaaggcccccaagcagcagccccccgagcccgagtggatcggcgatggtgagagtacttcgccctctgataaagtggtgaagaagggaaagaaagataagaaaattaagaagaccttcttcgaagagctcgcggtggaagataagcaggccggcgaagaggaaaaagtcctcaaggagaaagagcagcaacagcaacagcagcagcaacagcagaagaaaaagcgcgacactcggaaaggtcgcagaaaaaaagacgtcgatgacgacggggaggagaaggaactcatggagcgattgaagaagttgagtcgggggtttaacttaccatatcaagatgctcggaaatgtcttgggcgctttggccttgagtcacacgctcataccatccagatttgcaagctgtcaggaggtcagaaggctagagtcgtatttgccgagttagcttgcagagaaccagacgtcttgatcctcgacgagcccacgaataatctggatattgagtccatagacgccctcggggaagctatcaacgagtacaagggtgctgtgattgtcgtgtcacatgacgctaggctaattaccgagaccaactgccagctttgggtcgtcgaagagcagagtgtttcccaaatcgacggcgatttcgaggattataagcgggaggtcttagaagccttaggcgaagtgatggtcagcaggccaagggaatag

SEQ ID NO: 38206 - DNA, 717 bp, Artificial Sequence
  derived and/or modified sequence
atgcccaaggcccccaagcagcagccccccgagcccgagtggatcggggatggagagtctaccagtccaagcgataaagtggtgaagaagggcaaaaaggacaagaagattaagaaaaccttctttgaggagttagccgtcgaagacaagcaggctggcgaagaagaaaaagtgcttaaagagaaggaacagcagcagcagcaacaacagcagcagcagaagaagaagcgcgatactagaaagggccgtaggaagaaagacgttgatgacgatggtgaagagaaagaactcatggagagactcaaaaaactgagtagaggcttcaatctgccctatcaggatgccaggaaatgcctgggcagatttggccttgaatctcatgctcatacgattcagatctgtaaactgtctggtggacaaaaggcccgtgtggtcttcgctgagctcgcctgccgggagccagatgtgctaattctcgatgagcctacaaacaatctggatatcgagagcattgatgcgttgggtgaggccataaacgagtataaaggcgcagttatcgtcgtgtctcacgacgcgcggctgatcacagagacgaactgtcagctatgggtagtggaagagcagtctgtcagccaaatcgacggcgatttcgaggactataagcgtgaagtactcgaagcactgggcgaggtaatggtgagccgccctcgggaatag

SEQ ID NO: 38207 - DNA, 2424 bp, Artificial Sequence
  derived and/or modified sequence
atgcccaaggctcctaagcaacagcctcccgagcccgagtggatcggagacggcgaaagtactagcccatcggataaagtggtaaagaaaggaaagaaggataagaaaatcaaaaaaactttcttcgaagaactggccgtagaggacaagcaagcgggagaagaagagaaagtcttgaaggagaaggagcagcaacaacaacagcaacaacagcaacagaagaaaaagcgggatacccgtaaaggcaggcgtaaaaaggacgtcgatgatgacggagaggaaaaggagctgatggagcgcctcaaaaagcttagcgtcccaacctcggacgaagaggatgaggtgccagctcccaagcccagaggcggaaaaaaaaccaagggtggtaatgtgttcgcggcactgattcaggaccagtctgaggaggaggaggaggaggaaaagcacccccctaaaccagccaaacccgaaaagaataggattaacaaggctgtcagtgaagaacagcagcccgctctgaaggggaaaaaagggaaagaggaaaaatctaagggaaaggcgaagccccagaataaatttgcagcgctcgataatgaggaggaagataaagaggaggagatcatcaaggagaaagaaccaccgaaacagggtaaggagaaagccaaaaaggccgaacagatggagtatgaaaggcaggtggcctcccttaaagctgctaatgctgctgaaaacgatttctctgtttctcaggcagaaatgtcctcccgtcaggcgatgttggagaacgccagcgacataaagcttgagaagttcagcatcagcgcacacggcaaggagctgtttgtgaatgccgacctttatatagtagccggaaggcggtacggcttagtgggtccgaatggcaaaggcaaaacgacattgctgaaacacatcgctaatcgggcactatctattcctccgaatatcgacgtgctactgtgcgaacaggaggtcgtagccgatgaaactccagccgttcaggccgtcttgcgggcagataccaaacgccttaagctacttgaggaggaacgtaggctgcaaggtcagctagaacagggagacgacactgcggctgagcgcctggagaaagtgtatgaagagctccgcgcaaccggagcggctgccgctgaggcaaaggctcggcgtattcttgcgggactcggctttgatcctgaaatgcagaaccgccctactcagaagttcagcggcggttggcgcatgcgcgtgtccctggcacgagcgctgttcatggaaccaacactgctaatgctggatgaaccaactaatcatttggaccttaacgctgtgatctggcttaataattatctgcaagggtggcgcaagactcttctgattgtgagtcacgaccagggcttcctggacgacgtttgtaccgacatcatacatctagacgcccagcggctgcattactataggggaaattatatgactttcaaaaagatgtaccagcagaaacagaaggagctgctcaagcagtatgagaagcaggagaaaaagctgaaagagctaaaggctggcggaaagagcacaaagcaagccgaaaaacaaacaaaggaggccctcacccgcaagcagcagaaatgtcgtagaaaaaaccaagatgaggaatcgcaggaggcgcctgaactcctcaagcgcccaaaagaatacactgttcgattcacattcccggacccaccacctctgtctccacctgtgctaggtctgcacggagtgacattcgggtatcaagggcagaagccactgtttaaaaatctggacttcggaattgatatggatagccgtatatgtatagtgggccctaacggtgtgggcaagtcaacactgttgctgctcctgacaggcaagctgacccctactcatggagagatgcgtaagaatcataggctaaagattggcttttttaaccaacagtatgccgaacaactgagaatggaagagacgcccactgagtacctacaacggggtttcaacctgccctatcaggatgcccgtaagtgcctgggtagattcggcctggagagccatgctcatactattcagatttgcaagctttccggtgggcagaaagcccgagtggtctttgccgagcttgcttgtcgagaacctgatgtactaattctggacgaaccaactaataacctggatatcgaatctatagacgctctcggcgaggccatcaacgagtacaaaggtgccgtgatcgtggtgtctcatgacgcccgactgatcaccgagactaactgtcagttgtgggtggtcgaggagcagagcgtatcgcagatcgacggagatttcgaggactataaaagagaggtgttggaagcactgggcgaggtcatggtgagtagacctagggagtag

SEQ ID NO: 38208 - DNA, 2424 bp, Artificial Sequence
  derived and/or modified sequence
atgcccaaagccccaaagcagcagcctccggaaccagagtggattggggatggagagtccacctccccttccgataaagtagttaagaagggcaaaaaagataaaaagatcaagaagactttctttgaggaactcgctgtcgaagataaacaggccggagaggaagaaaaggtcctgaaagagaaggaacagcagcagcagcaacagcagcagcagcagaagaaaaagagagatacgcgaaagggacgcagaaagaaagacgtagacgatgatggagaggagaaggaactcatggagcggcttaaaaaactcagcgtgccaacatcggacgaggaagatgaggtgcccgctcccaagcccagaggaggcaaaaagaccaaagggggaaacgtctttgctgctcttatacaggaccagagcgaagaagaagaggaagaggagaagcacccccctaaaccagccaagcccgagaagaacagaattaacaaagccgtgtctgaggaacaacaacccgcactcaagggaaaaaaaggtaaagaagagaagtccaagggtaaggcaaagccccagaataagttcgctgccttggataacgaggaagaggataaagaggaagaaattattaaggagaaggaacctcctaaacagggtaaagaaaaggccaaaaaagccgagcaaatggaatacgagagacaggtggcatctttaaaggcagctaacgccgcagagaacgatttttccgttagccaggccgagatgagctctagacaagctatgctcgagaatgcatccgacatcaaactggaaaagttctctatctctgcccatgggaaggaacttttcgttaatgcagacctgtacattgtggcaggacgacggtatggcttggtaggccctaatggtaagggtaaaactacattgctgaagcacatcgcgaatagagctctctccattccacccaacattgatgtattgctttgtgaacaggaagtggtggcagacgaaacgcctgcggtgcaggccgttcttcgggcagacactaagcggctgaaacttctggaggaagagagaagactgcagggccaactcgagcagggcgacgatacagctgccgagagactagagaaagtgtatgaagagctaagggctaccggtgctgctgccgcagaagcaaaggccaggcgaattctggctggactcgggttcgatcccgaaatgcagaatcgacccacccaaaaatttagcggcggatggagaatgagggtcagcctggcacgggctctctttatggaacccactcttttaatgcttgacgagcccacaaatcacctcgatctcaacgccgtgatctggttgaataattatctgcagggttggagaaagaccctgctcattgtttcacatgatcagggatttttagatgacgtatgtactgacatcattcacttggacgctcagaggctgcactactatcgtggaaattatatgactttcaaaaaaatgtaccagcaaaaacagaaagagttgttaaagcagtatgagaagcaggagaagaaactcaaggagttgaaggccggagggaaatcaacaaagcaggccgagaagcagacaaaggaagcattgacccggaagcagcagaaatgtagacgaaagaaccaagatgaagagtcccaggaagccccagagctgctcaagcgtcccaaagaatacactgtgcggtttaccttccccgacccgcctcccctgagccccccagtgttgggtcttcatggcgtcactttcggctatcaggggcagaaacccctgttcaagaacctcgacttcggaatcgatatggattctcggatttgcatcgtcggcccaaacggggttggcaaatctaccctcctactccttttgactggtaaattgactcccactcatggagagatgagaaagaatcatcgtctgaagattggattttttaatcagcagtatgcagaacagcttcggatggaggagacaccaactgagtatctgcaacgaggattcaatctgccatatcaggacgctcggaagtgcttagggcgatttggactagaatctcatgcccacactatacaaatatgcaagctctcaggaggccagaaagctcgggttgttttcgctgaactagcctgtagagagcccgacgtgctgattctagacgaaccgaccaacaacctggatatcgagtcaatcgatgcactcggggaggcaataaacgagtacaaaggagcagtgatcgttgtcagccacgacgcgcgactgattaccgagactaattgccaactgtgggtggtcgaagaacagtcagtttcccagatcgacggtgacttcgaggactacaaaagggaggttttagaagcactgggcgaggtgatggtgagccgtcctagggaatag

SEQ ID NO: 38209 - DNA, 717 bp, Artificial Sequence
  derived and/or modified sequence
atgcctaaggctcccaaacagcagcctcctgagcctgaatggatcggggacggcgagagcacttcaccgtccgacaaggtggtaaagaaaggtaaaaaggacaaaaagattaagaaaacctttttcgaggagctagccgtcgaagataagcaggcaggggaggaggagaaagtgttgaaggagaaagagcagcagcagcagcaacagcagcaacagcagaagaagaaacgggacacgaggaagggtcggaggaaaaaggatgtggacgatgatggcgaggagaaagaactcatggagcgtctcaagaagctgagtcggggatttaatctgccctaccaggatgcaagaaagtgtctcggacgctttggcctggaatctcatgcccacacgatccagatttgcaagcttagtggcggacagaaggcccgtgtggtctttgcagagctggcctgtcgtgagcctgacgtgctcatcttggatgagccaactaataacctcgatattgaatctattgatgcgctaggggaggccattaatgagtacaagggtgcagtcatcgtcgtaagccacgacgccaggctgattactgaaacgaactgccagttgtgggtggtggaggaacagagtgtgtcacagattgatggtgatttcgaggactacaagcgcgaagttcttgaggcactgggagaagtgatggtgagccgacctagggaatag

SEQ ID NO: 38210 - DNA, 2424 bp, Artificial Sequence
  derived and/or modified sequence
atgccaaaagcaccgaaacagcagcctcctgagccagagtggatcggtgacggagagtccacatctccaagcgacaaggtggtcaagaaaggcaaaaaggataaaaagattaagaagaccttcttcgaggaactggccgtggaagacaaacaggctggagaagaggaaaaagtgttaaaagaaaaagagcagcaacagcagcagcaacagcagcagcaaaagaagaaaagggacacacgtaaaggccgacgtaagaaagatgtggacgacgacggggaggaaaaggagctcatggagaggctgaaaaagctcagcgtccctaccagcgacgaagaggatgaggtgccggcacccaaacctagaggtggcaaaaagactaaggggggaaatgtgttcgctgcgctgatccaagatcaatcggaggaggaggaagaggaagagaaacacccgccaaaacccgctaagcccgagaagaaccgtatcaataaagccgtgtctgaggaacagcagccagccttgaaaggtaaaaaaggtaaggaagaaaaatccaaagggaaggccaagcctcaaaataaattcgcagctttagacaacgaggaggaagacaaagaggaggagatcatcaaggaaaaagagcccccaaaacagggtaaggagaaagctaagaaagcggagcagatggagtacgagcggcaggtcgcgagtctgaaggcagcaaacgccgcagaaaatgatttttcagtttcacaagctgagatgtcctctcgccaggccatgttggaaaatgcttcagatatcaagctagagaaattctcaattagcgcccacggaaaggaactgtttgtcaacgcggatttgtacatcgtggctggaaggcggtacggcctagtgggtccaaatggcaagggcaagaccacgctgttgaagcacatagcaaatcgggcactcagtattccacctaatatcgatgtgctgttatgtgaacaggaggttgtcgccgatgagacccccgctgttcaggctgttcttagggccgacacgaaaaggctgaagttgctggaggaggaaaggaggctgcaaggacagctggaacagggcgacgacacggccgctgagcgcctcgagaaagtctatgaagaactgcgtgcaaccggtgccgcagcagccgaggcgaaagcaaggagaattttagcgggtttaggctttgacccggagatgcagaaccgcccaacccagaaattcagcgggggttggaggatgcgagtttcactagccagggccctgttcatggagccgacactgttgatgctggacgagccgactaatcatctcgacctgaacgcagtaatttggctcaataactacctgcaagggtggcgaaagaccctgcttatagtttcccacgaccaggggtttctggacgatgtgtgtacagatattattcatctagacgcacagagactgcattactacagagggaattatatgacatttaaaaagatgtatcagcagaagcagaaggaactcctgaaacaatacgagaaacaggaaaagaaactgaaggaactcaaagcaggcggaaaatcgaccaaacaggccgaaaagcagacaaaggaggccctgacgagaaagcagcagaagtgccgccgtaaaaaccaagatgaggaaagccaagaagcccctgaactgctgaagaggccgaaggaatataccgttcggttcaccttccccgatccccctcctctgagtccccctgtgctcggtctacacggagtgaccttcggctaccagggacaaaaaccgctgttcaaaaatctagacttcggaatcgacatggactcgcggatctgcattgtagggccaaatggcgttggaaaaagtacactgctgctgttacttactgggaagctaactcccacacacggtgaaatgcgcaaaaaccacagattaaaaatcggcttcttcaatcaacagtatgctgagcaacttagaatggaggagactcctacagagtacctgcagagaggcttcaatctcccatatcaagacgccaggaagtgtttggggagattcggattggagagccacgctcatacaatccagatctgtaagctctctggaggtcagaaagctagggtcgttttcgccgagctggcctgtagagagcccgacgtcctgatcctagacgagccaacgaacaacttagatattgagagtatcgacgccctgggagaagccattaatgagtacaagggcgctgttatagtggtgagtcatgacgcgcgactaataacggagactaattgccagctttgggtggtagaggaacagtctgtttcccagatagacggagattttgaagattacaaacgcgaggtcctcgaagctctgggcgaggtgatggtaagtaggcctcgagagtag

SEQ ID NO: 38211 - DNA, 717 bp, Artificial Sequence
  derived and/or modified sequence
atgccaaaagcccctaagcaacagcctccagaacctgaatggatcggagacggggaatcgacaagcccatctgataaggttgtgaagaagggtaagaaggataaaaagattaagaagacattcttcgaggaactcgccgttgaagacaaacaggcgggagaggaggaaaaagtgttgaaggagaaggaacaacagcaacagcagcagcaacagcagcaaaaaaagaagagagacacacgcaaaggcaggcggaagaaagatgtggacgacgacggggaagaaaaagaactgatggagaggctgaaaaagctttctagaggcttcaacctgccgtatcaggacgcccgtaagtgtctcggaaggtttggtttagagagtcacgcacacacgatccagatatgcaaattatctggtggccaaaaagcgagggttgtgtttgcagagctagcttgtcgggaacccgacgtcttgattctcgacgagcctactaacaacctggatattgaatcaattgatgcactgggggaagcaattaacgagtataaaggggctgttatcgttgtgtctcatgatgcacgcctcatcactgagacaaattgccaactctgggtggttgaggagcagtccgtctcccagatagatggagatttcgaggattataagcgggaggtgttagaggcccttggggaggtgatggtgagccgcccacgcgagtag

SEQ ID NO: 38212 - DNA, 2424 bp, Artificial Sequence
  derived and/or modified sequence
atgcctaaggccccaaaacagcagccccctgagccagaatggatcggggacggagagtctacctccccatcagataaggtggtgaagaagggcaagaaagataagaagattaaaaagaccttcttcgaagaactcgccgtggaagataagcaggcaggcgaggaggagaaggtgcttaaggagaaggaacaacagcagcagcagcaacagcagcagcaaaaaaaaaaacgcgatacaagaaaaggtcggcgaaaaaaagatgtggatgacgacggagaagagaaggagctgatggagcgactgaagaaactgagtgtgccaacgtccgacgaagaagatgaggtccctgctcccaagccaagagggggtaagaaaaccaagggagggaatgtgtttgcggctcttatccaggaccagagtgaagaggaggaggaggaagagaagcacccgcctaagcctgcaaagccagaaaagaaccgaattaacaaggctgtttccgaagaacaacagccagccctgaagggaaaaaaagggaaggaagagaaatcaaaagggaaagcaaaaccccagaacaagtttgcagccctggacaatgaagaggaggataaagaagaagaaataatcaaagagaaggagccccctaagcagggtaaggagaaagcgaagaaggccgaacaaatggaatacgaacgacaggtggccagtctgaaggccgcaaatgctgcagagaatgatttttcagtctcccaagcggaaatgagctctcgtcaagcaatgctagagaatgcttcagatattaagctcgaaaagttttccatctcagcacacggcaaggaactgttcgtcaacgccgacctgtacatcgtggccggtagacgttacggcctcgtgggccctaacggaaaaggcaagaccaccctcctgaaacatattgcgaacagagccctgtccattccaccaaatattgatgtgctgctgtgcgaacaggaggttgtggccgacgagacccctgccgtgcaagccgttctgcgcgctgatacgaagcgtctgaagctccttgaggaggaacggaggcttcaggggcagcttgaacagggtgatgataccgcagcggaacgattggagaaggtgtacgaggagctgagagcaactggggctgccgctgccgaggccaaagccaggaggattcttgccggtcttggatttgacccagaaatgcagaatagacccacacaaaagttttccggcggatggcgcatgcgagtgtcactggcacgtgctcttttcatggaaccaacactcttgatgttagatgagcctaccaaccatctcgatcttaatgctgtgatctggctgaataactatctgcagggatggcggaaaactctgctgattgtctcacacgaccaaggtttcttggatgacgtctgtacggacataatccacctggacgcacagcggcttcactactaccgcggaaactacatgacttttaagaagatgtaccagcagaagcaaaaagaactgctcaagcagtacgaaaaacaggaaaagaagctcaaggagttgaaggcaggcggaaagtccaccaagcaggccgaaaaacagacgaaggaagcattgacccggaaacagcagaaatgccggaggaagaaccaggacgaagaatctcaggaagcacccgaactcttgaagcgccctaaggagtacactgtccgattcacattcccagacccccctcccctgagtccacctgtccttggcctgcacggagtgacttttggataccaaggccagaagccactcttcaagaatcttgactttggtattgatatggatagcaggatctgcattgtaggcccaaacggtgttggaaagtccaccctgctgctgttgctgacaggaaagctaacgccaactcacggtgagatgcggaagaatcatcgcttgaagataggcttcttcaaccaacaatacgccgagcagttacgtatggaggagacacccacagagtatctgcagcgcggatttaatctgccgtatcaagatgctcggaaatgtctggggagatttgggctggaatcgcatgcccatactatacaaatctgcaagttaagtggcggacagaaagccagggtagtcttcgcagagctcgcctgccgggagcccgacgtgctcattctcgatgagccgaccaataacctcgacattgaatcaatagacgcgctcggggaggccattaacgagtacaaaggagccgtgattgtggtgtcccacgatgcaagactcattaccgagacaaattgccagctttgggttgtggaggaacagtcagtctcccaaatagacggggattttgaggactacaagcgtgaggttttggaagcactcggagaagtcatggttagtcggccaagagaatag

SEQ ID NO: 38213 - DNA, 2424 bp, Artificial Sequence
  derived and/or modified sequence
atgcctaaggccccaaaacaacaaccgccagaacccgagtggataggggacggtgaatctacctctccaagcgataaggtcgttaagaaggggaaaaaagacaaaaagatcaaaaaaacgttcttcgaggagctggccgtggaggacaaacaggctggagaagaagagaaggtgctgaaggagaaagagcaacagcagcaacaacaacaacagcaacagaagaaaaagagggacacacggaagggcagacggaagaaggatgtggacgacgatggagaggaaaaggaactgatggaaagactaaagaagctctctgtccccactagcgacgaagaggatgaagtaccggctcctaaacccagaggcggaaagaagactaaggggggaaacgtgtttgccgctttgatacaggatcagtctgaggaggaggaggaagaggagaagcacccccctaagcccgcaaagccagaaaagaatagaattaacaaggccgtgtccgaggagcaacaaccagctctgaagggcaaaaaaggcaaagaagaaaagtccaaaggtaaagcaaaaccacagaacaagtttgcagccctcgataatgaggaggaagataaggaagaggagattatcaaggaaaaagagccccctaagcaggggaaagaaaaagctaaaaaagcggagcagatggagtacgagcgtcaggtggcatcacttaaggcagctaacgcagcagagaatgacttcagtgtgtcccaggctgaaatgtccagcaggcaagctatgctcgagaatgcatccgacattaagttggaaaaattcagtataagtgcccatggtaaggagctctttgtgaatgccgatctctacatagtcgccggacgcagatatggtcttgtggggccaaatgggaaggggaaaaccaccctgctcaagcacatcgcgaatagggccttgtcgattccccctaatatcgatgtgcttctgtgcgaacaggaagttgtggcagatgaaacacccgcagtgcaggcagtcctccgcgctgacaccaagcgcctcaaactcctagaagaagagaggaggttgcaggggcaactggaacagggcgacgatactgctgctgagcggctggagaaggtgtacgaggagctgagagcaacaggagcggctgccgctgaggcaaaggcccgacggatactggccggattaggattcgacccagaaatgcagaatcgtccaacacaaaaattttctggtggttggagaatgagagtcagcctggcacgtgccctgtttatggaaccgacacttctgatgctcgatgagcccaccaaccatctggacctcaatgccgtcatctggctcaataattacctgcaggggtggagaaagacactcctgatagttagtcatgatcagggtttcctcgacgatgtgtgcacagatataatccatttggacgcccagaggctccactactaccgaggaaactacatgacgtttaaaaaaatgtaccagcagaaacaaaaggagttgcttaaacagtatgagaagcaggagaagaagttgaaagagctgaaagcgggtggaaagtctaccaagcaggcagagaaacagacgaaggaggccttaactcgtaagcagcaaaaatgtaggcggaaaaatcaagacgaagagtcccaagaggctccggagctgttgaagcgccctaaagaatataccgttagatttacattccccgatccacctcctctttcccctccagtgctcggcctgcatggggtgaccttcggataccaggggcagaaaccccttttcaagaatctggatttcggcatagacatggacagccgcatttgcatagtcggacctaatggagtgggcaagtcaacactgctgctgctcctgactggtaaactaacaccaacccatggagaaatgaggaagaaccacaggctgaagattggtttctttaatcagcaatacgcggagcagctgaggatggaggaaactcccactgagtacctgcagcggggattcaatttgccgtatcaagatgccagaaagtgcctgggaagattcggtctcgaaagccacgcccatactatacagatctgtaaactgagtggtggacagaaggcccgtgttgtgttcgctgaattagcctgtcgcgagccagatgtcttgattctggatgagcccacaaacaatctcgacatcgaatctattgacgctctgggcgaagccattaatgaatataagggcgctgtgattgttgtgagccacgacgccagactgattaccgagacgaattgccagttatgggtagttgaagagcagtccgtctcccagatagacggcgatttcgaggattacaagcgagaggtgctcgaagcactgggggaagtgatggtcagcagacctcgggaatag

SEQ ID NO: 38214 - DNA, 717 bp, Artificial Sequence
  derived and/or modified sequence
atgcccaaggctcctaaacagcagccacccgagccggagtggatcggggacggtgagagcacatcaccctcagataaggtcgtcaaaaagggcaagaaggacaaaaagattaaaaagacattcttcgaggaactcgcagtcgaggacaagcaggccggagaagaagaaaaggtattgaaggaaaaggagcagcaacagcagcagcagcagcagcagcagaaaaagaagcgagataccaggaaagggaggaggaagaaggacgtggacgacgatggggaagaaaaagagctgatggaacgcctcaagaagctttcccgagggtttaatctgccctatcaggatgcccgaaaatgtcttggccgtttcgggctggagtcacacgcgcataccatacagatttgcaaactcagcggaggccagaaggctcgagtggtgttcgccgaactggcctgtagggagccagacgtgctgattcttgacgagcctaccaataatctcgacatcgagtccattgacgctctgggagaggccattaacgagtataaaggcgctgtaatcgtagttagccacgacgcaaggctcattacggagactaattgtcagttgtgggtggtggaagagcagagcgtgtcacagatagatggtgattttgaggattacaagcgagaggtgctcgaggcgctgggggaagtgatggtgagtcggcctcgggaatag

SEQ ID NO: 38215 - DNA, 2424 bp, Artificial Sequence
  derived and/or modified sequence
atgcctaaagctccaaagcaacaacctcctgaacctgaatggatcggagatggtgaatctacatctccctccgataaggttgtgaagaaaggaaaaaaagacaaaaaaatcaaaaaaacattttttgaggagctcgcagtggaagacaaacaagctggcgaagaggaaaaagtactgaaggaaaaagaacagcagcagcagcaacagcagcagcagcagaagaagaaacgggacacccggaaaggcaggagaaaaaaagacgtggacgacgacggagaagaaaaagaattaatggaaaggttaaaaaagctgtcagtgcctaccagcgatgaggaagatgaggtgcccgctccaaagccgcgtgggggaaagaagactaagggcggtaatgtattcgccgcactgatccaggaccagagcgaagaggaggaagaagaagagaagcatcccccaaagccagcaaagcctgaaaagaaccggatcaataaggctgtgtctgaggaacagcagccagcactgaagggcaaaaagggtaaagaagagaagagcaagggcaaggccaagccacagaacaaatttgccgctttggataatgaggaagaggacaaagaagaagaaatcattaaggagaaagaacctccgaagcagggaaaagaaaaagccaagaaagccgaacagatggaatatgagcggcaggttgcctcccttaaagccgctaacgccgctgagaatgacttcagcgtctcccaggccgaaatgagctccagacaagctatgctggagaacgctagcgacattaaactggaaaagttctcaattagcgcacacggcaaggaactgtttgtgaatgccgacctctacatagttgctggccgaagatacgggcttgtaggacctaacggcaaaggaaagacgacactcctcaagcacattgccaatagagcgctgagtatcccccctaatattgatgtactcctgtgcgaacaggaggttgttgcggatgagacccctgccgttcaggctgtccttcgagctgacactaaacgcttaaagctgctcgaggaggagaggcggttgcaggggcaattagaacaaggcgatgataccgccgctgagcggctggagaaggtatatgaggagttaagagctaccggagctgccgctgcggaagccaaggccaggagaatcctggccggacttggctttgacccggaaatgcagaaccgaccaacacagaaattcagtggcggttggaggatgcgcgtgagcctcgcccgagccttgttcatggagccgactcttctaatgcttgatgaacccaccaaccatttagatcttaacgcagtgatctggctgaacaattatttgcaaggttggcggaagaccctccttattgtttcgcacgatcagggctttctggacgacgtatgcactgatatcatccatctggacgctcagaggttacattactacagagggaactacatgacattcaagaaaatgtaccaacaaaagcagaaagagctgctcaagcagtatgagaaacaggagaaaaaattgaaggaactgaaggcaggagggaagagcacaaaacaggcggagaaacagacaaaagaggcactgacccgcaaacagcagaagtgtcgtcggaaaaaccaggacgaggagagtcaggaggcgccagagttactcaagcgccctaaggaatacaccgttcgattcacatttccagatcccccaccgctgagcccaccggttctgggcttacacggcgtcacatttgggtaccagggccagaagcccctgttcaagaatcttgacttcgggatcgatatggactcacgtatctgcattgtcggaccaaacggggtgggtaagagcaccctgttgttgctattgaccggaaagctgacccccacacatggagagatgaggaagaatcataggctgaagataggtttcttcaaccagcagtatgccgaacagctccgaatggaagaaacaccgactgagtatcttcagcgcggttttaacctcccctatcaggatgccaggaagtgtctgggcagattcggattggagtcccacgctcatactatacagatttgtaagctctcaggtggccagaaagctagagtcgtttttgcagagctggcttgccgggagccggacgttctgattctggacgagccgacgaataatctggatatcgaatccattgacgcattgggcgaggccatcaatgaatataaaggggcagttatagtagtgtcacatgatgcccgactgatcaccgagactaactgtcagttatgggtggtcgaagagcagtctgtcagccagattgatggcgatttcgaagattacaaacgggaagtgctcgaagccctcggggaagtaatggtgagtcggcctagggaatag

SEQ ID NO: 38216 - DNA, 2424 bp, Artificial Sequence
  derived and/or modified sequence
atgcctaaagccccaaaacaacagcctcccgagcccgaatggatcggagatggagagtccacctccccatccgacaaagtcgtgaagaagggaaagaaggacaagaaaattaaaaaaactttctttgaagaactcgctgtggaggacaaacaggcaggggaggaagagaaagtcttgaaggagaaggagcagcaacagcagcaacagcaacagcaacaaaagaagaaacgtgacacgcgaaagggacggcgaaaaaaggatgtagacgacgatggagaagaaaaggagctgatggaacggcttaaaaagctgagcgttccaaccagcgatgaggaagatgaggttccagcacccaaacctaggggagggaagaagacaaaaggcggaaatgtgttcgcagcactcatccaggaccaatcagaggaagaagaagaggaagaaaagcaccctcctaagcctgcgaagcccgaaaaaaaccgcataaacaaagccgtgagcgaggagcagcagcctgctctgaaaggtaagaagggcaaggaggaaaaaagtaaaggcaaagccaagccccagaataaattcgcggctcttgacaacgaagaagaggacaaagaggaggaaatcatcaaggagaaggaaccacccaagcagggtaaagaaaaagccaaaaaggcagaacagatggagtacgaacggcaagtggctagtctgaaagccgcaaacgccgcagaaaacgatttctctgtctcccaggccgagatgtcatcacggcaggctatgctggagaatgcgtccgatataaagctcgaaaagtttagcatttccgcgcatgggaaggaactctttgtcaacgcagacttgtatatcgttgccggaaggaggtatggcctggtcggcccaaacggaaaagggaagaccaccctgttgaagcatatcgctaatagggctctgtcaatacccccaaatattgacgtgctcttatgcgaacaggaggtcgtggcggatgagactcccgcagtgcaggcagtgctgcgggcagacacaaagcgattgaagctgttggaggaagagagaaggttgcagggccagttagaacagggggacgacactgccgctgagaggctcgagaaagtctatgaggagcttcgggctacgggggcagcagccgcagaggcaaaggctagaagaatcctagcagggctgggctttgatcctgagatgcagaacaggccaactcagaaattctctggaggctggcgtatgcgcgtgtctctcgccagggcactgtttatggaacctaccctgttgatgctggatgagcccactaaccatcttgacctgaacgcagtcatctggctgaataattatctgcagggctggaggaagaccttactgatcgtgtcacatgaccagggattcctggacgacgtctgcacagatatcatacaccttgatgctcaacgattgcactactaccgaggaaactatatgactttcaaaaaaatgtatcagcagaaacaaaaggaactgctcaagcagtacgagaagcaagaaaagaaattgaaagagctcaaagcaggaggcaagtcgactaagcaggctgaaaaacagactaaagaagccctcactaggaagcaacaaaaatgtagacgcaagaatcaggacgaagagtcacaggaggcccctgaactcctgaagcgaccgaaggaatatacggtccggttcacctttcctgacccaccccctttgtcccctcctgtcttgggactccatggtgtcacattcggctatcagggccagaagccactgttcaagaatctggattttggcatcgacatggacagtcgaatttgcatagttgggcctaatggggtgggaaaaagcacgctgctgctgctgctcaccgggaaactgacccccactcacggagagatgcggaagaatcatcgtctgaaaattggatttttcaatcaacagtatgctgaacagctgcgcatggaagagacacccacagagtacttgcagaggggcttcaatctcccataccaggatgcgcgtaaatgcctaggtagattcgggcttgaaagccacgctcataccattcagatctgtaagttgagcgggggacagaaggctcgcgtcgttttcgcagaattagcttgccgggaacctgatgtgctcatcttggacgagccaactaataacttagacatcgagtccatagacgcactcggtgaagccataaacgagtataaaggtgccgtaatagtcgtatcacatgatgcaaggctgattacagaaactaattgccaactttgggtagtggaggaacagagcgtctcacagatcgacggcgatttcgaagactacaaacgtgaagtgctggaggccctaggcgaggttatggtttcaagaccaagagaatag

SEQ ID NO: 38217 - DNA, 717 bp, Artificial Sequence
  derived and/or modified sequence
atgcccaaagccccaaagcagcaaccgccagaacccgagtggataggagacggggaatccaccagtccttctgataaggtcgtgaagaagggcaaaaaggacaaaaaaatcaaaaaaacattctttgaagagctcgcagtcgaggataaacaggctggagaggaggaaaaggtcctgaaggagaaggagcagcaacaacagcagcaacaacaacagcagaaaaagaagcgagatacacgcaaaggaaggcgcaagaaagacgtcgacgatgacggcgaggaaaaagaactgatggagcgtctgaaaaaactgagtagaggcttcaaccttccctatcaggacgccagaaaatgcctgggtcggtttggattggagtctcatgcccacacaattcagatatgcaaactatccggcggtcagaaagctagagtagtgttcgctgaactcgcatgtagggaacccgacgtgttgatattggacgagcccaccaacaatctggatatcgagtccatcgacgccctgggcgaggccatcaacgaatacaagggagccgtgatcgttgtttcgcacgatgcgaggctgatcactgagacgaactgccagctgtgggtcgtggaggaacagtctgtatctcagattgacggtgattttgaggactacaagcgcgaagtcttggaggccctcggggaagtcatggtcagccgccctagggagtag

SEQ ID NO: 38218 - DNA, 717 bp, Artificial Sequence
  derived and/or modified sequence
atgccaaaggctcccaagcaacagccgcctgagccagaatggataggagatggtgaaagtaccagtccctcagacaaggtggtgaagaaggggaaaaaggacaaaaagatcaagaagaccttctttgaagagctcgccgtggaggataagcaagccggagaggaagagaaggtgttaaaagagaaagagcagcagcagcagcagcagcagcaacagcagaagaaaaagagagatacgagaaaaggcagacggaagaaggatgtggacgatgacggagaggaaaaggagttaatggagaggttaaaaaaactgtctagggggttcaatctcccatatcaagatgccagaaagtgtctggggcgattcgggctggaaagtcacgctcataccatccaaatctgcaagctgagcgggggacagaaggcacgggtcgtgttcgcggagctagcttgccgtgaaccagatgtgctcatccttgacgagcctaccaacaacttggatatcgagtcgattgatgcgctgggagaggccatcaatgagtacaaaggtgctgtgattgttgtgagtcatgacgctaggctgataacggaaacaaactgtcagctttgggtcgtggaggagcaaagtgtgtcccaaattgatggagactttgaagattacaaacgtgaggtcctggaagctctgggtgaagttatggtcagtaggcctcgcgagtag

SEQ ID NO: 38219 - DNA, 717 bp, Artificial Sequence
  derived and/or modified sequence
atgccgaaggcaccgaagcagcagcctccagaacctgagtggataggagatggtgaaagcactagccccagcgataaagtggtgaagaaggggaagaaagataaaaaaataaaaaaaaccttttttgaggagctcgcagtggaagacaagcaggccggtgaggaggagaaggtgctgaaggaaaaagagcagcagcaacagcagcaacagcagcagcagaagaaaaaaagggatacaagaaagggcaggagaaagaaagatgttgacgatgatggcgaagaaaaggaactgatggaacgcttaaaaaagctctccagagggtttaacctaccctatcaggacgccaggaagtgtttaggaagatttggtcttgagagccacgcccacactatccagatctgcaagctctcaggcggacagaaggcgagggttgtgtttgctgagctggcatgtcgcgagcccgacgtgctgattttggacgaaccaactaacaatctggatatcgagtccatcgacgctctcggggaggctattaacgaatacaaaggagctgtaattgtcgtgtctcacgatgccaggctcataacagaaaccaactgtcagctatgggtcgtcgaggaacagtcagtgtctcaaatagatggggacttcgaagattacaaaagagaggtgctcgaggcactcggcgaagttatggtcagcaggcctagagagtag

SEQ ID NO: 38220 - DNA, 3131 bp, Artificial Sequence
  derived and/or modified sequence
gcgccagcttggagagccagccccatcggggttccccgccgccggaagcggaaatagcaccgggcgccgccacagtagctgtaactgccaccgcgatgccgaaggcgcccaagcagcagccgccggagcccgagtggatcggggacggagagagcacgagcccatcagacaaagtggtgaagaaagggaagaaggacaagaagatcaaaaaaacgttctttgaagagctggcagtagaagataaacaggctggggaagaagagaaagtgctcaaggagaaggagcagcagcagcagcaacagcaacagcagcaaaaaaaaaagcgagatacccgaaaaggcaggcggaagaaggatgtggatgatgatggagaagagaaagagctcatggagcgtcttaagaagctctcagtgccaaccagtgatgaggaggatgaagtacccgccccaaaaccccgcggagggaagaaaaccaagggtggtaatgtttttgcagccctgattcaggatcagagtgaggaagaggaggaggaagaaaaacatcctcctaagcctgccaagccggagaagaatcggatcaataaggccgtatctgaggaacagcagcctgcactcaagggcaaaaagggaaaggaagagaagtcaaaagggaaggctaagcctcaaaataaattcgctgctctggacaatgaagaggaggataaagaagaagaaattataaaggaaaaggagcctcccaaacaagggaaggagaaggccaagaaggcagagcagatggagtatgagcgccaagtggcttcattaaaagcagccaatgcagctgaaaatgacttctccgtgtcccaggcggagatgtcctcccgccaagccatgttagaaaatgcatctgacatcaagctggagaagttcagcatctccgctcatggcaaggagctgttcgtcaatgcagacctgtacattgtagccggccgccgctacgggctggtaggacccaatggcaagggcaagaccacactcctcaagcacattgccaaccgagccctgagcatccctcccaacattgatgtgttgctgtgtgagcaggaggtggtagcagatgagacaccagcagtccaggctgttcttcgagctgacaccaagcgattgaagctgctggaagaggagcggcggcttcagggacagctggaacaaggggatgacacagctgctgagaggctagagaaggtgtatgaggaattgcgggccactggggcggcagctgcagaggccaaagcacggcggatcctggctggcctgggctttgaccctgaaatgcagaatcgacccacacagaagttctcagggggctggcgcatgcgtgtctccctggccagggcactgttcatggagcccacactgctgatgctggatgagcccaccaaccacctggacctcaacgctgtcatctggcttaataactacctccagggctggcggaagaccttgctgatcgtctcccatgaccagggcttcttggatgatgtctgcactgatatcatccacctcgatgcccagcggctccactactataggggcaattacatgaccttcaaaaagatgtaccagcagaagcagaaagaactgctgaaacagtatgagaagcaagagaaaaagctgaaggagctgaaggcaggcgggaagtccaccaagcaggcggaaaaacaaacgaaggaagccctgactcggaagcagcagaaatgccgacggaaaaaccaagatgaggaatcccaggaggcccctgagctcctgaagcgccctaaggagtacactgtgcgcttcacttttccagaccccccaccactcagccctccagtgctgggtctgcatggtgtgacattcggctaccagggacagaaaccactctttaagaacttggattttggcatcgacatggattcaaggatttgcattgtgggccctaatggtgtggggaagagtacgctactcctgctgctgactggcaagctgacaccgacccatggggaaatgagaaagaaccaccggctgaaaattggcttcttcaaccagcagtatgcagagcagctgcgcatggaggagacgcccactgagtacctgcagcggggcttcaacctgccctaccaggatgcccgcaagtgcctgggccgcttcggcctggagagtcacgcccacaccatccagatctgcaaactctctggtggtcagaaggcgcgagttgtgtttgctgagctggcctgtcgggaacctgatgtcctcatcttggacgagccaaccaataacctggacatagagtctattgatgctctaggggaggccatcaatgaatacaagggtgctgtgatcgttgtcagccatgatgcccgactcatcacagaaaccaattgccagctgtgggtggtggaggagcagagtgttagccaaatcgatggtgactttgaagactacaagcgggaggtgttggaggccctgggtgaagtcatggtcagccggccccgagagtgagctttccttcccagaagtctcccgagagacatatttgtgtggcctagaagtcctctgtggtctcccctcctctgaagactgcctctggcctgcagctgacctggcaaccattcaggcacatgaaggtggagtgtgaccttgatgtgaccgggatcccactctgattgcatccatttctctgaaagacttgtttgttctgcttctcttcatataactgagctggccttatccttggcatccccctaaacaaacaagaggtgaccaccttattgtgaggttccatccagccaagtttatgtggcctattgtctcaggactctcatcactcagaagcctgcctctgatttaccctacagcttcaggcccagctgccccccagtctttgggtggtgctgttcttttctggtggatttaatgctgactcactggtacaaacagctgttgaagctcagagctggaggtgagcttctgaggcctttgccattatccagcccaagatttggtgcctgcagcctcttgtctggttgaggacttggggcaggaaaggaatgctgctgaacttgaatttccctttacaaggggaagaaataaaggaaaggagttgctgccgac

SEQ ID NO: 38221 - DNA, 3250 bp, Artificial Sequence
  derived and/or modified sequence
gcgccagcttggagagccagccccatcggggttccccgccgccggaagcggaaatagcaccgggcgccgccacagtagctgtaactgccaccgcgatgccgaaggcgcccaagcagcagccgccggagcccgagtggatcggggacggagagagcacgagcccatcagacaaagtggtgaagaaagggaagaaggacaagaagatcaaaaaaacgttctttgaagagctggcagtagaagataaacaggctggggaagaagagaaagtgctcaaggagaaggagcagcagcagcagcaacagcaacagcagcaaaaaaaaaagcgagatacccgaaaaggcaggcggaagaaggatgtggatgatgatggagaagagaaagagctcatggagcgtcttaagaagctctcagtgccaaccagtgatgaggaggatgaagtacccgccccaaaaccccgcggagggaagaaaaccaagggtggtaatgtttttgcagccctgattcaggatcagagtgaggaagaggaggaggaagaaaaacatcctcctaagcctgccaagccggagaagaatcggatcaataaggccgtatctgaggaacagcagcctgcactcaagggcaaaaagggaaaggaagagaagtcaaaagggaaggctaagcctcaaaataaattcgctgctctggacaatgaagaggaggataaagaagaagaaattataaaggaaaaggagcctcccaaacaagggaaggagaaggccaagaaggcagagcagatggagtatgagcgccaagtggcttcattaaaagcagccaatgcagctgaaaatgacttctccgtgtcccaggcggagatgtcctcccgccaagccatgttagaaaatgcatctgacatcaagctggagaagttcagcatctccgctcatggcaaggagctgttcgtcaatgcagacctgtacattgtagccggccgccgctacgggctggtaggacccaatggcaagggcaagaccacactcctcaagcacattgccaaccgagccctgagcatccctcccaacattgatgtgttgctgtgtgagcaggaggtggtagcagatgagacaccagcagtccaggctgttcttcgagctgacaccaagcgattgaagctgctggaagaggagcggcggcttcagggacagctggaacaaggggatgacacagctgctgagaggctagagaaggtgtatgaggaattgcgggccactggggcggcagctgcagaggccaaagcacggcggatcctggctggcctgggctttgaccctgaaatgcagaatcgacccacacagaagttctcagggggctggcgcatgcgtgtctccctggccagggcactgttcatggagcccacactgctgatgctggatgagcccaccaaccacctggacctcaacgctgtcatctggcttaataactacctccagggctggcggaagaccttgctgatcgtctcccatgaccagggcttcttggatgatgtctgcactgatatcatccacctcgatgcccagcggctccactactataggggcaattacatgaccttcaaaaagatgtaccagcagaagcagaaagaactgctgaaacagtatgagaagcaagagaaaaagctgaaggagctgaaggcaggcgggaagtccaccaagcaggcggaaaaacaaacgaaggaagccctgactcggaagcagcagaaatgccgacggaaaaaccaagatgaggaatcccaggaggcccctgagctcctgaagcgccctaaggagtacactgtgcgcttcacttttccagaccccccaccactcagccctccagtgctgggtctgcatggtgtgacattcggctaccagggacagaaaccactctttaagaacttggattttggcatcgacatggattcaaggatttgcattgtgggccctaatggtgtggggaagagtacgctactcctgctgctgactggcaagctgacaccgacccatggggaaatgagaaagaaccaccggctgaaaattggcttcttcaaccagcagtatgcagagcagctgcgcatggaggagacgcccactgagtacctgcagcggggcttcaacctgccctaccaggatgcccgcaagtgcctgggccgcttcggcctggagagtcacgcccacaccatccagatctgcaaactctctggtggtcagaaggcgcgagttgtgtttgctgagctggcctgtcgggaacctgatgtcctcatcttggacgagccaaccaataacctggacatagagtctattgatgctctaggggaggccatcaatgaatacaagggtgctgtgatcgttgtcagccatgatgcccgactcatcacagaaaccaattgccagctgtgggtggtggaggagcagagtgttagccaaatcgatggtgactttgaagactacaagcgggaggtgttggaggccctgggtgaagtcatggtcagccggccccgagagtgaagctttccttcccagaagtctcccgagagacatatttgtgtggcctagaagtcctctgtggtctcccctcctctgaagactgcctctggcctgcagctgacctggcaaccattcaggcacatgaaggtggagtgtgaccttgatgtgaccgggatcccactctgattgcatccatttctctgaaagacttgtttgttctgcttctcttcatataactgagctggccttatccttggcatccccctaaacaaacaagaggtgaccaccttattgtgaggttccatccagccaagtttatgtggcctattgtctcaggactctcatcactcagaagcctgcctctgatttaccctacagcttcaggcccagctgccccccagtctttgggtggtgctgttcttttctggtggatttaatgctgactcactggtacaaacagctgttgaagctcagagctggaggtgagcttctgaggcctttgccattatccagcccaagatttggtgcctgcagcctcttgtctggttgaggacttggggcaggaaaggaatgctgctgaacttgaatttccctttacaaggggaagaaataaaggaaaggagttgctgccgacctgtcactgtttggagattgatgggagttggaactgttctcagtcttgatttgctttattcagttttctagcagcttttaatagtcccctcttccccactaaatggatcttgtttgca

SEQ ID NO: 38222 - DNA, 1484 bp, Artificial Sequence
  derived and/or modified sequence
ccgggcgccgccacagtagctgtaactgccaccgcgatgccgaaggcgcccaagcagcagccgccggagcccgagtggatcggggacggagagagcacgagcccatcagacaaagtggtgaagaaagggaagaaggacaagaagatcaaaaaaacgttctttgaagagctggcagtagaagataaacaggctggggaagaagagaaagtgctcaaggagaaggagcagcagcagcagcaacagcaacagcagcaaaaaaaaaagcgagatacccgaaaaggcaggcggaagaaggatgtggatgatgatggagaagagaaagagctcatggagcgtcttaagaagctctcacggggcttcaacctgccctaccaggatgcccgcaagtgcctgggccgcttcggcctggagagtcacgcccacaccatccagatctgcaaactctctggtggtcagaaggcgcgagttgtgtttgctgagctggcctgtcgggaacctgatgtcctcatcttggacgagccaaccaataacctggacatagagtctattgatgctctaggggaggccatcaatgaatacaagggtgctgtgatcgttgtcagccatgatgcccgactcatcacagaaaccaattgccagctgtgggtggtggaggagcagagtgttagccaaatcgatggtgactttgaagactacaagcgggaggtgttggaggccctgggtgaagtcatggtcagccggccccgagagtgaagctttccttcccagaagtctcccgagagacatatttgtgtggcctagaagtcctctgtggtctcccctcctctgaagactgcctctggcctgcagctgacctggcaaccattcaggcacatgaaggtggagtgtgaccttgatgtgaccgggatcccactctgattgcatccatttctctgaaagacttgtttgttctgcttctcttcatataactgagctggccttatccttggcatccccctaaacaaacaagaggtgaccaccttattgtgaggttccatccagccaagtttatgtggcctattgtctcaggactctcatcactcagaagcctgcctctgatttaccctacagcttcaggcccagctgccccccagtctttgggtggtgctgttcttttctggtggatttaatgctgactcactggtacaaacagctgttgaagctcagagctggaggtgagcttctgaggcctttgccattatccagcccaagatttggtgcctgcagcctcttgtctggttgaggacttggggcaggaaaggaatgctgctgaacttgaatttccctttacaaggggaagaaataaaggaaaggagttgctgccgacctgtcactgtttggagattgatgggagttggaactgttctcagtcttgatttgctttattcagttttctagcagcttttaatagtcccctcttccccactaaatggatcttgtttgca

SEQ ID NO: 38223 - DNA, 3249 bp, Artificial Sequence
  derived and/or modified sequence
gcgccagcttggagagccagccccatcggggttccccgccgccggaagcggaaatagcaccgggcgccgccacagtagctgtaactgccaccgcgatgccgaaggcgcccaagcagcagccgccggagcccgagtggatcggggacggagagagcacgagcccatcagacaaagtggtgaagaaagggaagaaggacaagaagatcaaaaaaacgttctttgaagagctggcagtagaagataaacaggctggggaagaagagaaagtgctcaaggagaaggagcagcagcagcagcaacagcaacagcagcaaaaaaaaaagcgagatacccgaaaaggcaggcggaagaaggatgtggatgatgatggagaagagaaagagctcatggagcgtcttaagaagctctcagtgccaaccagtgatgaggaggatgaagtacccgccccaaaaccccgcggagggaagaaaaccaagggtggtaatgtttttgcagccctgattcaggatcagagtgaggaagaggaggaggaagaaaaacatcctcctaagcctgccaagccggagaagaatcggatcaataaggccgtatctgaggaacagcagcctgcactcaagggcaaaaagggaaaggaagagaagtcaaaagggaaggctaagcctcaaaataaattcgctgctctggacaatgaagaggaggataaagaagaagaaattataaaggaaaaggagcctcccaaacaagggaaggagaaggccaagaaggcagagcagatggagtatgagcgccaagtggcttcattaaaagcagccaatgcagctgaaaatgacttctccgtgtcccaggcggagatgtcctcccgccaagccatgttagaaaatgcatctgacatcaagctggagaagttcagcatctccgctcatggcaaggagctgttcgtcaatgcagacctgtacattgtagccggccgccgctacgggctggtaggacccaatggcaagggcaagaccacactcctcaagcacattgccaaccgagccctgagcatccctcccaacattgatgtgttgctgtgtgagcaggaggtggtagcagatgagacaccagcagtccaggctgttcttcgagctgacaccaagcgattgaagctgctggaagaggagcggcggcttcagggacagctggaacaaggggatgacacagctgctgagaggctagagaaggtgtatgaggaattgcgggccactggggcggcagctgcagaggccaaagcacggcggatcctggctggcctgggctttgaccctgaaatgcagaatcgacccacacagaagttctcagggggctggcgcatgcgtgtctccctggccagggcactgttcatggagcccacactgctgatgctggatgagcccaccaaccacctggacctcaacgctgtcatctggcttaataactacctccagggctggcggaagaccttgctgatcgtctcccatgaccagggcttcttggatgatgtctgcactgatatcatccacctcgatgcccagcggctccactactataggggcaattacatgaccttcaaaaagatgtaccagcagaagcagaaagaactgctgaaacagtatgagaagcaagagaaaaagctgaaggagctgaaggcaggcgggaagtccaccaagcaggcggaaaaacaaacgaaggaagccctgactcggaagcagcagaaatgccgacggaaaaaccaagatgaggaatcccaggaggcccctgagctcctgaagcgccctaaggagtacactgtgcgcttcacttttccagaccccccaccactcagccctccagtgctgggtctgcatggtgtgacattcggctaccagggacagaaaccactctttaagaacttggattttggcatcgacatggattcaaggatttgcattgtgggccctaatggtgtggggaagagtacgctactcctgctgctgactggcaagctgacaccgacccatggggaaatgagaaagaaccaccggctgaaaattggcttcttcaaccagcagtatgcagagcagctgcgcatggaggagacgcccactgagtacctgcagcggggcttcaacctgccctaccaggatgcccgcaagtgcctgggccgcttcggcctggagagtcacgcccacaccatccagatctgcaaactctctggtggtcagaaggcgcgagttgtgtttgctgagctggcctgtcgggaacctgatgtcctcatcttggacgagccaaccaataacctggacatagagtctattgatgctctaggggaggccatcaatgaatacaagggtgctgtgatcgttgtcagccatgatgcccgactcatcacagaaaccaattgccagctgtgggtggtggaggagcagagtgttagccaaatcgatggtgactttgaagactacaagcgggaggtgttggaggccctgggtgaagtcatggtcagccggccccgagagtgagctttccttcccagaagtctcccgagagacatatttgtgtggcctagaagtcctctgtggtctcccctcctctgaagactgcctctggcctgcagctgacctggcaaccattcaggcacatgaaggtggagtgtgaccttgatgtgaccgggatcccactctgattgcatccatttctctgaaagacttgtttgttctgcttctcttcatataactgagctggccttatccttggcatccccctaaacaaacaagaggtgaccaccttattgtgaggttccatccagccaagtttatgtggcctattgtctcaggactctcatcactcagaagcctgcctctgatttaccctacagcttcaggcccagctgccccccagtctttgggtggtgctgttcttttctggtggatttaatgctgactcactggtacaaacagctgttgaagctcagagctggaggtgagcttctgaggcctttgccattatccagcccaagatttggtgcctgcagcctcttgtctggttgaggacttggggcaggaaaggaatgctgctgaacttgaatttccctttacaaggggaagaaataaaggaaaggagttgctgccgacctgtcactgtttggagattgatgggagttggaactgttctcagtcttgatttgctttattcagttttctagcagcttttaatagtcccctcttccccactaaatggatcttgtttgca

SEQ ID NO: 38224 - DNA, 1483 bp, Artificial Sequence
  derived and/or modified sequence
ccgggcgccgccacagtagctgtaactgccaccgcgatgccgaaggcgcccaagcagcagccgccggagcccgagtggatcggggacggagagagcacgagcccatcagacaaagtggtgaagaaagggaagaaggacaagaagatcaaaaaaacgttctttgaagagctggcagtagaagataaacaggctggggaagaagagaaagtgctcaaggagaaggagcagcagcagcagcaacagcaacagcagcaaaaaaaaaagcgagatacccgaaaaggcaggcggaagaaggatgtggatgatgatggagaagagaaagagctcatggagcgtcttaagaagctctcacggggcttcaacctgccctaccaggatgcccgcaagtgcctgggccgcttcggcctggagagtcacgcccacaccatccagatctgcaaactctctggtggtcagaaggcgcgagttgtgtttgctgagctggcctgtcgggaacctgatgtcctcatcttggacgagccaaccaataacctggacatagagtctattgatgctctaggggaggccatcaatgaatacaagggtgctgtgatcgttgtcagccatgatgcccgactcatcacagaaaccaattgccagctgtgggtggtggaggagcagagtgttagccaaatcgatggtgactttgaagactacaagcgggaggtgttggaggccctgggtgaagtcatggtcagccggccccgagagtgagctttccttcccagaagtctcccgagagacatatttgtgtggcctagaagtcctctgtggtctcccctcctctgaagactgcctctggcctgcagctgacctggcaaccattcaggcacatgaaggtggagtgtgaccttgatgtgaccgggatcccactctgattgcatccatttctctgaaagacttgtttgttctgcttctcttcatataactgagctggccttatccttggcatccccctaaacaaacaagaggtgaccaccttattgtgaggttccatccagccaagtttatgtggcctattgtctcaggactctcatcactcagaagcctgcctctgatttaccctacagcttcaggcccagctgccccccagtctttgggtggtgctgttcttttctggtggatttaatgctgactcactggtacaaacagctgttgaagctcagagctggaggtgagcttctgaggcctttgccattatccagcccaagatttggtgcctgcagcctcttgtctggttgaggacttggggcaggaaaggaatgctgctgaacttgaatttccctttacaaggggaagaaataaaggaaaggagttgctgccgacctgtcactgtttggagattgatgggagttggaactgttctcagtcttgatttgctttattcagttttctagcagcttttaatagtcccctcttccccactaaatggatcttgtttgca

SEQ ID NO: 38225 - DNA, 2424 bp, Artificial Sequence
  derived and/or modified sequence
atgcccaaggcccccaagcagcagccccccgagcccgagtggatcggcgacggcgagagcaccagccccagcgacaaggtggtgaagaagggcaagaaggacaagaagatcaagaagaccttcttcgaggagctggccgtggaggacaagcaggccggcgaggaggagaaggtgctgaaggagaaggagcagcagcagcagcagcagcagcagcagcagaagaagaagagagacaccagaaagggcagaagaaagaaggacgtggacgacgacggcgaggagaaggagctgatggagagactgaagaagctgagcgtgcccaccagcgacgaggaggacgaggtgcccgcccccaagcccagaggcggcaagaagaccaagggcggcaacgtgttcgccgccctgatccaggaccagagcgaggaggaggaggaggaggagaagcacccccccaagcccgccaagcccgagaagaacagaatcaacaaggccgtgagcgaggagcagcagcccgccctgaagggcaagaagggcaaggaggagaagagcaagggcaaggccaagccccagaacaagttcgccgccctggacaacgaggaggaggacaaggaggaggagatcatcaaggagaaggagccccccaagcagggcaaggagaaggccaagaaggccgagcagatggagtacgagagacaggtggccagcctgaaggccgccaacgccgccgagaacgacttcagcgtgagccaggccgagatgagcagcagacaggccatgctggagaacgccagcgacatcaagctggagaagttcagcatcagcgcccacggcaaggagctgttcgtgaacgccgacctgtacatcgtggccggcagaagatacggcctggtgggccccaacggcaagggcaagaccaccctgctgaagcacatcgccaacagagccctgagcatcccccccaacatcgacgtgctgctgtgcgagcaggaggtggtggccgacgagacccccgccgtgcaggccgtgctgagagccgacaccaagagactgaagctgctggaggaggagagaagactgcagggccagctggagcagggcgacgacaccgccgccgagagactggagaaggtgtacgaggagctgagagccaccggcgccgccgccgccgaggccaaggccagaagaatcctggccggcctgggcttcgaccccgagatgcagaacagacccacccagaagttcagcggcggctggagaatgagagtgagcctggccagagccctgttcatggagcccaccctgctgatgctggacgagcccaccaaccacctggacctgaacgccgtgatctggctgaacaactacctgcagggctggagaaagaccctgctgatcgtgagccacgaccagggcttcctggacgacgtgtgcaccgacatcatccacctggacgcccagagactgcactactacagaggcaactacatgaccttcaagaagatgtaccagcagaagcagaaggagctgctgaagcagtacgagaagcaggagaagaagctgaaggagctgaaggccggcggcaagagcaccaagcaggccgagaagcagaccaaggaggccctgaccagaaagcagcagaagtgcagaagaaagaaccaggacgaggagagccaggaggcccccgagctgctgaagagacccaaggagtacaccgtgagattcaccttccccgaccccccccccctgagcccccccgtgctgggcctgcacggcgtgaccttcggctaccagggccagaagcccctgttcaagaacctggacttcggcatcgacatggacagcagaatctgcatcgtgggccccaacggcgtgggcaagagcaccctgctgctgctgctgaccggcaagctgacccccacccacggcgagatgagaaagaaccacagactgaagatcggcttcttcaaccagcagtacgccgagcagctgagaatggaggagacccccaccgagtacctgcagagaggcttcaacctgccctaccaggacgccagaaagtgcctgggcagattcggcctggagagccacgcccacaccatccagatctgcaagctgagcggcggccagaaggccagagtggtgttcgccgagctggcctgcagagagcccgacgtgctgatcctggacgagcccaccaacaacctggacatcgagagcatcgacgccctgggcgaggccatcaacgagtacaagggcgccgtgatcgtggtgagccacgacgccagactgatcaccgagaccaactgccagctgtgggtggtggaggagcagagcgtgagccagatcgacggcgacttcgaggactacaagagagaggtgctggaggccctgggcgaggtgatggtgagcagacccagagagtag

SEQ ID NO: 38226 - DNA, 717 bp, Artificial Sequence
  derived and/or modified sequence
atgcccaaggcccccaagcagcagccccccgagcccgagtggatcggcgacggcgagagcaccagccccagcgacaaggtggtgaagaagggcaagaaggacaagaagatcaagaagaccttcttcgaggagctggccgtggaggacaagcaggccggcgaggaggagaaggtgctgaaggagaaggagcagcagcagcagcagcagcagcagcagcagaagaagaagagagacaccagaaagggcagaagaaagaaggacgtggacgacgacggcgaggagaaggagctgatggagagactgaagaagctgagcagaggcttcaacctgccctaccaggacgccagaaagtgcctgggcagattcggcctggagagccacgcccacaccatccagatctgcaagctgagcggcggccagaaggccagagtggtgttcgccgagctggcctgcagagagcccgacgtgctgatcctggacgagcccaccaacaacctggacatcgagagcatcgacgccctgggcgaggccatcaacgagtacaagggcgccgtgatcgtggtgagccacgacgccagactgatcaccgagaccaactgccagctgtgggtggtggaggagcagagcgtgagccagatcgacggcgacttcgaggactacaagagagaggtgctggaggccctgggcgaggtgatggtgagcagacccagagagtag

SEQ ID NO: 38227 - protein, 512 aa, Artificial Sequence
  derived and/or modified sequence
MDLKESPSEGSLQPSSIQIFANTSTLHGIRHIFVYGPLTIRRVLWAVAFVGSLGLLLVESSERVSYYFSYQHVTKVDEVVAQSLVFPAVTLCNLNGFRFSRLTTNDLYHAGELLALLDVNLQIPDPHLADPSVLEALRQKANFKHYKPKQFSMLEFLHRVGHDLKDMMLYCKFKGQECGHQDFTTVFTKYGKCYMFNSGEDGKPLLTTVKGGTGNGLEIMLDIQQDEYLPIWGETEETTFEAGVKVQIHSQSEPPFIQELGFGVAPGFQTFVATQEQRLTYLPPPWGECRSSEMGLDFFPVYSITACRIDCETRYIVENCNCRMVHMPGDAPFCTPEQHKECAEPALGLLAEKDSNYCLCRTPCNLTRYNKELSMVKIPSKTSAKYLEKKFNKSEKYISENILVLDIFFEALNYETIEQKKAYEVAALLGDIGGQMGLFIGASILTILELFDYIYELIKEKLLDLLGKEEDEGSHDENVSTCDTMPNHSETISHTVNVPLQTTLGTLEEIAC

SEQ ID NO: 38228 - protein, 203 aa, Artificial Sequence
  derived and/or modified sequence
MFNSGEDGKPLLTTVKGGTGNGLEIMLDIQQDEYLPIWGETEETTFEAGVKVQIHSQSEPPFIQELGFGVAPGFQTFVATQEQRLTYLPPPWGECRSSEMGLDFFPVYSITACRIDCETRYIVENCNCRMVHMPGDAPFCTPEQHKECAEPALGLLAEKDSNYCLCRTPCNLTRYNKELSMVKIPSKTSAKYLEKKFNKSEKY

SEQ ID NO: 38229 - DNA, 1539 bp, Artificial Sequence
  derived and/or modified sequence
atggatcttaaggaatcccctagtgaggggtctttacagccaagtagcatccaaattttcgccaatacttcgactctgcacggaattcgccacatatttgtgtacggcccactgacaatacgtcgggtgctctgggccgttgcttttgtcggctcacttgggctgctcctcgtcgagtcatctgagagagtgtcctactacttcagttaccaacatgtgacgaaagtggatgaagtggtggcacaatcattggtttttccagcagtgacgctgtgtaatctgaatgggtttcgcttttcccgactgaccaccaatgatctgtaccacgcaggagaattactggcgcttttggacgtcaatctccagatccccgaccctcacttagccgacccctcagtgcttgaagctcttcgccaaaaggctaatttcaagcactacaagcccaagcagtttagtatgctcgaatttctgcacagggtgggacatgacctgaaagacatgatgctctactgtaaattcaaaggccaggagtgcgggcatcaggacttcaccaccgtgttcaccaaatatggaaagtgttatatgtttaactcaggggaggatggtaagcccctgcttacaacggtgaagggcgggacaggaaatgggctggagataatgctggacatacagcaagacgaatacctgccgatttggggcgagactgaagagaccaccttcgaggcaggtgtgaaggtgcagattcattcccaaagcgagccgcccttcatccaagaactgggcttcggcgtggctccaggtttccagaccttcgtggctacgcaagagcagaggcttacatacttgcctccaccatggggcgagtgccgctcctctgaaatggggcttgacttcttccctgtgtattctataactgcgtgccggatcgactgtgaaacacgctatatcgttgaaaactgcaattgtcgaatggtgcatatgcccggcgacgcccccttttgcactccagagcaacataaggagtgcgccgagccagccctgggcctcttggccgagaaggacagcaactactgcctctgcagaaccccttgcaaccttacccggtacaataaggagctcagcatggtgaaaattccaagcaagacttccgccaagtaccttgagaaaaagtttaacaagagcgaaaaatatataagcgagaacatcctcgtgctcgacatctttttcgaagcactcaactacgaaaccattgagcaaaagaaagcgtatgaggtcgctgcattgctaggggatattggtggtcagatgggactatttattggagcttcgatcctcactatactggagctgtttgactacatctacgaattgataaaggaaaagctgcttgacctcctgggtaaggaggaagatgaaggatcccacgacgagaacgtgtccacatgtgataccatgccaaatcacagtgaaacaattagtcatactgtcaacgtgcctctccagacaacgctggggactctggaggagatcgcatgttag

SEQ ID NO: 38230 - DNA, 612 bp, Artificial Sequence
  derived and/or modified sequence
atgttcaattcaggcgaagatggaaagccgcttctcactacagtcaagggaggaacaggcaacggcttagagattatgctggatatccagcaggacgagtatctgccaatttggggcgaaactgaagagaccacttttgaggcgggggttaaagtccaaattcactcccagtctgagcctcccttcatacaggagctcgggttcggggtcgcacctggatttcagacctttgtggcaactcaagagcagaggcttacttacctgccaccaccatggggcgaatgtaggtcctctgagatgggtcttgatttcttccccgtctattcaatcacagcttgtagaatagactgcgaaactaggtacatcgttgagaattgtaattgccgcatggttcacatgcctggggatgcccccttctgtacccctgagcagcataaagaatgcgccgaaccagccctaggacttcttgcagaaaaggatagcaattattgcttgtgtagaacaccttgtaacttgacccggtataataaggagcttagcatggtgaaaataccgagtaaaactagcgcaaagtatttagagaaaaagttcaataaatccgagaagtactag

SEQ ID NO: 38231 - DNA, 1539 bp, Artificial Sequence
  derived and/or modified sequence
atggacctgaaggagagccccagcgagggcagcctgcagcccagcagcatccagatctttgccaacaccagcaccctgcacggcatccgccacatctttgtgtatggccccctgaccatcagaagagtgctgtgggccgtggcctttgtgggcagcctgggcctgctgctggtggagagcagcgagcgggtgtcctactacttctcctaccagcacgtgaccaaggtggatgaggtggtggcccagagcctggtgtttcctgctgtgaccctgtgcaacctgaatggcttccgcttcagccggctgaccaccaatgacctgtaccacgccggggagctgctggccctgctggatgtgaacctgcagatcccagacccccacctggccgaccccagcgtgctggaggccctgcggcagaaggccaacttcaagcactacaagcccaagcagttctccatgctggagttcctgcaccgggtgggccatgacctgaaggacatgatgctgtactgcaagttcaagggccaggagtgtggccaccaggacttcaccaccgtcttcaccaagtatggcaagtgctacatgttcaacagcggggaggatggcaagcccctgctgaccaccgtgaagggcggcactggaaatggcctggagatcatgctggacatccagcaggatgagtacctgcccatctggggcgagacagaggagaccacctttgaggccggcgtgaaggtgcagatccacagccagagcgagccccccttcatccaggagctgggcttcggcgtggcccctggcttccagacctttgtggccacccaggagcagaggctgacctacctgcccccaccctggggcgagtgccgcagcagcgagatgggcctggacttcttccctgtgtacagcatcacagcctgcagaattgactgtgagacccgctacatcgtggagaactgcaactgcaggatggtgcacatgcctggagatgcccccttctgcaccccagagcagcacaaggaatgtgccgagcccgccctgggcctgctggccgagaaggacagcaactactgcctgtgcaggaccccctgcaacctgacccgctacaacaaggagctgtccatggtgaagatccccagcaagaccagcgccaagtacctggagaagaagttcaacaagtctgagaagtacatcagcgagaacatcctggtgctggacatcttctttgaggccctgaactatgagaccatcgagcagaagaaggcctatgaggtggccgccctgctgggggacatcggcggccagatgggcctcttcatcggggccagcatcctgaccatcctggagctgtttgactacatctatgagctgatcaaggagaagctgctggacctgctgggcaaggaggaggatgagggcagccatgatgaaaatgtgtccacctgtgacaccatgcccaaccacagcgagaccatcagccacacagtgaatgtgcccctgcagaccaccctgggcaccctggaggagatcgcctgctag

SEQ ID NO: 38232 - DNA, 612 bp, Artificial Sequence
  derived and/or modified sequence
atgttcaacagcggggaggatggcaagcccctgctgaccaccgtgaagggcggcactggaaatggcctggagatcatgctggacatccagcaggatgagtacctgcccatctggggcgagacagaggagaccacctttgaggccggcgtgaaggtgcagatccacagccagagcgagccccccttcatccaggagctgggcttcggcgtggcccctggcttccagacctttgtggccacccaggagcagaggctgacctacctgcccccaccctggggcgagtgccgcagcagcgagatgggcctggacttcttccctgtgtacagcatcacagcctgcagaattgactgtgagacccgctacatcgtggagaactgcaactgcaggatggtgcacatgcctggagatgcccccttctgcaccccagagcagcacaaggaatgtgccgagcccgccctgggcctgctggccgagaaggacagcaactactgcctgtgcaggaccccctgcaacctgacccgctacaacaaggagctgtccatggtgaagatccccagcaagaccagcgccaagtacctggagaagaagttcaacaagtctgagaagtactag

SEQ ID NO: 38233 - DNA, 2414 bp, Artificial Sequence
  derived and/or modified sequence
atggacctcaaggaaagccccagtgagggcagcctgcaaccttctagcatccagatctttgccaacacctccaccctccatggcatccgccacatcttcgtgtatgggccgctgaccatccggcgtgtgctgtgggcagtggccttcgtgggctctctgggcctgctgctggtggagagctctgagagggtgtcctactacttctcctaccagcatgtcactaaggtggacgaagtggtggctcaaagcctggtcttcccagctgtgaccctctgtaacctgaatggcttccggttctccaggctcaccaccaatgacctgtaccatgctggggagctgctggccctgctggatgtcaacctgcagatcccggacccccatctggctgacccctccgtgctggaggccctgcggcagaaggccaacttcaagcactacaaacccaagcagttcagcatgctggagttcctgcaccgtgtgggccatgacctgaaggatatgatgctctactgcaagttcaaagggcaggagtgcggccaccaagacttcaccacagtgtttacaaaatatgggaagtgttacatgtttaactcaggcgaggatggcaaacctctgctcaccacggtcaagggggggacaggcaacgggctggagatcatgctggacattcagcaggatgagtacctgcccatctggggagagacagaggaaacgacatttgaagcaggagtgaaagttcagatccacagtcagtctgagccacctttcatccaagagctgggctttggggtggctccagggttccagacctttgtggccacacaggagcagaggctcacatacctgcccccaccgtggggtgagtgccgatcctcagagatgggcctcgacttttttcctgtttacagcatcaccgcctgtaggattgactgtgagacccgctacattgtggaaaactgcaactgccgcatggttcacatgccaggggatgcccctttttgtacccctgagcagcacaaggagtgtgcagagcctgccctaggtctgttggcggaaaaggacagcaattactgtctctgcaggacaccctgcaacctaacccgctacaacaaagagctctccatggtgaagatccccagcaagacatcagccaagtaccttgagaagaaatttaacaaatcagaaaaatatatctcagagaacatccttgttctggatatattttttgaagctctcaattatgagacaattgaacagaagaaggcgtatgaagttgctgccttacttggtgatattggtggtcagatgggattgttcattggtgctagtatccttacaatactagagctctttgattatatttatgagctgatcaaagagaagctattagacctgcttggcaaagaggaggacgaagggagccacgatgagaatgtgagtacttgtgacacaatgccaaaccactctgaaaccatcagtcacactgtgaacgtgcccctgcagacgaccctggggaccttggaggagattgcctgctgacacccctcgagtcacccagcactccctccaaacagaccttgaggcccaagacccaggacaaggaacagcaagctcaggtgggatggccccagtgctggaaagaagcaagagccccctatgcacacattgcagactagctgcctagacctcgctccggccacgtccaacacgacgcatccttgggccccgccgtgcgtccctcttaggagagatgagtcacactctggaactgtccaagaacgaacctgccatcacatctcactgccagatgtataaagcacctgcatgctcagacttcttgtggcgccacctccacgtctgtcttgtacatgacactcctccacgcggtttccagtgtccacactgctgcccgtgcagtgggaccagattccaggtccaaagtcaccatgaggccaccctggaatcagaactgcacaatcaagagggaacccatgggactctctgctacattcagttcttgtgtcgtttgtgaaagttcttaacctgcccaaaaacccccttttccccaagctgcccatggggcttcggcgccaaaggtgacccgcgccaacctccctcccccccagtgcctatgacggcggcacagcagccagcgggtgggggacgcctgtgttcacccatggtgcccatgtcgttcttctctccctgtgacacagcttgtacagtctgattctttttatctggggtaggggggcttttatgtttgtccgatggagatttgttttgttttgcttcattttatgcttttttattttagttttgatgttctgaggtttgctttggtttttccattttctttggcatttatttattcgtgcttcaaatcacagtcatattaaaagctggtcttgtgg

SEQ ID NO: 38234 - DNA, 750 bp, Artificial Sequence
  derived and/or modified sequence
cggcgagctctgcgggccgcacaacttctcctccgagtcttgagcatccagcggaactgagcagtggtgcgccagggttgggcccttcacctggcctccgtcccccataaaatgtgtttacaaaatatgggaagtgttacatgtttaactcaggcgaggatggcaaacctctgctcaccacggtcaagggggggacaggcaacgggctggagatcatgctggacattcagcaggatgagtacctgcccatctggggagagacagaggaaacgacatttgaagcaggagtgaaagttcagatccacagtcagtctgagccacctttcatccaagagctgggctttggggtggctccagggttccagacctttgtggccacacaggagcagaggctcacatacctgcccccaccgtggggtgagtgccgatcctcagagatgggcctcgacttttttcctgtttacagcatcaccgcctgtaggattgactgtgagacccgctacattgtggaaaactgcaactgccgcatggttcacatgccaggggatgcccctttttgtacccctgagcagcacaaggagtgtgcagagcctgccctaggtctgttggcggaaaaggacagcaattactgtctctgcaggacaccctgcaacctaacccgctacaacaaagagctctccatggtgaagatccccagcaagacatcagccaagtaccttgagaagaaatttaacaaatcagaaaaatata

SEQ ID NO: 38235 - DNA, 1539 bp, Artificial Sequence
  derived and/or modified sequence
atggacctgaaggagagccccagcgagggcagcctgcagcccagctccattcagatatttgcaaatacatctacactgcatgggataagacacatattcgtgtacggccctctcacaatacggagagttctgtgggccgtagcttttgtgggcagcctggggctgcttttggtggaatcttctgagcgggtgtcttactacttcagctaccagcacgttacaaaggtcgacgaagtggttgcccagtcccttgtgtttccagccgtcacactgtgcaacctgaatgggttcaggttttcgcggctgacaacgaacgatctgtaccatgccggtgagttacttgctctgctagacgtaaacctccagatacccgacccacatctggcagatccctctgtattagaggccctccgccagaaagctaactttaaacactacaagccaaaacagttttctatgctagaattcttacaccgggtgggtcatgatttgaaagatatgatgctctactgcaagttcaaaggccaggaatgtggacaccaggacttcacaactgtattcactaaatacggcaagtgctacatgttcaactctggggaggacggtaagccccttttgaccacagtgaagggtggtaccggaaatggactggagatcatgctagacatccaacaggacgaatatttacccatctggggcgaaactgaggagaccacatttgaggctggtgttaaagtgcagattcactcccagtcagagccaccttttatccaggaactaggttttggcgtggcccccggcttccagacgttcgtcgccactcaggaacaaagattaacgtatctaccccccccctggggcgaatgccggtcttcagagatggggctggacttcttcccagtttactcaatcaccgcctgtcgaattgactgcgagacccgctacattgtggagaattgcaattgtagaatggtgcacatgcccggcgacgcccctttctgcacacctgagcagcataaagaatgtgccgagcccgcactgggtcttcttgcggagaaagacagcaactattgcctctgtaggaccccttgcaacttgacgcgttacaacaaggagctgtccatggtcaagatacccagtaagactagcgcgaaatatctggagaaaaagttcaacaagtccgagaagtatatatcagagaacatactggtgctggacatcttttttgaggccctgaactacgaaactatagaacagaagaaggcctatgaggtcgctgcactcctgggcgacatcggcggtcaaatgggcctctttattggcgcgtcaatcctgactattctagagctgtttgactatatttatgagctgataaaagagaagctgttggatctgcttggcaaggaggaagatgagggttctcatgacgagaacgtaagcacctgcgacaccatgcccaatcatagcgaaaccataagtcacactgtgaatgtaccattgcagaccaccctgggcactctggaagaaattgcttgttag

SEQ ID NO: 38236 - DNA, 612 bp, Artificial Sequence
  derived and/or modified sequence
atgttcaacagcggcgaggacggcaagcccctgctgaccaccgtgaaaggtggaacagggaacggtcttgaaatcatgctggacattcaacaggatgagtacttgcccatatggggtgagaccgaggaaaccacctttgaggcgggagttaaggtgcagatccattcccagagcgagcccccgttcattcaggagctgggttttggggtcgcccccggcttccaaactttcgtggctacccaggaacaaaggctaacataccttccaccaccttggggagagtgtagaagctctgagatgggactcgatttctttcccgtctacagtatcaccgcctgtagaatcgattgcgagaccaggtacattgtcgaaaactgcaattgccgcatggtgcacatgcccggggatgcgcctttttgcaccccagagcagcataaagagtgcgcggaacctgcgctcggtttattagccgaaaaagactcaaactattgcctttgtcgaacgccttgcaacttgaccagatacaataaagagctatccatggtgaaaattcccagcaaaaccagtgccaagtaccttgagaagaagttcaacaagagtgagaagtattag

SEQ ID NO: 38237 - DNA, 1539 bp, Artificial Sequence
  derived and/or modified sequence
atggatctgaaagaatccccatccgaggggtcattacagccttcatctatccagattttcgcgaatacttctaccctgcacgggattagacacatcttcgtgtatggtccactgaccattcggagagtgctgtgggctgtggctttcgtaggatctctgggtctcctactcgtggaatcttccgagagagtctcttattatttttcttaccagcatgtgacaaaggttgatgaggtggtcgctcagagcctggtctttcccgcagtcacattgtgtaatttaaacggattccgattcagccgtctgaccaccaacgatctgtatcacgctggcgaattgctcgccctattggacgtgaatctccagattccagacccccatctcgcagatccctcagttcttgaagctcttcgccagaaggccaactttaagcactacaagcctaagcagttctccatgctggagttccttcacagagtgggtcacgacttaaaagatatgatgttgtactgcaagttcaaaggccaagaatgtggacatcaggactttacaaccgttttcacaaaatatggcaagtgctacatgtttaattcaggtgaagacggaaaacctctcctgactaccgtgaaagggggtactggcaacggactcgagatcatgctcgacattcagcaagatgagtatttgccgatctggggggagactgaggagacaacttttgaggctggtgttaaagtgcagatccacagtcaatccgaacccccatttatacaagaacttggatttggtgtggcccctgggttccagacatttgtagcgactcaggaacagagactgacctacctgcctcctccctggggagaatgtcgaagctccgagatgggactggattttttccccgtttacagcattacagcctgtagaattgattgcgagactcgatatatcgtagaaaactgcaactgtcggatggtccacatgcctggagacgccccattctgtaccccagaacaacacaaagaatgtgcagagccagctcttggactgctggctgagaaagattctaactactgcttatgcagaactccatgcaacctgacacggtataataaagaactctccatggtcaaaattcctagcaagacctctgcaaagtacctagagaaaaagttcaataagtctgagaagtacattagcgagaacatactcgtccttgatattttttttgaagccctcaactacgagaccatcgaacagaaaaaagcctacgaggtggccgctctgctgggtgacatcggaggccagatggggcttttcataggcgcatccatcctaacgatactcgagctgttcgactacatctacgagctgattaaggaaaagctcctggaccttttggggaaggaggaggacgagggatcccacgacgagaacgtctcaacttgcgacacaatgccaaaccactcagagaccatctcccacacagtcaatgtgccactacagaccaccctggggactctcgaagagatcgcctgctag

SEQ ID NO: 38238 - DNA, 612 bp, Artificial Sequence
  derived and/or modified sequence
atgttcaactcaggcgaagacggcaagcctctcctgaccaccgtgaagggtgggaccggcaacggactggagatcatgctggatattcagcaggacgagtacctgcctatctggggcgagacagaggagacaactttcgaggccggtgtgaaggtgcagattcatagtcagtccgagcccccatttattcaggaactggggttcggcgtggccccagggtttcagacattcgttgccacacaggaacaacggctcacctatctgccgcctccatggggcgaatgccggtcatctgaaatgggcctggatttttttccagtttactcaatcaccgcatgtcgtatcgattgcgagacgagatatatagttgaaaactgtaattgtcggatggtacacatgccaggggacgctccattctgtacccctgaacagcacaaggagtgcgctgagccagcccttggcctcctggccgaaaaagacagcaactactgcctgtgtcgtactccatgcaaccttacccgatacaacaaggagctcagcatggttaaaattccgagtaaaaccagcgctaaatacctagagaaaaagttcaataaatcggagaaatactag

SEQ ID NO: 38239 - DNA, 1539 bp, Artificial Sequence
  derived and/or modified sequence
atggacctgaaggagagccccagcgagggcagcctgcagcccagcagcatccagatcttcgccaacaccagcaccctgcacggcatcagacacatcttcgtgtacggccccctgaccatcagaagagtgctgtgggccgtggccttcgtgggcagcctgggcctgctgctggtggagagcagcgagagagtgagctactacttcagctaccagcacgtgaccaaggtggacgaggtggtggcccagagcctggtgttccccgccgtgaccctgtgcaacctgaacggcttcagattcagcagactgaccaccaacgacctgtaccacgccggcgagctgctggccctgctggacgtgaacctgcagatccccgacccccacctggccgaccccagcgtgctggaggccctgagacagaaggccaacttcaagcactacaagcccaagcagttcagcatgctggagttcctgcacagagtgggccacgacctgaaggacatgatgctgtactgcaagttcaagggccaggagtgcggccaccaggacttcaccaccgtgttcaccaagtacggcaagtgctacatgttcaacagcggcgaggacggcaagcccctgctgaccaccgtgaagggcggcaccggcaacggcctggagatcatgctggacatccagcaggacgagtacctgcccatctggggcgagaccgaggagaccaccttcgaggccggcgtgaaggtgcagatccacagccagagcgagccccccttcatccaggagctgggcttcggcgtggcccccggcttccagaccttcgtggccacccaggagcagagactgacctacctgccccccccctggggcgagtgcagaagcagcgagatgggcctggacttcttccccgtgtacagcatcaccgcctgcagaatcgactgcgagaccagatacatcgtggagaactgcaactgcagaatggtgcacatgcccggcgacgcccccttctgcacccccgagcagcacaaggagtgcgccgagcccgccctgggcctgctggccgagaaggacagcaactactgcctgtgcagaaccccctgcaacctgaccagatacaacaaggagctgagcatggtgaagatccccagcaagaccagcgccaagtacctggagaagaagttcaacaagagcgagaagtacatcagcgagaacatcctggtgctggacatcttcttcgaggccctgaactacgagaccatcgagcagaagaaggcctacgaggtggccgccctgctgggcgacatcggcggccagatgggcctgttcatcggcgccagcatcctgaccatcctggagctgttcgactacatctacgagctgatcaaggagaagctgctggacctgctgggcaaggaggaggacgagggcagccacgacgagaacgtgagcacctgcgacaccatgcccaaccacagcgagaccatcagccacaccgtgaacgtgcccctgcagaccaccctgggcaccctggaggagatcgcctgctag

SEQ ID NO: 38240 - DNA, 612 bp, Artificial Sequence
  derived and/or modified sequence
atgttcaacagcggcgaggacggcaagcccctgctgaccaccgtgaagggcggcaccggcaacggcctggagatcatgctggacatccagcaggacgagtacctgcccatctggggcgagaccgaggagaccaccttcgaggccggcgtgaaggtgcagatccacagccagagcgagccccccttcatccaggagctgggcttcggcgtggcccccggcttccagaccttcgtggccacccaggagcagagactgacctacctgccccccccctggggcgagtgcagaagcagcgagatgggcctggacttcttccccgtgtacagcatcaccgcctgcagaatcgactgcgagaccagatacatcgtggagaactgcaactgcagaatggtgcacatgcccggcgacgcccccttctgcacccccgagcagcacaaggagtgcgccgagcccgccctgggcctgctggccgagaaggacagcaactactgcctgtgcagaaccccctgcaacctgaccagatacaacaaggagctgagcatggtgaagatccccagcaagaccagcgccaagtacctggagaagaagttcaacaagagcgagaagtactag

SEQ ID NO: 38241 - protein, 528 aa, Artificial Sequence
  derived and/or modified sequence
MELKAEEEEVGGVQPVSIQAFASSSTLHGLAHIFSYERLSLKRALWALCFLGSLAVLLCVCTERVQYYFHYHHVTKLDEVAASQLTFPAVTLCNLNEFRFSQVSKNDLYHAGELLALLNNRYEIPDTQMADEKQLEILQDKANFRSFKPKPFNMREFYDRAGHDIRDMLLSCHFRGEVCSAEDFKVVFTRYGKCYTFNSGRDGRPRLKTMKGGTGNGLEIMLDIQQDEYLPVWGETDETSFEAGIKVQIHSQDEPPFIDQLGFGVAPGFQTFVACQEQRLIYLPPPWGTCKAVTMDSDLDFFDSYSITACRIDCETRYLVENCNCRMVHMPGDAPYCTPEQYKECADPALDFLVEKDQEYCVCEMPCNLTRYGKELSMVKIPSKASAKYLAKKFNKSEQYIGENILVLDIFFEVLNYETIEQKKAYEIAGLLGDIGGQMGLFIGASILTVLELFDYAYEVIKHKLCRRGKCQKEAKRSSADKGVALSLDDVKRHNPCESLRGHPAGMTYAANILPHHPARGTFEDFTC

SEQ ID NO: 38242 - DNA, 1587 bp, Artificial Sequence
  derived and/or modified sequence
atggagctcaaggccgaggaagaggaggtcggcggggtccagcctgtttcaattcaggcattcgcgtcgtcgagtacgttacacggtctggcacatattttctcttatgagcggctatcattgaagagagctttgtgggctctttgcttcctgggtagcctggctgtgctgctctgtgtttgtaccgaaagagtgcagtactactttcattaccatcacgtcaccaagctagatgaggtggctgcctcacaattaacgttcccagctgtcaccctctgcaatctgaatgagttccgctttagccaggtgagcaagaacgatctttaccatgccggggagctgctcgcactactgaataatcgatacgagattcctgacactcaaatggcagatgaaaagcagctggaaatactccaggacaaggctaattttcgatccttcaagcccaaacccttcaacatgagagaattctatgaccgggcagggcacgatatacgggacatgttactgtcttgccacttccgaggggaggtatgttctgccgaggacttcaaggtggtgttcaccagatatgggaagtgttatacatttaattcaggtcgggacgggagaccaaggctgaagacaatgaagggcggtaccggcaacgggctggaaattatgctggatatccagcaagatgaatatttacctgtttggggagaaacggatgagacctctttcgaggccggtatcaaagtacagatccacagccaggacgaaccccccttcatcgatcagttaggtttcggcgtggctcccggttttcagacttttgtcgcatgtcaggaacagaggttaatctatctgcctcctccatgggggacatgcaaagctgtcactatggactcagatctggactttttcgattcctactcgataacggcatgtcgcatcgactgtgaaactcgatacctggtagaaaattgcaattgcaggatggtgcatatgcccggtgatgccccttattgtactcctgaacaatataaagagtgtgcggaccctgctctggacttccttgtggagaaagatcaggagtattgtgtttgtgaaatgccatgtaacctgactcgctacggaaaagaacttagtatggtcaagattccaagtaaggcatccgccaaatatttggctaaaaagttcaataaatcagagcaatatatcggtgagaatatcttggtcctcgacattttcttcgaagttttaaattatgagactatagaacagaaaaaagcgtacgagatcgccggcctgcttggcgatatcggcgggcagatgggactctttataggagcctccattctcactgtactcgagctgtttgactacgcttacgaggttattaaacacaaactgtgccggaggggaaaatgtcaaaaggaggcaaagaggtctagcgccgataagggtgtagcgttatcccttgatgatgtgaaaagacataatccctgcgagtcactcagagggcaccccgcgggtatgacatatgcagccaacatcctgccccatcatcctgcccggggaaccttcgaagactttacttgttag

SEQ ID NO: 38243 - DNA, 1587 bp, Artificial Sequence
  derived and/or modified sequence
atggagctgaaggccgaggaggaggaggtgggcggcgtgcagcctgtgtccatccaggcctttgccagcagcagcaccctgcacggcctggcccacatcttctcctatgaaaggctgagcctgaagagggccctgtgggccctgtgcttcctgggcagcctggccgtgctgctgtgtgtgtgcacagagcgggtgcagtactacttccactaccaccacgtgaccaagctggatgaggtggccgccagccagctgaccttccctgctgtgaccctgtgcaacctgaatgagttccgcttcagccaggtgtccaagaatgacctgtaccacgccggggagctgctggccctgctgaacaacagatatgagatcccagacacccagatggctgatgagaagcagctggagatcctgcaggacaaggccaacttccgctccttcaagcccaagcccttcaacatgagggagttctatgacagagctggccatgacatccgggacatgctgctgagctgccacttccggggggaggtgtgcagcgctgaggacttcaaggtggtgttcaccaggtatggcaagtgctacaccttcaacagcggcagagatggccggccccggctgaagaccatgaagggcggcactggaaatggcctggagatcatgctggacatccagcaggatgagtacctgcctgtgtggggcgagacagatgagaccagctttgaagctggcatcaaggtgcagatccacagccaggatgagccccccttcatcgaccagctgggctttggagtggcccctggcttccagacctttgtggcctgccaggagcagaggctcatctacctgcccccaccctggggcacctgcaaggctgtgaccatggacagcgacctggacttctttgacagctacagcatcacagcctgcagaattgactgtgagacccgctacctggtggagaactgcaactgcaggatggtgcacatgcctggagatgccccctactgcaccccagagcagtacaaggaatgtgccgaccctgccctggacttcctggtggagaaggaccaggagtactgtgtgtgtgagatgccctgcaacctgaccaggtatggcaaggagctgtccatggtgaagatccccagcaaggccagcgccaagtacctggccaagaagttcaacaagtctgagcagtacatcggggagaacatcctggtgctggacatcttctttgaggtgctgaactatgagaccatcgagcagaagaaggcctatgaaattgctggcctgctgggggacattggaggccagatgggcctcttcatcggggccagcatcctgactgtgctggagctgtttgattatgcctatgaggtgatcaagcacaagctgtgcagaagaggcaagtgccagaaggaggccaagaggagcagcgctgacaagggcgtggccctgagcctggatgatgtgaagaggcacaacccctgtgagagcctgcggggccaccctgctggcatgacctacgccgccaacatcctgccccaccacccagcccggggcacctttgaggacttcacctgctag

SEQ ID NO: 38244 - DNA, 3778 bp, Artificial Sequence
  derived and/or modified sequence
gagccagcgagccagcgcgcgcgggcgggcggacagatcggagccgagcggggccgggcggggcgctccctgcagggctctgcgcggcgtgccgcggcggccgcgggctccggccccgggccatgagcccctccgcgactcggcgctgagcccgccaccggtccagcgccccaggacccgccgccggctgccggcttgccgaagccccctcaggatcccctcaacaaggatggaactgaaggccgaggaggaggaggtgggtggcgtccagccggtgagcatccaggccttcgccagcagctccacactgcacggcctggcccacatcttctcctacgagcggctgtctctgaagcgggcactgtgggccctgtgcttcctgggctccctggctgtgctgctgtgtgtgtgcacggagcgtgtgcagtactacttccactaccaccatgtcaccaagctcgacgaggtggctgcctctcagcttaccttccctgctgtcacgctgtgcaacctcaacgagttccgctttagccaagtctccaagaatgacctgtatcatgctggggagctgctggccctgctcaacaacaggtatgagataccagacacacagatggcagatgaaaagcagctggagatactgcaggacaaagccaacttccgcagcttcaaacccaaacccttcaacatgcgtgagttctacgaccgagctgggcacgacattcgagacatgctgctctcctgccacttccggggggaggtctgcagcgctgaagacttcaaggtggtcttcacacgctatggaaagtgctacacgttcaactcgggccgagatgggcggccgcggctgaagaccatgaagggtgggacgggcaatgggctggaaatcatgctggacatccagcaggacgagtacctgcctgtgtggggggagactgacgagacgtccttcgaagcaggcatcaaagtgcagatccatagtcaggatgaacctcctttcatcgaccagctgggctttggcgtggccccaggcttccagacctttgtggcctgccaggagcagcggctcatctacctgcccccaccctggggcacctgcaaagctgttaccatggactcggatttggatttcttcgactcctacagcatcactgcctgccgcatcgactgtgagacgcgctacctggtggagaactgcaactgccgcatggtgcacatgccaggggatgccccatactgtactccagagcagtacaaggagtgtgcagatcctgctctggacttcctggtggagaaggaccaggagtactgcgtgtgtgaaatgccttgcaacctgacccgctatggcaaagagctgtccatggtcaagatccccagcaaagcctcagccaagtacctggccaagaagttcaacaaatctgagcaatacataggggagaacatcctggtgctggacattttctttgaagtcctcaactatgagaccattgaacagaagaaggcctatgagattgcagggctcctgggtgacatcgggggccagatggggctgttcatcggggccagcatcctcacggtgctggagctctttgactacgcctacgaggtcattaagcacaagctgtgccgacgaggaaaatgccagaaggaggccaaaaggagcagtgcggacaagggcgtggccctcagcctggacgacgtcaaaagacacaacccgtgcgagagccttcggggccaccctgccgggatgacatacgctgccaacatcctacctcaccatccggcccgaggcacgttcgaggactttacctgctgagccccgcaggccgctgaaccaaaggcctagatggggaggactaggagagcgagggggcccccagctgcctcctcacatctgccctggggactccccacactccggggcagatctttcctcttgtctgtggtaaggaaggagtcttgaccatagagtcctctctctgcctctatcccattctttttacatttaacaaaactaatctaaaaaagaactaaaaagggagaacggggcaagggacctcaggctgcccctctctcctccatgctgcctcccctagctcccagcctgaattctgtctatctagctgtctgccatctgagtgtccatctacattctgctgccaccagtcaccaaaggcccttcccagtgaggggtggaagggatctctggggtctggaatttggccccaaaccagagaatgtaccttaagggggagggctagtgtgggggagggaggcttccccagccttaagagaccctctcagcccagtgactgtccccaaacccaagtctcctggcaggaactaaaacctcagccccactctctcacaccatgtggaatctcgtgggggtcggggatccccttaagaagtggtaatggggacaagatgcggccctggtgctgtaggctacatcctgatacctataagttcacccccaccccacagctgctggagagaaatcccaagaggcagcccttcctcaccatcccattaaagaccgggctggttagcgtccagctcagggagaagggcgctagtgcctaacctcactggtccctctcccggaggcccttgtagagggccacgtccataaattttcttatggaactctcccacatcctcttccccaacttcatttgcttctctcaacaacctcatctgcattttctatttctatatgatacagactctatattgctatatctctgtatatactttcccagccctgtctgtctccaccccatcccctcttgtctctgagaaccattctcccaccccaagttccaccttctatgtttctactccctccctggtctctgaatgccttcgcctgtataaagagttggactctctcccctggtgtctgtactgtgtacacacatccctctgagaagcacaaggagacgacacgcgcattgtaacctttgcactgtctcagtggcgacaaaggaagctgtgaatcacaagctctgcctctttctggcctcaccctctcccccaacccgggcaccctcggccctccctgcagccttaacattctcttcccctgctcctcctatcccattgccctctgcccagctgacagtggcatccccagggaaggggttgctgtagagatagcccccacccaggggatggaggtctaccctggacactaagccaagtgtgtcagagacagaagggagctggggattggcgactcctgaagttggggcagtgggatgctgacaggcagaagctgaggtcctcagtcagtggcctttcctccttctgggtgcccagccccctttcctcacctgatacccaagcccaccacttttattttctggtgaggtgggtttgggaggaaagagaggcctagaggaggagttgaaagctctgctgttgtctcaccctatcttaatgagagacaagtgaggtggagggcctgccccccctccctccaccagacactccttccaggcctgagccccaacccctcttcaggccttccttccctagctgtgtcttggtcttcaatcccagaacaggacctgtgagcagctgcattggcctggagctggagagtaaggctgtaggatctttggaatctcttggttcctaagagtttcctcagagatcatacctccccagagggaagcaggaatgaggccaaaaagtgtgcattggataggggaacagcaggcagggctctgggtgacgcatgcctctggtctaataaactgggtttcaacca

SEQ ID NO: 38245 - DNA, 1587 bp, Artificial Sequence
  derived and/or modified sequence
atggagctgaaggccgaggaggaggaggtgggcggcgtgcagcccgtgagtatccaggcgttcgcgtcttcaagtactctccatggtctggctcacattttcagctacgagcggcttagcctgaagagggccctgtgggctctttgctttcttggttcactggccgtactgctatgtgtttgcactgaaagggtgcagtattactttcattaccatcatgtaacaaagttagatgaagtggctgcaagtcagcttacttttcccgctgtaacgctatgcaacctgaatgagttcaggttttcccaggtgtccaagaatgacctgtaccacgctggggaacttctggccctgctgaacaaccggtatgagatccctgacacacagatggccgacgagaagcaattggaaattttgcaggataaagctaactttcgatccttcaagcccaagccttttaatatgcgcgaattttacgatagggctggacacgatatcagagatatgttattgtcatgtcatttcagaggtgaggtgtgtagcgctgaggatttcaaggtagtattcacaagatatggaaaatgctacaccttcaactcaggcagggacggcagaccacggctgaagaccatgaaaggtgggactgggaacggactggagatcatgcttgacatccagcaggatgaatacttgcccgtttggggagagaccgacgagacatcattcgaggccggaattaaagtgcagatccacagccaggatgagccgcccttcattgatcagctgggtttcggtgtcgccccgggctttcagacctttgtggcctgtcaggaacagagactgatttacctccctcccccttggggaacatgtaaggcagtaactatggactcagacctggatttcttcgattcctactccatcacggcctgccggatcgactgtgagactcgttatctggtggagaattgcaattgcagaatggtgcacatgcccggtgacgcaccctactgtaccccggagcaatataaagagtgtgccgatcctgctctggattttctggtcgagaaggaccaggaatattgtgtgtgcgagatgccctgtaacctaaccaggtacgggaaagaactgtccatggtgaagatccccagtaaagcctcagcaaaatacttagctaaaaaattcaataagtcagagcaatacatcggagagaatattttggtcttggatatcttctttgaggttttaaattatgagaccatcgaacagaagaaagcttatgaaatcgccggcctcctgggcgacattggcggtcagatgggactttttatcggcgcctctattctgacggtgctggaactctttgattacgcctacgaagtgatcaaacataagctctgccgccggggaaaatgtcagaaggaggccaagcgcagcagtgctgacaagggagtcgccctcagcctcgacgacgtgaagcggcataacccttgtgagtctttacgtggccaccctgcaggtatgacttatgccgcaaacatactgccccaccacccagcgcgaggcacctttgaggattttacttgttag

SEQ ID NO: 38246 - DNA, 1587 bp, Artificial Sequence
  derived and/or modified sequence
atggaactgaaggcagaagaagaggaagtcggaggggtgcagcctgtgagtattcaggcatttgcctcgtcctctactctccacggactggcccacatattctcttacgaacgactttccctcaaacgggcactttgggctctttgctttctcggttccctggcagtcttgttatgcgtttgcaccgagcgggtccagtactacttccattaccaccatgtgactaaacttgatgaagtcgctgccagccagctgacattcccagctgtgaccctctgtaacctgaacgagtttaggttctcacaggtgagcaagaatgatctgtaccacgctggcgagctgctggcactcctgaacaacaggtacgagatccctgatacccagatggctgatgagaaacagctggagatcctccaagataaagcaaattttcggtccttcaagccgaagccattcaatatgcgcgagttctatgaccgtgccggacatgacattagagacatgctgctttcctgccactttcgaggcgaggtgtgctcagccgaggatttcaaggttgtgttcacacgatacgggaagtgctatacttttaattccggcagagacggcagacctagactgaaaacaatgaaaggcggaaccggaaatggcctggagataatgttagacattcagcaagatgagtacctccctgtgtggggagagaccgacgaaacctcctttgaggcgggaataaaagtgcagattcacagccaggatgaaccaccattcattgaccaactgggtttcggagtggcccctggcttccagacgtttgttgcctgccaagaacagagactgatttatctaccacctccatgggggacatgcaaagccgttaccatggattccgaccttgatttcttcgattcctattcaatcacggcttgtaggatagactgcgaaacaagatatcttgtggaaaattgcaattgccggatggtccatatgccgggagacgcaccttattgtacccccgagcagtacaaggagtgtgctgacccagccctggatttcttggtagagaaagaccaggaatattgcgtttgcgagatgccctgcaaccttactcggtacgggaaggaattgtctatggtgaaaatcccgagcaaggcttcagctaagtacttagctaagaagttcaataaaagcgagcaatacataggtgagaacattttggtgcttgacatttttttcgaggtgctgaactatgaaacaattgaacagaagaaagcgtacgaaatcgctgggctgctgggagacatcgggggtcagatgggtctgttcattggcgcatctattttaactgttctggaactctttgattatgcctacgaggtgattaagcataagttatgcaggaggggcaagtgccaaaaggaggccaagagaagttcagccgacaaaggcgtagccctgtccctggatgacgtgaagagacacaatccttgtgagtccctaagaggacatcccgctggtatgacatacgccgcaaatatccttccacaccaccccgctcggggaacctttgaagacttcacttgctag

SEQ ID NO: 38247 - DNA, 1587 bp, Artificial Sequence
  derived and/or modified sequence
atggagctgaaggccgaggaggaggaggtgggcggcgtgcagcccgtgagcatccaggccttcgccagcagcagcaccctgcacggcctggcccacatcttcagctacgagagactgagcctgaagagagccctgtgggccctgtgcttcctgggcagcctggccgtgctgctgtgcgtgtgcaccgagagagtgcagtactacttccactaccaccacgtgaccaagctggacgaggtggccgccagccagctgaccttccccgccgtgaccctgtgcaacctgaacgagttcagattcagccaggtgagcaagaacgacctgtaccacgccggcgagctgctggccctgctgaacaacagatacgagatccccgacacccagatggccgacgagaagcagctggagatcctgcaggacaaggccaacttcagaagcttcaagcccaagcccttcaacatgagagagttctacgacagagccggccacgacatcagagacatgctgctgagctgccacttcagaggcgaggtgtgcagcgccgaggacttcaaggtggtgttcaccagatacggcaagtgctacaccttcaacagcggcagagacggcagacccagactgaagaccatgaagggcggcaccggcaacggcctggagatcatgctggacatccagcaggacgagtacctgcccgtgtggggcgagaccgacgagaccagcttcgaggccggcatcaaggtgcagatccacagccaggacgagccccccttcatcgaccagctgggcttcggcgtggcccccggcttccagaccttcgtggcctgccaggagcagagactgatctacctgccccccccctggggcacctgcaaggccgtgaccatggacagcgacctggacttcttcgacagctacagcatcaccgcctgcagaatcgactgcgagaccagatacctggtggagaactgcaactgcagaatggtgcacatgcccggcgacgccccctactgcacccccgagcagtacaaggagtgcgccgaccccgccctggacttcctggtggagaaggaccaggagtactgcgtgtgcgagatgccctgcaacctgaccagatacggcaaggagctgagcatggtgaagatccccagcaaggccagcgccaagtacctggccaagaagttcaacaagagcgagcagtacatcggcgagaacatcctggtgctggacatcttcttcgaggtgctgaactacgagaccatcgagcagaagaaggcctacgagatcgccggcctgctgggcgacatcggcggccagatgggcctgttcatcggcgccagcatcctgaccgtgctggagctgttcgactacgcctacgaggtgatcaagcacaagctgtgcagaagaggcaagtgccagaaggaggccaagagaagcagcgccgacaagggcgtggccctgagcctggacgacgtgaagagacacaacccctgcgagagcctgagaggccaccccgccggcatgacctacgccgccaacatcctgccccaccaccccgccagaggcaccttcgaggacttcacctgctag

SEQ ID NO: 38248 - protein, 381 aa, Artificial Sequence
  derived and/or modified sequence
MWRSLGLALALCLLPSGGTESQDQSSLCKQPPAWSIRDQDPMLNSNGSVTVVALLQASCYLCILQASKLEDLRVKLKKEGYSNISYIVVNHQGISSRLKYTHLKNKVSEHIPVYQQEENQTDVWTLLNGSKDDFLIYDRCGRLVYHLGLPFSFLTFPYVEEAIKIAYCEKKCGNCSLTTLKDEDFCKRVSLATVDKTVETPSPHYHHEHHHNHGHQHLGSSELSENQQPGAPNAPTHPAPPGLHHHHKHKGQHRQGHPENRDMPASEDLQDLQKKLCRKRCINQLLCKLPTDSELAPRSCCCHCRHLIFEKTGSAITCQCKENLPSLCSCQGLRAEENITESCQCRLPPAACQISQQLIPTEASASCRCKNQAKKCECPSN

SEQ ID NO: 38249 - protein, 209 aa, Artificial Sequence
  derived and/or modified sequence
MWRSLGLALALCLLPSGGTESQDQSSLCKQPPAWSIRDQDPMLNSNGSVTVVALLQASCYLCILQASKLEDLRVKLKKEGYSNISYIVVNHQGISSRLKYTHLKNKVSEHIPVYQQEENQTDVWTLLNGSKDDFLIYDRCGRLVYHLGLPFSFLTFPYVEEAIKIAYCEKKCGNCSLTTLKDEDFCKRVSLATVDKTVETPSPHYHHEH

SEQ ID NO: 38250 - protein, 310 aa, Artificial Sequence
  derived and/or modified sequence
MWRSLGLALALCLLPSGGTESQDQSSLCKQPPAWSIRDQDPMLNSNGSVTVVALLQASCYLCILQASKLEDLRVKLKKEGYSNISYIVVNHQGISSRLKYTHLKNKVSEHIPVYQQEENQTDVWTLLNGSKDDFLIYDRCGRLVYHLGLPFSFLTFPYVEEAIKIAYCEKKCGNCSLTTLKDEDFCKRVSLATVDKTVETPSPHYHHEHHHNHGHQHLGSSELSENQQPGAPNAPTHPAPPGLHHHHKHKGQHRQGHPENRDMPASEDLQDLQKKLCRKRCINQLLCKLPTDSELAPRSCCCHCRHLIFE

SEQ ID NO: 38251 - DNA, 3058 bp, Artificial Sequence
  derived and/or modified sequence
acgtgagaccaccaagttcactgcttcaagcagcttagagtccagagggcatggacacatgccggagccaggacaagaagagccaccagaaagaaggctaggcattaaggaacagcaagtgcaaagttcctgagggaacaagcagacagagtctcactacgttgcccaggctgttctccaacactgggctagtgatcttcctgccttggcctcccaaagtgctgggattacaggtgtgagctgcaaggctaggtcctcgggctcctcaggccctgggccccctcccaggaatgagtcccgccgctccagcacaaaggggaagaagccctcgtcgccgctgggagaggcgccccctgagagcggcccggacgggaagctgggcccatctggagagctcatgtcacctgcagcatctgcggggacaggtggctgcgggacactctactctgcagcctgacaggggctcaccctccgcccagcacctggccctccaggaattctccacctgctgccagcctgcccggtcctgcagccagggcttcctgggccacaaagggttaatgacctgtgttttggctacccagttccgttaatgtccctggggtaaactgaggcaggaagcagaaggaaatgacctgcccagcctttggcctctgccagacaatctctgtccccaggaaagctcattccagtgctccagggccacaggccacctctgctccctgtcccctctcttcccagaacccagcagtttggcttgtagcccctcgccatctgagacagttcccagaacccaggttctcagggactcagcagttggagttgggcccagcctcttctctcaggaatgcaggaccctaaggcttgggaactgaggtatcttcgcccccaggaatccagctccttcccctgccagaagcccagatcccagcccctgacctcccgggtctctcgccctcattctcctgctacctcctgagcaggtgctttgactccaccctccagactcagaggtccccacctccaatgtcccccaccaaggattcccaccccagtccccattttccacgggactcaggcattcatgcccccacccctccggactcaggagccctgaccctcagccccccagtttcccagggccctggcgtggggcccaggacagggcgaggtaacaggttgtgccggccgcccggccgcagcgcggctcggagtttctgtttacttcccggtccgcccctggggacgggagccctgggctcccctagggcggctcaggggctggggttcaggggctcgggtcagagggcccgacacaacagctttaccagccccagccctccgggggctcaccacccactaggcacacacacccgtgctctccctcctcctctcgcccggtgtccatgtgcagccctgctcgcaggacgtgagtgtcacggtggtcccagcccagccgcccccaggccgctcccggggacctccctgacttggccctcgcgggccccgctcccccgcccccctccacgcgagagacagggacctggagaccgctccccctccccttccgcacctagctgcccaggtgttggggcctccagccccaggcgtcggaagcccagagaagcggctgggctcacccccgacggctgagttcctgccggcgcccccggttccccggcgatcccggttcccctgcccccgccccggctcccccaccttctccgccgacgcggccggaccaggccctccccaggctcgaggggcccggccctcggcgtcccccaggctctcacccgaagccgccgggctccctccgaggtccccgcggtctccggtcccctcttccggaggcggctccagagatgggattttgctctgtcacgcaggctggagtgcagtggcaccatcactgcagtctcgtcctcccaggctcaagcgatcctcccaccacagcctcccccgtagctgggactgcaggctggagtacagtggtgccatctcagctcacagcagcctccgctcccgggttcaagtgattctcctgtctcagcctgcctcccaaagtgctgggattacagagtgagccacctccccggctcaacttgttgactttcatgatgacctgatgacgaggaactgctgtcatccccatcttacagatgaggaagctgaggctcggaggcggaggggggtcctccaccttgtttggggtcccctggtcagaactggaagactccagggctccctgggcctcgtgacaggggctcctggcctggagagcaggacagatggaaggctgggagcagtggcgtgctggtaagcgtttaacaacaggctccccggctaaaacaatagccctcgctcgttgcatttgccaatatccatgatgcaatacctgctcctcggctgacttccagctactcacctggcgtcacggagtgcagaggtagaaggggctgtgcacatcagctctggctggctggtgtcagctgggtccgtgcacctctggctggggatcaggactcctgagtcttgggggactgggggctacttacttgggttctagaaaaataggaggagggtgggggctgggactcctggcttgtgggaaaaggggagcaaggactccttggaggggtgacttaggaactgggactcctgggtcctggggctgggacagggttttctgccagcagagagtaggggagccagagatttgtcttacagccacattgcccagcaagcctgacactttctcccactgcacctgtgggagcagcctggtagccactggaggactgaagacatcccagcctcccctgggtgctgctatgtgaccctctggaaatagaagctcagtgtcccctccaaatgccagtcaccctgggccccactcacacccacacgtagcacatcttgagcgcctcctgccaggctgagctcatcccaggatgaagtgattacagccctactcccagaaggttcacagtccacctgggccatgggagggagcgtagacctataaaccagaaatgaaccaataaaacagtacagc

SEQ ID NO: 38252 - DNA, 2204 bp, Artificial Sequence
  derived and/or modified sequence
acagacaggcaggtgcaggagacggggtgagcgcttttgggctctagccccatggcagcatctaggggtgtgttacaattaatgctcttttagcagttgctgttcgcggatggctaagtgttaaaccagctcagtggagagtcagggtggcagccttttacgccctgtcctcttggtacccgggtctttgtctagcatccaggaagaatcaggtcctacagacttgaaggatggtgaatacagagattttattgaatgatggaggaggctttcagcaggatggatggggagctggaaagcggatggagtgagaagataatcttcccctggggtttggccatcccatggctgatctctctgacagtccccagccgaactcctctcgatgttcagacactctttctcctctctcctctgccacactgctctgctgctcttctgctcatggagcctgaggacaaccccagcaatgtggagaagcctggggcttgccctggctctctgtctcctcccatcgggaggaacagagagccaggaccaaagctccttatgtaagcaacccccagcctggagcataagagatcaagatccaatgctaaactccaatggttcagtgactgtggttgctcttcttcaagccagctgatacctgtgcatactgcaggcatctaaattagaagacctgcgagtaaaactgaagaaagaaggatattctaatatttcttatattgttgttaatcatcaaggaatctcttctcgattaaaatacacacatcttaagaataaggtttcagagcatattcctgtttatcaacaagaagaaaaccaaacagatgtctggactcttttaaatggaagcaaagatgacttcctcatatatgatagatgtggccgtcttgtatatcatcttggtttgcctttttccttcctaactttcccatatgtagaagaagccattaagattgcttactgtgaaaagaaatgtggaaactgctctctcacgactctcaaagatgaagacttttgtaaacgtgtatctttggctactgtggataaaacagttgaaactccatcgcctcattaccatcatgagcatcatcacaatcatggacatcagcaccttggcagcagtgagctttcagagaatcagcaaccaggagcaccaaatgctcctactcatcctgctcctccaggccttcatcaccaccataagcacaagggtcagcataggcagggtcacccagagaaccgagatatgccagcaagtgaagatttacaagatttacaaaagaagctctgtcgaaagagatgtataaatcaattactctgtaaattgcccacagattcagagttggctcctaggagctgatgctgccattgtcgacatctgatatttgaaaaaacagggtctgcaatcacctgacagtgtaaagaaaacctcccatctttatgtagctgacagggacttcgggcagaggagaacataactgaatcttgtcagtgacgtttgcctccagctgcctgacaaataagtcagcagcttatacccacagaagccagtgccagttgacgctgaaagaatcaggcaaaaaagtgagaatgaccttcaaactaaatatttaaaataggacatactccccaatttagtctagacacaatttcatttccagcatttttataaactaccaaattagtgaaccaaaaatagaaattagatttgtgcaaacatggagaaatctactgaattggcttccagattttaaattttatgtcatagaaatattgactcaaaccatattttttatgatggagcaactgaaaggtgattgcagcttttggttaatatgtctttttttttctttttccagtgttctatttgctttaatgagaatagaaacgtaaactatgacctaggggtttctgttggataattagcagtttagaatggaggaagaacaacaaagacatgctttccatttttttctttacttatctctcaaaacaatattactttgtcttttcaatcttctacttttaactaataaaataagtggattttgtattttaagatccagaaatacttaacacgtgaatattttgctaaaaaagcatatataactattttaaatatccatttatcttttgtatatctaagactcatcctgatttttactatcacacatgaataaagcctttgtatcttt

SEQ ID NO: 38253 - DNA, 787 bp, Artificial Sequence
  derived and/or modified sequence
tgtggagctgccagagtaaagcaaagagaaaggaagcaggcccgttggaagtggttgtctacttgcaatatgtgctctgggctggacgcggtggctcacgcttgtaatcccagcactttgggaggccaaggcaggcggatcacgaggacaaccccagcaatgtggagaagcctggggcttgccctggctctctgtctcctcccatcgggaggaacagagagccaggaccaaagctccttatgtaagcaacccccagcctggagcataagagatcaagatccaatgctaaactccaatggttcagtgactgtggttgctcttcttcaagccagctgatacctgtgcatactgcaggcatctaaattagaagacctgcgagtaaaactgaagaaagaaggatattctaatatttcttatattgttgttaatcatcaaggaatctcttctcgattaaaatacacacatcttaagaataaggtttcagagcatattcctgtttatcaacaagaagaaaaccaaacagatgtctggactcttttaaatggaagcaaagatgacttcctcatatatgatagatgtggccgtcttgtatatcatcttggtttgcctttttccttcctaactttcccatatgtagaagaagccattaagattgcttactgtgaaaagaaatgtggaaactgctctctcacgactctcaaagatgaagacttttgtaaacgtgtatctttggctactgtggataaaacagttgaaactccatcgcctcattaccatcatgagcatc

SEQ ID NO: 38254 - DNA, 1853 bp, Artificial Sequence
  derived and/or modified sequence
gtggagctgccagagtaaagcaaagagaaaggaagcaggcccgttggaagtggttgtttaagttcttatcaagatatcatatataggacaaccccagcaatgtggagaagcctggggcttgccctggctctctgtctcctcccatcgggaggaacagagagccaggaccaaagctccttatgtaagcaacccccagcctggagcataagagatcaagatccaatgctaaactccaatggttcagtgactgtggttgctcttcttcaagccagctgatacctgtgcatactgcaggcatctaaattagaagacctgcgagtaaaactgaagaaagaaggatattctaatatttcttatattgttgttaatcatcaaggaatctcttctcgattaaaatacacacatcttaagaataaggtttcagagcatattcctgtttatcaacaagaagaaaaccaaacagatgtctggactcttttaaatggaagcaaagatgacttcctcatatatgatagatgtggccgtcttgtatatcatcttggtttgcctttttccttcctaactttcccatatgtagaagaagccattaagattgcttactgtgaaaagaaatgtggaaactgctctctcacgactctcaaagatgaagacttttgtaaacgtgtatctttggctactgtggataaaacagttgaaactccatcgcctcattaccatcatgagcatcatcacaatcatggacatcagcaccttggcagcagtgagctttcagagaatcagcaaccaggagcaccaaatgctcctactcatcctgctcctccaggccttcatcaccaccataagcacaagggtcagcataggcagggtcacccagagaaccgagatatgccagcaagtgaagatttacaagatttacaaaagaagctctgtcgaaagagatgtataaatcaattactctgtaaattgcccacagattcagagttggctcctaggagctgatgctgccattgtcgacatctgatatttgaaaaaacagggtctgcaatcacctgacagtgtaaagaaaacctcccatctttatgtagctgacagggacttcgggcagaggagaacataactgaatcttgtcagtgacgtttgcctccagctgcctgacaaataagtcagcagcttatacccacagaagccagtgccagttgacgctgaaagaatcaggcaaaaaagtgagaatgaccttcaaactaaatatttaaaataggacatactccccaatttagtctagacacaatttcatttccagcatttttataaactaccaaattagtgaaccaaaaatagaaattagatttgtgcaaacatggagaaatctactgaattggcttccagattttaaattttatgtcatagaaatattgactcaaaccatattttttatgatggagcaactgaaaggtgattgcagcttttggttaatatgtctttttttttctttttccagtgttctatttgctttaatgagaatagaaacgtaaactatgacctaggggtttctgttggataattagcagtttagaatggaggaagaacaacaaagacatgctttccatttttttctttacttatctctcaaaacaatattactttgtcttttcaatcttctacttttaactaataaaataagtggattttgtattttaagatccagaaatacttaacacgtgaatattttgctaaaaaagcatatataactattttaaatatccatttatcttttgtatatctaagactcatcctgatttttactatcacacatgaataaagcctttgtatctttctttctctaatgttgtatc

SEQ ID NO: 38255 - DNA, 1047 bp, Artificial Sequence
  derived and/or modified sequence
caggagcatgacgagggagagaggtcatcgaggctggggtgagacatctgacttaccgtcaggagccacgtcagtgcctcataaaatccaatctccattcaggacaaccccagcaatgtggagaagcctggggcttgccctggctctctgtctcctcccatcgggaggaacagagagccaggaccaaagctccttatgtaagcaacccccagcctggagcataagagatcaagatccaatgctaaactccaatggttcagtgactgtggttgctcttcttcaagccagctgatacctgtgcatactgcaggcatctaaattagaagacctgcgagtaaaactgaagaaagaaggatattctaatatttcttatattgttgttaatcatcaaggaatctcttctcgattaaaatacacacatcttaagaataaggtttcagagcatattcctgtttatcaacaagaagaaaaccaaacagatgtctggactcttttaaatggaagcaaagatgacttcctcatatatgatagatgtggccgtcttgtatatcatcttggtttgcctttttccttcctaactttcccatatgtagaagaagccattaagattgcttactgtgaaaagaaatgtggaaactgctctctcacgactctcaaagatgaagacttttgtaaacgtgtatctttggctactgtggataaaacagttgaaactccatcgcctcattaccatcatgagcatcatcacaatcatggacatcagcaccttggcagcagtgagctttcagagaatcagcaaccaggagcaccaaatgctcctactcatcctgctcctccaggccttcatcaccaccataagcacaagggtcagcataggcagggtcacccagagaaccgagatatgccagcaagtgaagatttacaagatttacaaaagaagctctgtcgaaagagatgtataaatcaattactctgtaaattgcccacagattcagagttggctcctaggagctgatgctgccattgtcgacatctgatatttgaaaa

SEQ ID NO: 38256 - DNA, 2243 bp, Artificial Sequence
  derived and/or modified sequence
gtcaaaatgttttccccatattatgcatggcagcacttgctactttcttttaagttgataacaatcagctcaggggtttgctctgcttgcaaggtcactgcaagaatgaacattgaactttggactatacctgaggggtgaggtaaacaacaggactataaatatcagagtgtgctgctgtggctttgtggagctgccagagtaaagcaaagagaaaggaagcaggcccgttggaagtggttgtgacaaccccagcaatgtggagaagcctggggcttgccctggctctctgtctcctcccatcgggaggaacagagagccaggaccaaagctccttatgtaagcaacccccagcctggagcataagagatcaagatccaatgctaaactccaatggttcagtgactgtggttgctcttcttcaagccagctgatacctgtgcatactgcaggcatctaaattagaagacctgcgagtaaaactgaagaaagaaggatattctaatatttcttatattgttgttaatcatcaaggaatctcttctcgattaaaatacacacatcttaagaataaggtttcagagcatattcctgtttatcaacaagaagaaaaccaaacagatgtctggactcttttaaatggaagcaaagatgacttcctcatatatgatagatgtggccgtcttgtatatcatcttggtttgcctttttccttcctaactttcccatatgtagaagaagccattaagattgcttactgtgaaaagaaatgtggaaactgctctctcacgactctcaaagatgaagacttttgtaaacgtgtatctttggctactgtggataaaacagttgaaactccatcgcctcattaccatcatgagcatcatcacaatcatggacatcagcaccttggcagcagtgagctttcagagaatcagcaaccaggagcaccaaatgctcctactcatcctgctcctccaggccttcatcaccaccataagcacaagggtcagcataggcagggtcacccagagaaccgagatatgccagcaagtgaagatttacaagatttacaaaagaagctctgtcgaaagagatgtataaatcaattactctgtaaattgcccacagattcagagttggctcctaggagctgatgctgccattgtcgacatctgatatttgaaaaaacagggtctgcaatcacctgacagtgtaaagaaaacctcccatctttatgtagctgacagggacttcgggcagaggagaacataactgaatcttgtcagtgacgtttgcctccagctgcctgacaaataagtcagcagcttatacccacagaagccagtgccagttgacgctgaaagaatcaggcaaaaaagtgagaatgaccttcaaactaaatatttaaaataggacatactccccaatttagtctagacacaatttcatttccagcatttttataaactaccaaattagtgaaccaaaaatagaaattagatttgtgcaaacatggagaaatctactgaattggcttccagattttaaattttatgtcatagaaatattgactcaaaccatattttttatgatggagcaactgaaaggtgattgcagcttttggttaatatgtctttttttttctttttccagtgttctatttgctttaatgagaatagaaacgtaaactatgacctaggggtttctgttggataattagcagtttagaatggaggaagaacaacaaagacatgctttccatttttttctttacttatctctcaaaacaatattactttgtcttttcaatcttctacttttaactaataaaataagtggattttgtattttaagatccagaaatacttaacacgtgaatattttgctaaaaaagcatatataactattttaaatatccatttatcttttgtatatctaagactcatcctgatttttactatcacacatgaataaagcctttgtatctttctttctctaatgttgtatcatactcttctaaaacttgagtggctgtcttaaaagatataaggggaaagataatattgtctgtctctatattgcttagtaagtatttccatagtcaatgatggtttaataggtaaaccaaaccctataaacctgacctcctttatggttaatactattaagcaagaatgcagtacagaattggatacagtacggatttgtccaaataaattcaataaaaaccttaaagctga

SEQ ID NO: 38257 - protein, 513 aa, Artificial Sequence
  derived and/or modified sequence
MNLDSIHRLIEETQIFQMQQSSIKSRGDMVAPASPPRDTCNTCFPLHGLQSHAAHNFCAHSYNTNKWDICEELRLRELEEVKARAAQMEKTMRWWSDCTANWREKWSKVRAERNSAREEGRQLRIKLEMAMKELSTLKKKQSLPPQKEALEAKVTQDLKLPGFVEESCEHTDQFQLSSQMHESIREYLVKRQFSTKEDTNNKEQGVVIDSLKLSEEMKPNLDGVDLFNNGGSGNGETKTGLRLKAINLPLENEVTEISALQVHLDEFQKILWKEREMRTALEKEIERLESALSLWKWKYEELKESKPKNVKEFDILLGQHNDEMQELSGNIKEESKSQNSKDRVICELRAELERLQAENTSEWDKREILEREKQGLERENRRLKIQVKEMEELLDKKNRLSANSQSPDFKMSQIDLQEKNQELLNLQHAYYKLNRQYQANIAELTHANNRVDQNEAEVKKLRLRVEELKQGLNQKEDELDDSLNQIRKLQRSLDEEKERNENLETELRHLQNW

SEQ ID NO: 38258 - DNA, 1542 bp, Artificial Sequence
  derived and/or modified sequence
atgaacctggacagcatccacagactgatcgaggagacccagatcttccagatgcagcagagcagcatcaagagcagaggcgacatggtggcccccgccagcccccccagagacacctgcaacacctgcttccccctgcacggcctgcagagccacgccgcccacaacttctgcgcccacagctacaacaccaacaagtgggacatctgcgaggagctgagactgagagagctggaggaggtgaaggccagagccgcccagatggagaagaccatgagatggtggagcgactgcaccgccaactggagagagaagtggagcaaggtgagagccgagagaaacagcgccagagaggagggcagacagctgagaatcaagctggagatggccatgaaggagctgagcaccctgaagaagaagcagagcctgcccccccagaaggaggccctggaggccaaggtgacccaggacctgaagctgcccggcttcgtggaggagagctgcgagcacaccgaccagttccagctgagcagccagatgcacgagagcatcagagagtacctggtgaagagacagttcagcaccaaggaggacaccaacaacaaggagcagggcgtggtgatcgacagcctgaagctgagcgaggagatgaagcccaacctggacggcgtggacctgttcaacaacggcggcagcggcaacggcgagaccaagaccggcctgagactgaaggccatcaacctgcccctggagaacgaggtgaccgagatcagcgccctgcaggtgcacctggacgagttccagaagatcctgtggaaggagagagagatgagaaccgccctggagaaggagatcgagagactggagagcgccctgagcctgtggaagtggaagtacgaggagctgaaggagagcaagcccaagaacgtgaaggagttcgacatcctgctgggccagcacaacgacgagatgcaggagctgagcggcaacatcaaggaggagagcaagagccagaacagcaaggacagagtgatctgcgagctgagagccgagctggagagactgcaggccgagaacaccagcgagtgggacaagagagagatcctggagagagagaagcagggcctggagagagagaacagaagactgaagatccaggtgaaggagatggaggagctgctggacaagaagaacagactgagcgccaacagccagagccccgacttcaagatgagccagatcgacctgcaggagaagaaccaggagctgctgaacctgcagcacgcctactacaagctgaacagacagtaccaggccaacatcgccgagctgacccacgccaacaacagagtggaccagaacgaggccgaggtgaagaagctgagactgagagtggaggagctgaagcagggcctgaaccagaaggaggacgagctggacgacagcctgaaccagatcagaaagctgcagagaagcctggacgaggagaaggagagaaacgagaacctggagaccgagctgagacacctgcagaactggtag

SEQ ID NO: 38259 - DNA, 2644 bp, Artificial Sequence
  derived and/or modified sequence
agaacttggcaggatgaagacaaagtgtgtgaaaggtcttaaaaataaatatgaatttagattccatacatcgattaattgaggaaacacagatcttccagatgcaacaatcatcaattaagtcacgcggcgacatggtggcacctgcctcaccccccagggatacctgtaatacctgcttcccacttcatgggctacaatctcatgctgctcacaatttctgtgctcactcatataacaccaacaaatgggatatttgtgaagaacttcgcctgcgggagcttgaagaagtcaaggccagagctgctcagatggaaaagaccatgcggtggtggtcggactgcactgccaactggagagaaaaatggagtaaagttcgagctgaaaggaacagtgccagggaggaaggaagacaactcagaataaaactagagatggcgatgaaagaattgagtacactgaaaaagaaacagagtttgccacctcagaaggaggcattagaagctaaagttacccaggatctgaagcttcctggcttcgtagaagaatcctgtgaacatacagaccaatttcaattgagttcacaaatgcatgagtctatcagagagtatttggtaaaaagacaattttctacaaaggaggacacaaataataaggaacaaggtgtggttattgattctctaaaattaagtgaggagatgaagcccaatctagatggtgttgatttattcaacaatggtggttctggaaacggtgaaacgaaaactgggctgagactgaaagcaataaatctgcctttggaaaatgaagtaactgaaatttcagctttgcaggtgcatttggatgaattccaaaaaatcttatggaaggaaagagaaatgcgcacagctttggaaaaagaaatagagagactggagtcggctttgtctctgtggaagtggaagtatgaagaactgaaagaatcaaagccaaaaaatgtgaaagagtttgacattcttcttggtcaacataatgatgaaatgcaagaactgtcaggcaatataaaggaagaatccaaatctcaaaacagcaaagacagagtgatttgtgagttaagagcagagctagagagattgcaagctgaaaatacctcggagtgggacaagagggaaatacttgaaagagaaaagcagggactggagagagaaaatagaaggctgaagatccaggtgaaagaaatggaagagcttttggataagaaaaatagattaagtgcaaactctcaaagtcctgatttcaagatgtcacaaattgatctgcaagaaaaaaaccaggaattactgaaccttcaacatgcctactataaactaaacagacaataccaggcaaatattgcagaactgactcatgcaaacaaccgagtggatcaaaatgaagcagaagtaaagaaactaagattacgagtggaagaactaaagcagggactcaatcaaaaagaagatgagcttgatgattccctgaatcagatccgtaagctccagaggtctctggatgaagagaaagaaagaaatgaaaacttagagactgaactcaggcacttgcaaaactggtaattttttcacaaaatatgctgaattaaagattagggccttaaagacatttccatatccttttcttaaatatcagtaaaattgtttttattaactagaaatattaatgaaaaaaacgtagacaatacacaaattaatgggcttcttcacttcttctaatttttgcctaacagatactgcatattctcaaaaagacaatttaaatgtcatttaaaaacaactttaattctaagatgtgtaaatattttgaaagtcaaaaagggctttcagaatactttttacataaaatctgaaagagttataatatcggtaagaaaaagtaagttgaaaaccatacaagacgctgggtcattaataagaaaaccattgactttaagtataaagtactggtttgtttaaataattggtaaacttttatgtacgtgttgtctatgtggtggggatggcaggttgtattaacaaaaatgaatcattctagaggtgtaacaatacatttcttatataattttataagtcatttctaatctttgtataaaacagaagtgagcagatgaatcagaaaaaagtgttttgtattttaaagtaacagataaccagtgattgaatctaagacaggctgtaagcatcgctgagaaactaaaaggacttttgacttttatctggatagacatttctacagtaaaatcatggaaaggcatcagcattgcaaagtagcatctaggtagaaatcaggccaaaattaagctgtggtttccctctgagtagtgggaatagagaaaattaggaaattgtggttatgtgaatatttctttaaaacttttatgtacattatagtttattgcttcatatttaagtttagtttttaaggtaaaatgttattttgaacaaaaagacacttataattttccatacctattttcaactgaaggcaacttgtaagatttaactcagtcaataacatactggttttactcatctccccctccattgattagccaaaaaaaaatgaaatcttactaattcattattgaataaagaccacttttatcagagtc

SEQ ID NO: 38260 - DNA, 2666 bp, Artificial Sequence
  derived and/or modified sequence
gttgtttacacatgtggctgcaactgagacactggagcagcccagcaagcccagagggtcttaaaaataaatatgaatttagattccatacatcgattaattgaggaaacacagatcttccagatgcaacaatcatcaattaagtcacgcggcgacatggtggcacctgcctcaccccccagggatacctgtaatacctgcttcccacttcatgggctacaatctcatgctgctcacaatttctgtgctcactcatataacaccaacaaatgggatatttgtgaagaacttcgcctgcgggagcttgaagaagtcaaggccagagctgctcagatggaaaagaccatgcggtggtggtcggactgcactgccaactggagagaaaaatggagtaaagttcgagctgaaaggaacagtgccagggaggaaggaagacaactcagaataaaactagagatggcgatgaaagaattgagtacactgaaaaagaaacagagtttgccacctcagaaggaggcattagaagctaaagttacccaggatctgaagcttcctggcttcgtagaagaatcctgtgaacatacagaccaatttcaattgagttcacaaatgcatgagtctatcagagagtatttggtaaaaagacaattttctacaaaggaggacacaaataataaggaacaaggtgtggttattgattctctaaaattaagtgaggagatgaagcccaatctagatggtgttgatttattcaacaatggtggttctggaaacggtgaaacgaaaactgggctgagactgaaagcaataaatctgcctttggaaaatgaagtaactgaaatttcagctttgcaggtgcatttggatgaattccaaaaaatcttatggaaggaaagagaaatgcgcacagctttggaaaaagaaatagagagactggagtcggctttgtctctgtggaagtggaagtatgaagaactgaaagaatcaaagccaaaaaatgtgaaagagtttgacattcttcttggtcaacataatgatgaaatgcaagaactgtcaggcaatataaaggaagaatccaaatctcaaaacagcaaagacagagtgatttgtgagttaagagcagagctagagagattgcaagctgaaaatacctcggagtgggacaagagggaaatacttgaaagagaaaagcagggactggagagagaaaatagaaggctgaagatccaggtgaaagaaatggaagagcttttggataagaaaaatagattaagtgcaaactctcaaagtcctgatttcaagatgtcacaaattgatctgcaagaaaaaaaccaggaattactgaaccttcaacatgcctactataaactaaacagacaataccaggcaaatattgcagaactgactcatgcaaacaaccgagtggatcaaaatgaagcagaagtaaagaaactaagattacgagtggaagaactaaagcagggactcaatcaaaaagaagatgagcttgatgattccctgaatcagatccgtaagctccagaggtctctggatgaagagaaagaaagaaatgaaaacttagagactgaactcaggcacttgcaaaactggtaattttttcacaaaatatgctgaattaaagattagggccttaaagacatttccatatccttttcttaaatatcagtaaaattgtttttattaactagaaatattaatgaaaaaaacgtagacaatacacaaattaatgggcttcttcacttcttctaatttttgcctaacagatactgcatattctcaaaaagacaatttaaatgtcatttaaaaacaactttaattctaagatgtgtaaatattttgaaagtcaaaaagggctttcagaatactttttacataaaatctgaaagagttataatatcggtaagaaaaagtaagttgaaaaccatacaagacgctgggtcattaataagaaaaccattgactttaagtataaagtactggtttgtttaaataattggtaaacttttatgtacgtgttgtctatgtggtggggatggcaggttgtattaacaaaaatgaatcattctagaggtgtaacaatacatttcttatataattttataagtcatttctaatctttgtataaaacagaagtgagcagatgaatcagaaaaaagtgttttgtattttaaagtaacagataaccagtgattgaatctaagacaggctgtaagcatcgctgagaaactaaaaggacttttgacttttatctggatagacatttctacagtaaaatcatggaaaggcatcagcattgcaaagtagcatctaggtagaaatcaggccaaaattaagctgtggtttccctctgagtagtgggaatagagaaaattaggaaattgtggttatgtgaatatttctttaaaacttttatgtacattatagtttattgcttcatatttaagtttagtttttaaggtaaaatgttattttgaacaaaaagacacttataattttccatacctattttcaactgaaggcaacttgtaagatttaactcagtcaataacatactggttttactcatctccccctccattgattagccaaaaaaaaatgaaatcttactaattcattattgaataaagaccacttttatcagagtc

SEQ ID NO: 38261 - DNA, 1542 bp, Artificial Sequence
  derived and/or modified sequence
atgaatctcgattctatacaccggctgattgaagaaacacagatcttccaaatgcaacagtcttcaataaagagcaggggtgatatggtcgcccctgccagcccaccccgagacacctgcaacacctgttttcctcttcatggacttcaaagtcacgccgcacataacttctgtgcacactcctacaatactaacaagtgggacatctgtgaggaattgcgccttcgggagctagaagaagtcaaagccagagctgcgcagatggagaaaactatgcgctggtggtcagattgcacagccaactggagagaaaagtggagtaaagtccgcgccgagcgaaactctgcacgcgaggagggacggcagctgcggattaaacttgagatggcaatgaaagagcttagcaccctgaaaaaaaaacaatctttgcctcctcagaaggaggcactagaggccaaggtgacccaagatttaaagcttccaggttttgtggaggagtcttgcgagcataccgaccagttccaactatcaagccaaatgcacgaatcaatcagagagtacctggtgaagcggcagttcagcacaaaggaggacaccaacaataaagagcagggagtggtgattgacagtctgaaactgagcgaggaaatgaaacctaatctcgacggagtggacctctttaataatgggggatccgggaatggcgagaccaagactggcctgcggctgaaagcaatcaacctgccactcgagaatgaggtaacggagattagcgccctccaggtccatctagacgaatttcaaaagattctgtggaaggagcgagagatgcgcactgccttggaaaaagagattgagcgccttgagagcgctcttagtttgtggaagtggaaatacgaggaattaaaggaatctaaaccaaagaacgtgaaggaatttgacattctcttggggcagcacaacgatgaaatgcaggaactgagcggtaacattaaagaggaatctaaatctcagaacagcaaggacagagtcatctgcgagctgcgcgctgagcttgagcggctgcaagccgagaatacgagcgaatgggataagcgagaaatcttagagagagagaagcagggactggagagggaaaatcgccggctgaagatccaagtgaaagagatggaagagctgctggataaaaaaaatagattatctgcgaatagccagtccccagactttaagatgtcacaaatcgacctccaagagaagaaccaggagttgctgaacctgcagcatgcttactacaaattaaacaggcaatatcaggctaacattgccgagttaacccatgcaaataaccgggtggatcagaatgaggcagaagttaaaaagctgcgtctaagggtggaggagctcaaacaaggactgaaccagaaagaggacgaactggatgacagcttgaatcagattagaaaactgcagagatcattagacgaggagaaggaaaggaacgaaaacctcgagacagagctaagacacctgcaaaactggtag

SEQ ID NO: 38262 - DNA, 1542 bp, Artificial Sequence
  derived and/or modified sequence
atgaacctggattcaatacatagactcattgaggagacccaaatcttccaaatgcaacaatcttccattaagagcagaggcgatatggtggccccggcgtcaccgccaagggacacttgtaatacatgcttcccgctccacggccttcaatctcacgcagcccataatttttgcgcacattcctataacacaaacaagtgggacatttgcgaggaactcagactcagggagctggaggaagtcaaggccagagccgcccagatggagaaaaccatgcggtggtggtccgattgcaccgccaattggagggagaagtggtccaaggttagggccgagcgcaattcagcacgcgaagagggtaggcagttgcgcatcaaacttgaaatggccatgaaagagttatccaccctgaagaaaaaacagtccctgcctccacagaaagaggcactggaggccaaggtcacacaggatctaaaactcccaggcttcgtagaagaaagctgcgagcacacagatcagtttcaattgtcctctcagatgcacgaatcaatcagggagtacctcgtgaaacggcaattttcaactaaagaggacaccaataacaaggaacaaggagtcgtcatagactctctcaaactcagcgaggaaatgaagccgaatctcgacggcgtcgatttattcaataatgggggaagcggcaacggggaaactaagaccggtctgcggctgaaggccatcaatctaccgctcgagaatgaggtaaccgagattagtgctctgcaggtccatcttgatgagtttcagaagattctgtggaaggagagagaaatgaggacggccttggaaaaggagatcgagagactagaatcagccctcagcctctggaagtggaaatatgaggagctgaaggaaagtaaacccaagaatgtgaaggaatttgatatcctcctgggacaacacaatgacgagatgcaagagcttagtggtaatatcaaggaggagagtaaatcccagaactcaaaggatcgcgtaatatgtgagctgagggccgaattggagcggttacaggccgaaaacactagtgagtgggataagcgcgaaattcttgagcgcgaaaaacagggcctggagcgcgagaacaggaggttaaagatacaagtaaaggagatggaagagctgctcgataagaagaataggttatccgccaacagtcagagtcctgattttaagatgtctcaaatcgacctgcaggagaaaaatcaggagttacttaatcttcagcatgcttattacaaactcaacaggcagtaccaggctaacatcgccgagctcactcatgcaaacaaccgcgttgaccaaaacgaggctgaggttaagaaactgaggttacgggtcgaagaactgaaacaggggttaaatcaaaaggaggatgaacttgatgactccctgaaccagatcaggaaactacagcggtcgctggatgaggaaaaggagcggaacgagaacctggagaccgagctcagacatctacagaattggtag

SEQ ID NO: 38263 - DNA, 1542 bp, Artificial Sequence
  derived and/or modified sequence
atgaacctggacagcatccacaggctcatcgaggagacccagatcttccagatgcagcagagcagcatcaagagcagaggagacatggtggccccagccagccccccccgggacacctgcaacacctgcttccccctgcacggcctgcagagccatgctgcccacaacttctgtgcccacagctacaacaccaacaagtgggacatctgtgaggagctgcggctgcgggagctggaggaggtgaaggcccgggccgcccagatggagaagaccatgcgctggtggagcgactgcacagccaactggagggagaagtggagcaaggtgcgggcagagagaaattctgcccgggaggagggccggcagctgcgcatcaagctggagatggccatgaaggagctgagcaccctgaagaagaagcagagcctgcccccccagaaggaggccctggaggccaaggtgacccaggacctgaagctgcccggctttgtggaggagagctgtgagcacacagaccagttccagctgagcagccagatgcatgagagcatccgggagtacctggtgaagaggcagttcagcaccaaggaggacaccaacaacaaggagcagggcgtggtgattgacagcctgaagctgtctgaggagatgaagcccaacctggatggagtggacctcttcaacaatggaggcagcggaaatggagagaccaagacaggcctgcggctgaaggccatcaacctgcccctggagaatgaggtgacagagatcagcgccctgcaggtgcacctggatgagttccagaagatcctgtggaaggagcgggagatgaggacagccctggagaaggagattgagcggctggagagcgccctgagcctgtggaagtggaagtatgaggagctgaaggagagcaagcccaagaatgtgaaggagtttgacatcctgctgggccagcacaatgatgagatgcaggagctgagcggcaacatcaaggaggagagcaagagccagaacagcaaggacagagtcatctgtgagctgcgggcagagctggagcggctgcaggccgagaacaccagcgagtgggacaagcgggagatcctggagcgggagaagcagggcctggagagagaaaatagaaggctgaagatccaggtgaaggagatggaggagctgctggacaagaagaaccggctgagcgccaacagccagagcccagacttcaagatgagccagattgacctgcaggagaagaaccaggagctgctgaacctgcagcacgcctactacaagctgaaccggcagtaccaggccaacattgctgagctgacccacgccaacaacagagtggaccagaatgaggccgaggtgaagaagctgcggctgcgggtggaggagctgaagcagggcctgaaccagaaggaggatgagctggatgacagcctgaaccagatcaggaagctgcagaggagcctggatgaggagaaggagagaaatgaaaacctggagacagagctgcggcacctgcagaactggtag

SEQ ID NO: 38264 - DNA, 1542 bp, Artificial Sequence
  derived and/or modified sequence
atgaacctggacagcatccaccggctgatcgaggagacccagatctttcagatgcagcagtcttccatcaagagtagaggagacatggtcgcacccgcaagccctcctagagatacatgtaacacctgcttcccgctccatgggctacagtcacatgccgcccacaacttttgtgcccacagctacaatacaaataagtgggacatttgtgaggagttgagattacgtgagcttgaggaggttaaagccagagccgcccagatggagaaaacaatgcgctggtggtctgattgcaccgcaaactggagagagaagtggtcaaaagtgagggctgaacgaaattctgctcgagaagaaggaaggcagctcaggattaagctggagatggctatgaaggagttatccacactgaagaagaagcaatcccttcctccccagaaagaagccctcgaagccaaagtgacccaggacctcaaactgccaggatttgttgaggagtcttgtgagcatactgaccagtttcaactgtctagtcaaatgcacgagtcaatcagagagtacctggtgaaaaggcaatttagtaccaaagaagatacgaataataaggaacagggtgtcgtcattgactccttaaagctttctgaagagatgaagcccaatcttgatggggtggacctgttcaacaacggcggatcaggaaacggtgagactaaaacgggccttaggctgaaggccatcaacctccctctggagaacgaggtcactgagatttccgccctgcaggttcacctcgatgagtttcaaaaaattctctggaaagaaagggaaatgcggacagcactggaaaaggagattgaacggctcgagtcggccctctccctgtggaagtggaagtacgaagaactgaaggagtcaaaacctaagaacgtaaaggagtttgacattttactgggacagcataatgacgaaatgcaggaactctcaggcaatataaaggaggagtctaagtcccagaatagcaaagaccgagttatctgcgaactcagagctgaactggaaaggttgcaggcagagaacacttccgagtgggacaaacgagaaattctggaaagagagaaacaggggctggagagggagaacaggcgcctgaagatccaggttaaggaaatggaggaactcctggataaaaaaaacagactgtccgctaactcacagtctcctgattttaagatgtctcaaatcgatctccaggaaaaaaatcaggagctgctgaacctacagcatgcatattacaagctcaatagacagtaccaagccaacatcgccgaactgacacatgccaataaccgggtggatcagaacgaagccgaggtgaagaaactgaggttgagagtggaggagctgaaacagggtctgaaccagaaggaagacgagctggatgacagcctgaatcaaattcggaagctccaaagatccctggatgaagagaaagagcggaacgaaaatctggaaaccgagttgaggcatttacagaactggtag

SEQ ID NO: 38265 - DNA, 1542 bp, Artificial Sequence
  derived and/or modified sequence
atgaacctggacagcatccaccggctgatcgaggagacccagatcttccaaatgcagcagtccagcatcaagtcgcggggagacatggtggccccagcctcccctccccgagacacttgcaacacatgtttccccctgcacgggctgcagagtcatgccgcccacaatttctgcgcacattcatacaacacaaataagtgggacatttgcgaagagctgcgtctgagagagctggaggaagtcaaggccagagcagcacaaatggaaaagaccatgcgctggtggagcgactgtaccgcaaactggcgggagaaatggagcaaggttagagctgagcggaactcagcacgtgaagaaggtcgccaactgagaatcaagcttgagatggcaatgaaagagctttcgactctcaaaaagaaacagtctcttcccccacagaaggaagccttggaggccaaggtcacacaggatctgaagttgcccggattcgtggaggagtcatgcgaacacactgaccagttccagctgtcaagccagatgcacgagtctatcagagagtatctggtgaagagacagttcagcacaaaggaagatacaaacaataaagagcagggggtggtgattgattccctgaaattaagcgaagaaatgaaaccgaatctcgacggcgtcgacttattcaacaatggcggcagtggaaatggcgaaacaaagacaggattgcgactgaaggccattaatctgcccctggagaacgaggtgacagaaatttctgcccttcaggttcatttagatgaatttcaaaagatattatggaaggagagagagatgcgtacggcactagagaaagaaatagaaaggctggaaagtgccctgtccctgtggaaatggaagtacgaggaactcaaggaatcaaaacccaagaatgtcaaggaatttgacatcctgctggggcaacacaatgatgagatgcaagagctttcaggaaatatcaaagaagaaagtaagagtcagaattccaaggatagggtgatctgcgaactgcgagcagagttggaaagactacaagccgaaaacacctcagagtgggataagcgcgagatccttgagcgcgagaagcagggcttggagagggagaatcggaggctgaaaattcaggttaaagaaatggaagaactattggacaagaaaaacaggctttcagcgaatagtcagtcacctgatttcaagatgagccaaatcgatcttcaggagaaaaaccaagaactgctgaacctccaacatgcctattataaactcaaccgccagtaccaggctaacatcgcagagctcactcatgccaataacagagttgaccaaaatgaggcagaggtgaaaaagcttaggctacgagtggaggagctgaagcagggcctcaaccagaaagaagacgagctggacgatagcctgaaccaaattcgcaagttgcaacgaagcttggacgaggaaaaagaaaggaacgagaatctcgagactgaacttcggcacttacaaaactggtag

SEQ ID NO: 38266 - DNA, 1542 bp, Artificial Sequence
  derived and/or modified sequence
atgaatttggattcaattcatcgcctgatcgaggagactcagatatttcaaatgcaacagtccagcatcaaaagcaggggcgatatggtcgcccctgcgtcacctccccgtgacacttgtaacacctgctttcccctgcatggtctgcaatcacacgcagcccacaatttctgtgctcatagctacaatacaaataaatgggatatttgtgaggaactgcggttgagggagctcgaggaagtgaaggcgagggccgcacaaatggagaaaactatgaggtggtggtccgattgcacagctaactggagggaaaaatggtcaaaagttcgagccgagagaaacagcgctcgggaagagggacgccagctgcgcattaagctagagatggctatgaaggaactgagtacacttaaaaagaaacagagccttccaccacagaaagaagcactcgaggctaaagtcacacaggacctcaagttgcccggatttgtcgaagagtcttgcgagcacacggaccaattccagttatcatctcaaatgcacgaatcgatacgagagtacttggtgaaaaggcaattttctactaaggaagacacaaacaacaaagagcagggggtggtcatcgattcccttaagctcagcgaggagatgaaaccgaatctagacggcgtggatctgtttaacaatggtgggtctgggaacggagaaactaagacaggcctgagactgaaggccatcaacctccctctggagaatgaagtgaccgaaatctctgcccttcaagtgcacctggatgagttccaaaaaatcctgtggaaggagagggaaatgaggacagctttggagaaagagattgaacggcttgagagtgcattatcactgtggaagtggaagtacgaggaactgaaggagagcaaacccaagaatgtgaaggagtttgacatccttctgggtcagcacaatgacgagatgcaagaattaagcggcaacatcaaagaggagagcaaaagtcagaactcaaaagacagggtcatttgcgagttgagggcagagctggagcgtctgcaggccgagaataccagcgagtgggataagagggagatccttgagcgggaaaaacagggcctggagcgggagaatagacgacttaagatccaggtgaaggagatggaggaattgttagacaagaaaaaccgattgtctgcaaactcccagtcgcctgatttcaagatgagccagatcgatctccaagagaagaaccaggaattactcaacctgcaacatgcttattacaagctgaatcggcaataccaggccaatatagcagaactgacccatgccaacaaccgggtagatcaaaatgaggccgaggtgaagaagctgcggctaagagttgaagagttgaaacaggggctgaaccagaaagaagatgagctcgacgactcactgaaccaaatccgtaaactgcagaggtcactggacgaagagaaggaacgtaatgagaacctggaaacggagcttaggcatttacagaattggtag

SEQ ID NO: 38267 - DNA, 1542 bp, Artificial Sequence
  derived and/or modified sequence
atgaatctggactcaatccaccgactaattgaagagacacagatctttcagatgcagcagagttccatcaagtcccggggagacatggttgcaccagcatcacccccaagggatacatgtaatacatgcttccctctacacggattgcagagccacgccgcacacaatttctgcgcccatagttacaacaccaacaaatgggatatatgtgaagagctgcgactccgcgaactggaggaagtgaaggcaagagccgcacaaatggagaagaccatgaggtggtggagcgattgtaccgcaaattggagagagaaatggagcaaagtacgcgctgaaagaaatagcgccagggaagaaggtaggcagctgaggataaagctggagatggctatgaaggagcttagcacacttaaaaaaaaacagagtctgcctccacaaaaagaagcactggaggccaaggtgacacaggacctgaagttgccaggcttcgtggaggaatcgtgtgaacacaccgatcaattccagttgagttcccaaatgcatgaatccatccgtgagtacctcgtgaagagacaattttccacaaaggaggacactaacaataaggaacagggagtggtgatcgacagtctgaagttatcagaagaaatgaagccaaatctggatggggtggacctgttcaacaatggaggctccggcaatggagaaaccaaaactggactgagactcaaggcgattaacctgccacttgagaacgaggttactgagattagtgctctgcaagtacacttggatgaatttcaaaaaattctgtggaaggaacgcgagatgaggactgcccttgagaaagagatcgagcgcttggagtcagcgctcagtctgtggaagtggaagtacgaggagctcaaggagagtaagccaaagaacgtgaaggaattcgatatccttctgggtcagcacaatgatgagatgcaggagttgtccggaaacattaaagaagagagtaagtctcagaattcaaaggacagggtcatatgcgagctcagagccgagctggagcgcctgcaagctgaaaacacatctgagtgggataaacgggaaatattggagcgtgagaagcaaggtctggagagagagaatagacgactgaaaatacaggtgaaggagatggaggagctccttgataagaagaacagactgtcagcaaattctcaatccccagacttcaaaatgagccagattgatctccaggagaagaatcaggaacttctgaacctccagcacgcatactataaattgaataggcagtatcaggcaaacattgcagaactgacacatgcaaataatcgcgtcgaccaaaacgaggcggaggtcaaaaagctgagactgagggtcgaagagctgaagcagggcttaaatcagaaggaagatgagctcgatgatagcttgaaccagattcgcaagctccaacggtccctcgacgaggaaaaggagcgcaatgaaaacctcgagaccgaactgcgtcacttgcagaactggtag

SEQ ID NO: 38268 - protein, 497 aa, Artificial Sequence
  derived and/or modified sequence
MNGPEDLPKSYDYDLIIIGGGSGGLAAAKEAAQYGKKVMVLDFVTPTPLGTRWGLGGTCVNVGCIPKKLMHQAALLGQALQDSRNYGWKVEETVKHDWDRMIEAVQNHIGSLNWGYRVALREKKVVYENAYGQFIGPHRIKATNNKGKEKIYSAERFLIATGERPRYLGIPGDKEYCISSDDLFSLPYCPGKTLVVGASYVALECAGFLAGIGLDVTVMVRSILLRGFDQDMANKIGEHMEEHGIKFIRQFVPIKVEQIEAGTPGRLRVVAQSTNSEEIIEGEYNTVMLAIGRDACTRKIGLETVGVKINEKTGKIPVTDEEQTNVPYIYAIGDILEDKVELTPVAIQAGRLLAQRLYAGSTVKCDYENVPTTVFTPLEYGACGLSEEKAVEKFGEENIEVYHSYFWPLEWTIPSRDNNKCYAKIICNTKDNERVVGFHVLGPNAGEVTQGFAAALKCGLTKKQLDSTIGIHPVCAEVFTTLSVTKRSGASILQAGC

SEQ ID NO: 38269 - protein, 581 aa, Artificial Sequence
  derived and/or modified sequence
MQQVMLTCKGVNRGHAVPAGPGRKPRPRRSSRLLAGEKHLTRSALLLCHTEDGRALEGTLSELAAETDLPVVFVKQRKIGGHGPTLKAYQEGRLQKLLKMNGPEDLPKSYDYDLIIIGGGSGGLAAAKEAAQYGKKVMVLDFVTPTPLGTRWGLGGTCVNVGCIPKKLMHQAALLGQALQDSRNYGWKVEETVKHDWDRMIEAVQNHIGSLNWGYRVALREKKVVYENAYGQFIGPHRIKATNNKGKEKIYSAERFLIATGERPRYLGIPGDKEYCISSDDLFSLPYCPGKTLVVGASYVALECAGFLAGIGLDVTVMVRSILLRGFDQDMANKIGEHMEEHGIKFIRQFVPIKVEQIEAGTPGRLRVVAQSTNSEEIIEGEYNTVMLAIGRDACTRKIGLETVGVKINEKTGKIPVTDEEQTNVPYIYAIGDILEDKVELTPVAIQAGRLLAQRLYAGSTVKCDYENVPTTVFTPLEYGACGLSEEKAVEKFGEENIEVYHSYFWPLEWTIPSRDNNKCYAKIICNTKDNERVVGFHVLGPNAGEVTQGFAAALKCGLTKKQLDSTIGIHPVCAEFFSFI

SEQ ID NO: 38270 - protein, 541 aa, Artificial Sequence
  derived and/or modified sequence
MLSRLVLNSWAQAIIRPRPPKVLGLQVTTFSEAYQEGRLQKLLKMNGPEDLPKSYDYDLIIIGGGSGGLAAAKEAAQYGKKVMVLDFVTPTPLGTRWGLGGTCVNVGCIPKKLMHQAALLGQALQDSRNYGWKVEETVKHDWDRMIEAVQNHIGSLNWGYRVALREKKVVYENAYGQFIGPHRIKATNNKGKEKIYSAERFLIATGERPRYLGIPGDKEYCISSDDLFSLPYCPGKTLVVGASYVALECAGFLAGIGLDVTVMVRSILLRGFDQDMANKIGEHMEEHGIKFIRQFVPIKVEQIEAGTPGRLRVVAQSTNSEEIIEGEYNTVMLAIGRDACTRKIGLETVGVKINEKTGKIPVTDEEQTNVPYIYAIGDILEDKVELTPVAIQAGRLLAQRLYAGSTVKCDYENVPTTVFTPLEYGACGLSEEKAVEKFGEENIEVYHSYFWPLEWTIPSRDNNKCYAKIICNTKDNERVVGFHVLGPNAGEVTQGFAAALKCGLTKKQLDSTIGIHPVCAEVFTTLSVTKRSGASILQAGC

SEQ ID NO: 38271 - protein, 612 aa, Artificial Sequence
  derived and/or modified sequence
MPVDDYWLCLPASCARPFVQTVRVVQSCPHCCWFPGVLPSVPEPLRMPAMLPTGSHSAVLPPSHCSTAPPSTSQEPSSSADPKLCLSPPTSDSRQERNVQFGLAYQEGRLQKLLKMNGPEDLPKSYDYDLIIIGGGSGGLAAAKEAAQYGKKVMVLDFVTPTPLGTRWGLGGTCVNVGCIPKKLMHQAALLGQALQDSRNYGWKVEETVKHDWDRMIEAVQNHIGSLNWGYRVALREKKVVYENAYGQFIGPHRIKATNNKGKEKIYSAERFLIATGERPRYLGIPGDKEYCISSDDLFSLPYCPGKTLVVGASYVALECAGFLAGIGLDVTVMVRSILLRGFDQDMANKIGEHMEEHGIKFIRQFVPIKVEQIEAGTPGRLRVVAQSTNSEEIIEGEYNTVMLAIGRDACTRKIGLETVGVKINEKTGKIPVTDEEQTNVPYIYAIGDILEDKVELTPVAIQAGRLLAQRLYAGSTVKCDYENVPTTVFTPLEYGACGLSEEKAVEKFGEENIEVYHSYFWPLEWTIPSRDNNKCYAKIICNTKDNERVVGFHVLGPNAGEVTQGFAAALKCGLTKKQLDSTIGIHPVCAEVFTTLSVTKRSGASILQAGC

SEQ ID NO: 38272 - protein, 647 aa, Artificial Sequence
  derived and/or modified sequence
MGCAEGKAVAAAAPTELQTKGKNGDGRRRSAKDHHPGKTLPENPAGFTSTATADSRALLQAYIDGHSVVIFSRSTCTRCTEVKKLFKSLCVPYFVLELDQTEDGRALEGTLSELAAETDLPVVFVKQRKIGGHGPTLKAYQEGRLQKLLKMNGPEDLPKSYDYDLIIIGGGSGGLAAAKEAAQYGKKVMVLDFVTPTPLGTRWGLGGTCVNVGCIPKKLMHQAALLGQALQDSRNYGWKVEETVKHDWDRMIEAVQNHIGSLNWGYRVALREKKVVYENAYGQFIGPHRIKATNNKGKEKIYSAERFLIATGERPRYLGIPGDKEYCISSDDLFSLPYCPGKTLVVGASYVALECAGFLAGIGLDVTVMVRSILLRGFDQDMANKIGEHMEEHGIKFIRQFVPIKVEQIEAGTPGRLRVVAQSTNSEEIIEGEYNTVMLAIGRDACTRKIGLETVGVKINEKTGKIPVTDEEQTNVPYIYAIGDILEDKVELTPVAIQAGRLLAQRLYAGSTVKCDYENVPTTVFTPLEYGACGLSEEKAVEKFGEENIEVYHSYFWPLEWTIPSRDNNKCYAKIICNTKDNERVVGFHVLGPNAGEVTQGFAAALKCGLTKKQLDSTIGIHPVCAEVFTTLSVTKRSGASILQAGC

SEQ ID NO: 38273 - protein, 499 aa, Artificial Sequence
  derived and/or modified sequence
MNGPEDLPKSYDYDLIIIGGGSGGLAAAKEAAQYGKKVMVLDFVTPTPLGTRWGLGGTCVNVGCIPKKLMHQAALLGQALQDSRNYGWKVEETVKHDWDRMIEAVQNHIGSLNWGYRVALREKKVVYENAYGQFIGPHRIKATNNKGKEKIYSAERFLIATGERPRYLGIPGDKEYCISSDDLFSLPYCPGKTLVVGASYVALECAGFLAGIGLDVTVMVRSILLRGFDQDMANKIGEHMEEHGIKFIRQFVPIKVEQIEAGTPGRLRVVAQSTNSEEIIEGEYNTVMLAIGRDACTRKIGLETVGVKINEKTGKIPVTDEEQTNVPYIYAIGDILEDKVELTPVAIQAGRLLAQRLYAGSTVKCDYENVPTTVFTPLEYGACGLSEEKAVEKFGEENIEVYHSYFWPLEWTIPSRDNNKCYAKIICNTKDNERVVGFHVLGPNAGEVTQGFAAALKCGLTKKQLDSTIGIHPVCAEVFTTLSVTKRSGASILQAGCCG

SEQ ID NO: 38274 - protein, 649 aa, Artificial Sequence
  derived and/or modified sequence
MGCAEGKAVAAAAPTELQTKGKNGDGRRRSAKDHHPGKTLPENPAGFTSTATADSRALLQAYIDGHSVVIFSRSTCTRCTEVKKLFKSLCVPYFVLELDQTEDGRALEGTLSELAAETDLPVVFVKQRKIGGHGPTLKAYQEGRLQKLLKMNGPEDLPKSYDYDLIIIGGGSGGLAAAKEAAQYGKKVMVLDFVTPTPLGTRWGLGGTCVNVGCIPKKLMHQAALLGQALQDSRNYGWKVEETVKHDWDRMIEAVQNHIGSLNWGYRVALREKKVVYENAYGQFIGPHRIKATNNKGKEKIYSAERFLIATGERPRYLGIPGDKEYCISSDDLFSLPYCPGKTLVVGASYVALECAGFLAGIGLDVTVMVRSILLRGFDQDMANKIGEHMEEHGIKFIRQFVPIKVEQIEAGTPGRLRVVAQSTNSEEIIEGEYNTVMLAIGRDACTRKIGLETVGVKINEKTGKIPVTDEEQTNVPYIYAIGDILEDKVELTPVAIQAGRLLAQRLYAGSTVKCDYENVPTTVFTPLEYGACGLSEEKAVEKFGEENIEVYHSYFWPLEWTIPSRDNNKCYAKIICNTKDNERVVGFHVLGPNAGEVTQGFAAALKCGLTKKQLDSTIGIHPVCAEVFTTLSVTKRSGASILQAGCCG

SEQ ID NO: 38275 - protein, 70 aa, Artificial Sequence
  derived and/or modified sequence
MNGPEDLPKSYDYDLIIIGGGSGGLAAAKEAAQYGKKVMVLDFVTPTPLGTRWGLGGTCVNVGCIPKKLM

SEQ ID NO: 38276 - protein, 543 aa, Artificial Sequence
  derived and/or modified sequence
MLSRLVLNSWAQAIIRPRPPKVLGLQVTTFSEAYQEGRLQKLLKMNGPEDLPKSYDYDLIIIGGGSGGLAAAKEAAQYGKKVMVLDFVTPTPLGTRWGLGGTCVNVGCIPKKLMHQAALLGQALQDSRNYGWKVEETVKHDWDRMIEAVQNHIGSLNWGYRVALREKKVVYENAYGQFIGPHRIKATNNKGKEKIYSAERFLIATGERPRYLGIPGDKEYCISSDDLFSLPYCPGKTLVVGASYVALECAGFLAGIGLDVTVMVRSILLRGFDQDMANKIGEHMEEHGIKFIRQFVPIKVEQIEAGTPGRLRVVAQSTNSEEIIEGEYNTVMLAIGRDACTRKIGLETVGVKINEKTGKIPVTDEEQTNVPYIYAIGDILEDKVELTPVAIQAGRLLAQRLYAGSTVKCDYENVPTTVFTPLEYGACGLSEEKAVEKFGEENIEVYHSYFWPLEWTIPSRDNNKCYAKIICNTKDNERVVGFHVLGPNAGEVTQGFAAALKCGLTKKQLDSTIGIHPVCAEVFTTLSVTKRSGASILQAGCCG

SEQ ID NO: 38277 - protein, 104 aa, Artificial Sequence
  derived and/or modified sequence
MNGPEDLPKSYDYDLIIIGGGSGGLAAAKEAAQYGKKVMVLDFVTPTPLGTRWGLGGTCVNVGCIPKKLMHQAALLGQALQDSRNYGWKVEETVKHDWDRMIEA

SEQ ID NO: 38278 - protein, 568 aa, Artificial Sequence
  derived and/or modified sequence
MPAMLPTGSHSAVLPPSHCSTAPPSTSQEPSSSADPKLCLSPPTSDSRQERNVQFGLAYQEGRLQKLLKMNGPEDLPKSYDYDLIIIGGGSGGLAAAKEAAQYGKKVMVLDFVTPTPLGTRWGLGGTCVNVGCIPKKLMHQAALLGQALQDSRNYGWKVEETVKHDWDRMIEAVQNHIGSLNWGYRVALREKKVVYENAYGQFIGPHRIKATNNKGKEKIYSAERFLIATGERPRYLGIPGDKEYCISSDDLFSLPYCPGKTLVVGASYVALECAGFLAGIGLDVTVMVRSILLRGFDQDMANKIGEHMEEHGIKFIRQFVPIKVEQIEAGTPGRLRVVAQSTNSEEIIEGEYNTVMLAIGRDACTRKIGLETVGVKINEKTGKIPVTDEEQTNVPYIYAIGDILEDKVELTPVAIQAGRLLAQRLYAGSTVKCDYENVPTTVFTPLEYGACGLSEEKAVEKFGEENIEVYHSYFWPLEWTIPSRDNNKCYAKIICNTKDNERVVGFHVLGPNAGEVTQGFAAALKCGLTKKQLDSTIGIHPVCAEVFTTLSVTKRSGASILQAGCCG

SEQ ID NO: 38279 - protein, 175 aa, Artificial Sequence
  derived and/or modified sequence
MNGPEDLPKSYDYDLIIIGGGSGGLAAAKEAAQYGKKVMVLDFVTPTPLGTRWGLGGTCVNVGCIPKKLMHQAALLGQALQDSRNYGWKVEETVKHDWDRMIEAVQNHIGSLNWGYRVALREKKVVYENAYGQFIGPHRIKATNNKGKEKIYSAERFLIATGERPRYLGIPGDKE

SEQ ID NO: 38280 - protein, 53 aa, Artificial Sequence
  derived and/or modified sequence
MNGPEDLPKSYDYDLIIIGGGSGGLAAAKEAAQYGKKVMVLDFVTPTPLGTRW

SEQ ID NO: 38281 - protein, 72 aa, Artificial Sequence
  derived and/or modified sequence
MNGPEDLPKSYDYDLIIIGGGSGGLAAAKEAAQYGKKVMVLDFVTPTPLGTRWGLGGTCVNVGCIPKKLMHQ

SEQ ID NO: 38282 - protein, 139 aa, Artificial Sequence
  derived and/or modified sequence
MLSRLVLNSWAQAIIRPRPPKVLGLQVTTFSEAYQEGRLQKLLKMNGPEDLPKSYDYDLIIIGGGSGGLAAAKEAAQYGKKVMVLDFVTPTPLGTRWGLGGTCVNVGCIPKKLMHQAALLGQALQDSRNYGWKVEETGM

SEQ ID NO: 38283 - protein, 459 aa, Artificial Sequence [sequence omitted]

SEQ ID NO: 38284 - protein, 547 aa, Artificial Sequence
  derived and/or modified sequence
MEDGRALEGTLSELAAETDLPVVFVKQRKIGGHGPTLKAYQEGRLQKLLKMNGPEDLPKSYDYDLIIIGGGSGGLAAAKEAAQYGKKVMVLDFVTPTPLGTRWGLGGTCVNVGCIPKKLMHQAALLGQALQDSRNYGWKVEETVKHDWDRMIEAVQNHIGSLNWGYRVALREKKVVYENAYGQFIGPHRIKATNNKGKEKIYSAERFLIATGERPRYLGIPGDKEYCISSDDLFSLPYCPGKTLVVGASYVALECAGFLAGIGLDVTVMVRSILLRGFDQDMANKIGEHMEEHGIKFIRQFVPIKVEQIEAGTPGRLRVVAQSTNSEEIIEGEYNTVMLAIGRDACTRKIGLETVGVKINEKTGKIPVTDEEQTNVPYIYAIGDILEDKVELTPVAIQAGRLLAQRLYAGSTVKCDYENVPTTVFTPLEYGACGLSEEKAVEKFGEENIEVYHSYFWPLEWTIPSRDNNKCYAKIICNTKDNERVVGFHVLGPNAGEVTQGFAAALKCGLTKKQLDSTIGIHPVCAEVFTTLSVTKRSGASILQAGC

SEQ ID NO: 38285 - DNA, 1746 bp, Artificial Sequence
  derived and/or modified sequence
atgcagcaggtgatgctgacctgcaagggcgtgaacagaggccacgccgtgcccgccggccccggcagaaagcccagacccagaagaagcagcagactgctggccggcgagaagcacctgaccagaagcgccctgctgctgtgccacaccgaggacggcagagccctggagggcaccctgagcgagctggccgccgagaccgacctgcccgtggtgttcgtgaagcagagaaagatcggcggccacggccccaccctgaaggcctaccaggagggcagactgcagaagctgctgaagatgaacggccccgaggacctgcccaagagctacgactacgacctgatcatcatcggcggcggcagcggcggcctggccgccgccaaggaggccgcccagtacggcaagaaggtgatggtgctggacttcgtgacccccacccccctgggcaccagatggggcctgggcggcacctgcgtgaacgtgggctgcatccccaagaagctgatgcaccaggccgccctgctgggccaggccctgcaggacagcagaaactacggctggaaggtggaggagaccgtgaagcacgactgggacagaatgatcgaggccgtgcagaaccacatcggcagcctgaactggggctacagagtggccctgagagagaagaaggtggtgtacgagaacgcctacggccagttcatcggcccccacagaatcaaggccaccaacaacaagggcaaggagaagatctacagcgccgagagattcctgatcgccaccggcgagagacccagatacctgggcatccccggcgacaaggagtactgcatcagcagcgacgacctgttcagcctgccctactgccccggcaagaccctggtggtgggcgccagctacgtggccctggagtgcgccggcttcctggccggcatcggcctggacgtgaccgtgatggtgagaagcatcctgctgagaggcttcgaccaggacatggccaacaagatcggcgagcacatggaggagcacggcatcaagttcatcagacagttcgtgcccatcaaggtggagcagatcgaggccggcacccccggcagactgagagtggtggcccagagcaccaacagcgaggagatcatcgagggcgagtacaacaccgtgatgctggccatcggcagagacgcctgcaccagaaagatcggcctggagaccgtgggcgtgaagatcaacgagaagaccggcaagatccccgtgaccgacgaggagcagaccaacgtgccctacatctacgccatcggcgacatcctggaggacaaggtggagctgacccccgtggccatccaggccggcagactgctggcccagagactgtacgccggcagcaccgtgaagtgcgactacgagaacgtgcccaccaccgtgttcacccccctggagtacggcgcctgcggcctgagcgaggagaaggccgtggagaagttcggcgaggagaacatcgaggtgtaccacagctacttctggcccctggagtggaccatccccagcagagacaacaacaagtgctacgccaagatcatctgcaacaccaaggacaacgagagagtggtgggcttccacgtgctgggccccaacgccggcgaggtgacccagggcttcgccgccgccctgaagtgcggcctgaccaagaagcagctggacagcaccatcggcatccaccccgtgtgcgccgagttcttcagcttcatctag

SEQ ID NO: 38286 - DNA, 1944 bp, Artificial Sequence
  derived and/or modified sequence
atgggctgcgccgagggcaaggccgtggccgccgccgcccccaccgagctgcagaccaagggcaagaacggcgacggcagaagaagaagcgccaaggaccaccaccccggcaagaccctgcccgagaaccccgccggcttcaccagcaccgccaccgccgacagcagagccctgctgcaggcctacatcgacggccacagcgtggtgatcttcagcagaagcacctgcaccagatgcaccgaggtgaagaagctgttcaagagcctgtgcgtgccctacttcgtgctggagctggaccagaccgaggacggcagagccctggagggcaccctgagcgagctggccgccgagaccgacctgcccgtggtgttcgtgaagcagagaaagatcggcggccacggccccaccctgaaggcctaccaggagggcagactgcagaagctgctgaagatgaacggccccgaggacctgcccaagagctacgactacgacctgatcatcatcggcggcggcagcggcggcctggccgccgccaaggaggccgcccagtacggcaagaaggtgatggtgctggacttcgtgacccccacccccctgggcaccagatggggcctgggcggcacctgcgtgaacgtgggctgcatccccaagaagctgatgcaccaggccgccctgctgggccaggccctgcaggacagcagaaactacggctggaaggtggaggagaccgtgaagcacgactgggacagaatgatcgaggccgtgcagaaccacatcggcagcctgaactggggctacagagtggccctgagagagaagaaggtggtgtacgagaacgcctacggccagttcatcggcccccacagaatcaaggccaccaacaacaagggcaaggagaagatctacagcgccgagagattcctgatcgccaccggcgagagacccagatacctgggcatccccggcgacaaggagtactgcatcagcagcgacgacctgttcagcctgccctactgccccggcaagaccctggtggtgggcgccagctacgtggccctggagtgcgccggcttcctggccggcatcggcctggacgtgaccgtgatggtgagaagcatcctgctgagaggcttcgaccaggacatggccaacaagatcggcgagcacatggaggagcacggcatcaagttcatcagacagttcgtgcccatcaaggtggagcagatcgaggccggcacccccggcagactgagagtggtggcccagagcaccaacagcgaggagatcatcgagggcgagtacaacaccgtgatgctggccatcggcagagacgcctgcaccagaaagatcggcctggagaccgtgggcgtgaagatcaacgagaagaccggcaagatccccgtgaccgacgaggagcagaccaacgtgccctacatctacgccatcggcgacatcctggaggacaaggtggagctgacccccgtggccatccaggccggcagactgctggcccagagactgtacgccggcagcaccgtgaagtgcgactacgagaacgtgcccaccaccgtgttcacccccctggagtacggcgcctgcggcctgagcgaggagaaggccgtggagaagttcggcgaggagaacatcgaggtgtaccacagctacttctggcccctggagtggaccatccccagcagagacaacaacaagtgctacgccaagatcatctgcaacaccaaggacaacgagagagtggtgggcttccacgtgctgggccccaacgccggcgaggtgacccagggcttcgccgccgccctgaagtgcggcctgaccaagaagcagctggacagcaccatcggcatccaccccgtgtgcgccgaggtgttcaccaccctgagcgtgaccaagagaagcggcgccagcatcctgcaggccggctgctag

SEQ ID NO: 38287 - DNA, 1950 bp, Artificial Sequence
  derived and/or modified sequence
atgggctgcgccgagggcaaggccgtggccgccgccgcccccaccgagctgcagaccaagggcaagaacggcgacggcagaagaagaagcgccaaggaccaccaccccggcaagaccctgcccgagaaccccgccggcttcaccagcaccgccaccgccgacagcagagccctgctgcaggcctacatcgacggccacagcgtggtgatcttcagcagaagcacctgcaccagatgcaccgaggtgaagaagctgttcaagagcctgtgcgtgccctacttcgtgctggagctggaccagaccgaggacggcagagccctggagggcaccctgagcgagctggccgccgagaccgacctgcccgtggtgttcgtgaagcagagaaagatcggcggccacggccccaccctgaaggcctaccaggagggcagactgcagaagctgctgaagatgaacggccccgaggacctgcccaagagctacgactacgacctgatcatcatcggcggcggcagcggcggcctggccgccgccaaggaggccgcccagtacggcaagaaggtgatggtgctggacttcgtgacccccacccccctgggcaccagatggggcctgggcggcacctgcgtgaacgtgggctgcatccccaagaagctgatgcaccaggccgccctgctgggccaggccctgcaggacagcagaaactacggctggaaggtggaggagaccgtgaagcacgactgggacagaatgatcgaggccgtgcagaaccacatcggcagcctgaactggggctacagagtggccctgagagagaagaaggtggtgtacgagaacgcctacggccagttcatcggcccccacagaatcaaggccaccaacaacaagggcaaggagaagatctacagcgccgagagattcctgatcgccaccggcgagagacccagatacctgggcatccccggcgacaaggagtactgcatcagcagcgacgacctgttcagcctgccctactgccccggcaagaccctggtggtgggcgccagctacgtggccctggagtgcgccggcttcctggccggcatcggcctggacgtgaccgtgatggtgagaagcatcctgctgagaggcttcgaccaggacatggccaacaagatcggcgagcacatggaggagcacggcatcaagttcatcagacagttcgtgcccatcaaggtggagcagatcgaggccggcacccccggcagactgagagtggtggcccagagcaccaacagcgaggagatcatcgagggcgagtacaacaccgtgatgctggccatcggcagagacgcctgcaccagaaagatcggcctggagaccgtgggcgtgaagatcaacgagaagaccggcaagatccccgtgaccgacgaggagcagaccaacgtgccctacatctacgccatcggcgacatcctggaggacaaggtggagctgacccccgtggccatccaggccggcagactgctggcccagagactgtacgccggcagcaccgtgaagtgcgactacgagaacgtgcccaccaccgtgttcacccccctggagtacggcgcctgcggcctgagcgaggagaaggccgtggagaagttcggcgaggagaacatcgaggtgtaccacagctacttctggcccctggagtggaccatccccagcagagacaacaacaagtgctacgccaagatcatctgcaacaccaaggacaacgagagagtggtgggcttccacgtgctgggccccaacgccggcgaggtgacccagggcttcgccgccgccctgaagtgcggcctgaccaagaagcagctggacagcaccatcggcatccaccccgtgtgcgccgaggtgttcaccaccctgagcgtgaccaagagaagcggcgccagcatcctgcaggccggctgctgaggctag

SEQ ID NO: 38288 - DNA, 1746 bp, Artificial Sequence
  derived and/or modified sequence
atgcaacaagtgatgctgacttgcaaaggagtgaatagaggtcacgctgtgcccgctggcccaggtcgaaagcctcggcccagaaggtcttcgcgactgctagcaggcgaaaaacatctaacacgaagcgctttacttctgtgtcatacagaggacggcagagccttagaggggacgctgagcgagctcgccgccgagaccgacctccccgtcgttttcgtgaagcagcgcaaaatcggcgggcacggtccaaccttgaaagcgtaccaggaaggtagattgcaaaagttgctgaaaatgaatggacctgaggatttacctaaatcttatgattacgatttgataatcataggcgggggatccggtgggctcgctgcggctaaggaggccgcccagtacggcaaaaaggtgatggtgctggattttgtgacaccaacacctttgggcacccgctgggggctcggtggcacctgtgttaatgtaggctgtatccccaaaaaattgatgcatcaggcggccctgctaggacaggctttgcaggacagtcgaaactacggttggaaggtagaggaaacagttaagcacgattgggatagaatgatcgaagcagtccagaatcatattgggagcctgaactggggatatcgcgtggctttgagagagaaaaaagtggtatatgagaatgcatatggacagtttattggaccacatcgaatcaaagcaaccaacaacaagggcaaggaaaaaatatatagtgcagaacggttcctaattgccacaggcgaacggcctagataccttggtatccctggtgataaggagtattgcatctcaagtgatgacctattcagcttaccatactgtcctggaaaaactttagtagtgggggcttcatacgtggcacttgagtgcgccggattcctcgccgggatcgggctagacgtgaccgtgatggtgcgatctattcttttgcggggcttcgatcaggatatggcaaacaaaatcggtgagcacatggaagaacacggcatcaagttcatccgccagttcgtgcctatcaaggtcgagcaaatcgaggctggtacgcccggcagacttagagtggtagcacagagtacaaacagtgaggagatcatcgagggcgaatacaacacggttatgctggcgatcggcagggacgcctgcacccgcaagatcgggctggagactgttggggtcaaaatcaatgaaaaaacgggcaaaattccagtaacagatgaggagcaaaccaacgtgccttacatttatgccattggagatattctcgaggacaaagttgagctcactccagttgccattcaggccggccgactcttagcacagaggctgtacgctggatcaacagtgaagtgcgactatgaaaatgttcccaccaccgtgttcaccccgctggaatacggcgcttgtgggctctccgaagagaaggcggtggagaaatttggagaggaaaacatcgaagtttatcactcgtatttttggcctttggaatggacgatacccagccgtgacaataacaaatgctacgcgaagattatctgcaacacaaaggacaacgagagagtggtaggattccacgtgctcggcccaaacgctggcgaggtgacccaaggtttcgccgcagcgctgaagtgtggccttaccaagaagcagctcgattctacaatcggaattcacccggtctgcgccgagtttttttccttcatatag

SEQ ID NO: 38289 - DNA, 1944 bp, Artificial Sequence
  derived and/or modified sequence
atggggtgtgcagaaggcaaggctgttgcggccgccgcgccaactgagcttcaaactaaaggtaagaacggagacggcaggcggcgtagcgctaaggaccaccacccaggcaagacgcttcccgagaaccccgccggatttacgtcaaccgcgaccgccgactcgcgggcccttctacaggcctatatcgatggacattccgtggtgatcttcagtaggagcacttgcactcggtgtaccgaagtgaagaagctttttaagtccctctgcgttccctactttgtcttggaattggaccaaactgaggacggtagagcattagaggggactttatccgagctggcagcagagacagatctccctgtggtgtttgtcaagcagcggaaaatcggaggtcatgggcccacgctgaaagcctaccaggagggccgccttcagaaactcctgaaaatgaacgggcctgaggacctgcctaagtcttatgactacgacttgatcataattggaggcggctccggcggcctggccgctgcaaaggaggccgcacagtacggcaagaaggtgatggtgcttgactttgtcacccctacaccactgggtaccaggtggggcttggggggtacctgcgtgaatgtggggtgcatccccaaaaaactcatgcaccaggccgccttgttggggcaggctctccaggacagcagaaactatgggtggaaagtagaagagacagtgaagcacgactgggatcgcatgatcgaggcggttcagaatcatatcggatccctgaattgggggtacagagtggctcttcgcgaaaagaaagtggtgtatgagaacgcctacggccaattcataggtcctcatcgaattaaagccaccaacaacaagggcaaagaaaagatctacagtgcagaacgctttttaattgccaccggggaacgacccaggtacctcggcattccgggggataaggagtattgtatttccagcgacgatttgtttagtctaccatactgtccgggaaagacgctggtcgtcggggcatcctatgtcgctttagagtgcgctggtttcttagccgggatcgggttagatgtaacggtcatggttcggagtattctgcttagagggtttgatcaagacatggccaacaaaattggagaacacatggaagagcacggaatcaagtttattagacagttcgtacccataaaagttgaacagatagaagccggaacccctggaaggttgcgggtggtcgctcagagtacaaactccgaggagattatcgagggggaatataacaccgtgatgcttgccataggtcgggacgcttgcacccggaagatcggcctcgaaaccgtgggcgtcaagataaatgagaagacaggcaagatcccagttaccgacgaggagcaaaccaatgttccatacatatatgctataggcgacatactcgaagataaggtggagcttaccccggtagctattcaagcaggccggctgctagcacaacgcctgtatgccgggtcgacagtcaagtgtgattacgaaaatgtccctaccactgtgttcactccgctggagtatggggcctgcggtctgtccgaggaaaaggccgttgagaaattcggggaggaaaacatagaggtctatcactcctatttctggccccttgagtggactatcccgtcgagggacaataataagtgctacgccaagattatttgcaacacaaaggataatgagcgtgtggtggggttccatgtgctggggccaaatgctggagaggtgacccagggcttcgcagccgccctgaaatgcgggctcaccaaaaagcagctggattcgacaataggaattcatcccgtctgcgccgaggtatttacaacgctcagcgtcaccaagcggtctggggcatctatattgcaggctggctgctag

SEQ ID NO: 38290 - DNA, 1950 bp, Artificial Sequence
  derived and/or modified sequence
atggggtgcgcagagggcaaggccgttgcggccgcagcgcccaccgagctgcagactaagggcaaaaacggagacgggagacggcggtcagctaaggatcaccatccggggaaaacgttgccagagaaccccgctggatttacctccacagcgacggccgattcacgcgccttgttacaggcgtatattgatggacattctgtggttatattctcaagatccacctgtacgcgctgcaccgaagtcaagaagctcttcaagagcctctgcgttccttatttcgtactggagctagatcagacagaagatggtagagcactcgagggaacgctctccgagctggccgcagaaaccgatctgcctgtcgtgttcgttaagcaaaggaaaatcggaggccatggccctacactcaaagcctatcaagaagggaggctccagaagctgttgaagatgaatggcccagaagatctgcctaaatcatacgattacgacctgattattatcgggggtggttccggcggcctggctgcagccaaagaagccgctcaatacggcaaaaaggtaatggtactggattttgtcacccccaccccattagggacccgctggggcctcggaggaacttgtgttaatgtgggatgtataccgaagaaactgatgcatcaagccgccctccttggacaggctcttcaagattcccgaaattacggatggaaggttgaggagactgtgaaacatgactgggacagaatgatagaagcagtccagaatcacatcggatctctgaattggggctacagggtcgccctccgagaaaagaaagttgtgtatgagaacgcatacggacagtttatcggacctcacaggattaaagccactaacaacaaaggcaaagagaaaatttatagcgcagagcgattcctaatcgctactggtgagagacccagatatctgggcatacccggcgacaaggagtattgcatctccagcgacgacctgttctctctgccttactgccccggaaagacactagtggtgggagcctcctacgtggccctggagtgcgccggttttctggccggtatcggactagacgtgaccgtcatggtgcgctcaatcctgctgaggggatttgaccaggatatggctaacaagatcggtgagcatatggaggagcatggaattaaatttattcggcagtttgtcccaattaaggtggagcagattgaggcgggtactccgggccgtctgcgcgtggtcgcccaaagcactaactctgaagagataatcgagggtgaatacaacaccgtcatgctcgctataggcagggacgcgtgcacccgaaaaattggactcgaaacggtgggcgtgaagattaatgagaaaacaggcaagatccccgtaacagacgaagagcaaacaaatgtgccttacatttacgctataggagacattctggaggacaaggttgagctcactccggtggcgatccaggcgggaagactccttgcccagaggctttacgctggatccaccgtaaaatgcgattacgagaacgtgcccaccaccgtctttacacctctagagtacggagcttgcggcctctccgaagagaaagccgttgaaaagtttggggaggagaacatcgaagtgtaccactcttacttctggccccttgagtggactattccctcacgcgataataataaatgctatgcgaaaattatctgcaacaccaaagacaatgagcgtgtggtcgggtttcatgtgttggggccaaacgccggagaggtgacgcaagggttcgctgctgcactgaagtgcgggctaactaaaaagcagttagattccacaatcggaatacatccagtttgtgctgaggtgtttactacattatccgtgacgaagagatcgggggccagtatcctgcaggctggctgttgaggatag

SEQ ID NO: 38291 - DNA, 1746 bp, Artificial Sequence
  derived and/or modified sequence
atgcagcaggtgatgctgacctgcaagggcgtgaacagaggacatgctgtgcctgctggccctggcaggaagccccggccccggcgcagcagccggctgctggccggggagaagcacctgaccaggtctgccctgctgctgtgccacacagaagatggccgggccctggagggcaccctgtctgagctggccgctgagacagacctgcctgtggtgtttgtgaagcagaggaagattggaggccacggccccaccctgaaggcctaccaggagggccgcctgcagaagctgctgaagatgaatggacctgaggacctgcccaagagctatgactatgacctgatcatcattggaggcggcagcggcggcctggccgccgccaaggaggccgcccagtatggcaagaaggtgatggtgctggactttgtgacccccacccccctgggcacccgctggggcctgggcggcacctgtgtgaatgtgggctgcatccccaagaagctgatgcaccaggccgccctgctgggccaggccctgcaggacagcagaaattatggctggaaggtggaggagaccgtgaagcatgactgggacaggatgattgaagctgtgcagaaccacatcggcagcctgaactggggctacagagtggccctgcgggagaagaaggtggtgtatgaaaatgcctacggccagttcatcggcccccaccgcatcaaggccaccaacaacaagggcaaggagaagatctacagcgctgagcgcttcctgattgccaccggggagcggccccgctacctgggcatccctggggacaaggagtactgcatcagcagtgatgacctcttcagcctgccctactgccctgggaagaccctggtggtgggcgccagctatgtggccctggagtgtgccggcttcctggccggcatcggcctggatgtgacagtgatggtgcgcagcatcctgctgcggggctttgaccaggacatggccaacaagattggagagcacatggaggagcacggcatcaagttcatccggcagtttgtgcccatcaaggtggagcagatcgaggccggcaccccaggccgcctgcgggtggtggcccagagcaccaacagcgaggagatcattgaaggagagtacaacacagtgatgctggccatcggcagagatgcctgcaccaggaagattggcctggagaccgtgggcgtgaagatcaatgagaagacaggcaagatccctgtgacagatgaggagcagaccaacgtgccctacatctatgccatcggggacatcctggaggacaaggtggagctgacccctgtggccatccaggccggccgcctgctggcccagaggctgtatgccggcagcacagtgaagtgtgactatgaaaatgtgcccaccaccgtcttcacccccctggagtatggagcctgtggcctgtctgaggagaaggctgtggagaagtttggagaggagaacatcgaggtgtaccacagctacttctggcccctggagtggaccatccccagccgggacaacaacaagtgctacgccaagatcatctgcaacaccaaggacaatgaaagagtggtgggcttccacgtgctgggccccaatgctggggaggtgacccagggctttgctgctgccctgaagtgtggcctgaccaagaagcagctggacagcaccatcggcatccaccctgtgtgtgccgagttcttctccttcatctag

SEQ ID NO: 38292 - DNA, 1944 bp, Artificial Sequence
  derived and/or modified sequence
atgggctgtgccgagggcaaggctgtggccgccgccgcccccacagagctgcagaccaagggcaagaatggagatggaagaagaagaagtgccaaggaccaccaccctgggaagaccctgcctgagaacccagctggcttcaccagcacagccacagctgacagccgggccctgctgcaggcctacattgatggccacagcgtggtgatcttcagccgcagcacctgcacccgctgcacagaggtgaagaagctgttcaagagcctgtgtgtgccctactttgtgctggagctggaccagacagaagatggccgggccctggagggcaccctgtctgagctggccgctgagacagacctgcctgtggtgtttgtgaagcagaggaagattggaggccacggccccaccctgaaggcctaccaggagggccgcctgcagaagctgctgaagatgaatggacctgaggacctgcccaagagctatgactatgacctgatcatcatcggcggcggcagcggcggcctggccgccgccaaggaggccgcccagtatggcaagaaggtgatggtgctggactttgtgacccccacccccctgggcacccgctggggcctgggcggcacctgtgtgaatgtgggctgcatccccaagaagctgatgcaccaggccgccctgctgggccaggccctgcaggacagcaggaactacggctggaaggtggaggagaccgtgaagcatgactgggacaggatgattgaggccgtgcagaaccacatcggcagcctgaactggggctacagagtggccctgcgggagaagaaggtggtgtatgaaaatgcctacggccagttcatcggcccccaccgcatcaaggccaccaacaacaagggcaaggagaagatctacagcgctgagcgcttcctgattgccactggagagcggccccgctacctgggcatccctggggacaaggagtactgcatcagcagtgatgacctcttcagcctgccctactgccctgggaagaccctggtggtgggcgccagctatgtggccctggagtgtgccggcttcctggccggcatcggcctggatgtgacagtgatggtgcgcagcatcctgctgcggggctttgaccaggacatggccaacaagatcggggagcacatggaggagcacggcatcaagttcatccggcagtttgtgcccatcaaggtggagcagattgaagctggcaccccaggccgcctgcgggtggtggcccagagcaccaacagcgaggagatcatcgagggggagtacaacacagtgatgctggccatcggcagagatgcctgcaccaggaagattggcctggagaccgtgggcgtgaagatcaatgagaagacaggcaagatccctgtgacagatgaggagcagaccaacgtgccctacatctatgccatcggggacatcctggaggacaaggtggagctgacccctgtggccatccaggccggccgcctgctggcccagaggctgtatgccggcagcacagtgaagtgtgactatgaaaatgtgcccaccaccgtcttcacccccctggagtatggagcctgtggcctgtctgaggagaaggctgtggagaagtttggagaagaaaatattgaggtgtaccacagctacttctggcccctggagtggaccatccccagccgggacaacaacaagtgctacgccaagatcatctgcaacaccaaggacaatgaaagagtggtgggcttccacgtgctgggccccaatgctggggaggtgacccagggctttgctgctgccctgaagtgtggcctgaccaagaagcagctggacagcaccatcggcatccaccctgtgtgtgccgaggtgttcaccaccctgtctgtgaccaagaggtctggggccagcatcctgcaggccggctgctag

SEQ ID NO: 38293 - DNA, 1944 bp, Artificial Sequence
  derived and/or modified sequence
atgggctgtgccgagggcaaggctgtggccgccgccgcccccacagagctgcagaccaagggcaagaatggagatggaagaagaagaagtgccaaggaccaccaccctgggaagaccctgcctgagaacccagctggcttcaccagcacagccacagctgacagccgggccctgctgcaggcctacattgatggccacagcgtggtgatcttcagccgcagcacctgcacccgctgcacagaggtgaagaagctgttcaagagcctgtgtgtgccctactttgtgctggagctggaccagacagaagatggccgggccctggagggcaccctgtctgagctggccgctgagacagacctgcctgtggtgtttgtgaagcagaggaagattggaggccacggccccaccctgaaggcctaccaggagggccgcctgcagaagctgctgaagatgaatggacctgaggacctgcccaagagctatgactatgacctgatcatcatcggcggcggcagcggcggcctggccgccgccaaggaggccgcccagtatggcaagaaggtgatggtgctggactttgtgacccccacccccctgggcacccgctggggcctgggcggcacctgtgtgaatgtgggctgcatccccaagaagctgatgcaccaggccgccctgctgggccaggccctgcaggacagcaggaactacggctggaaggtggaggagaccgtgaagcatgactgggacaggatgattgaggccgtgcagaaccacatcggcagcctgaactggggctacagagtggccctgcgggagaagaaggtggtgtatgaaaatgcctacggccagttcatcggcccccaccgcatcaaggccaccaacaacaagggcaaggagaagatctacagcgctgagcgcttcctgattgccactggagagcggccccgctacctgggcatccctggggacaaggagtactgcatcagcagtgatgacctcttcagcctgccctactgccctgggaagaccctggtggtgggcgccagctatgtggccctggagtgtgccggcttcctggccggcatcggcctggatgtgacagtgatggtgcgcagcatcctgctgcggggctttgaccaggacatggccaacaagatcggggagcacatggaggagcacggcatcaagttcatccggcagtttgtgcccatcaaggtggagcagattgaagctggcaccccaggccgcctgcgggtggtggcccagagcaccaacagcgaggagatcatcgagggggagtacaacacagtgatgctggccatcggcagagatgcctgcaccaggaagattggcctggagaccgtgggcgtgaagatcaatgagaagacaggcaagatccctgtgacagatgaggagcagaccaacgtgccctacatctatgccatcggggacatcctggaggacaaggtggagctgacccctgtggccatccaggccggccgcctgctggcccagaggctgtatgccggcagcacagtgaagtgtgactatgaaaatgtgcccaccaccgtcttcacccccctggagtatggagcctgtggcctgtctgaggagaaggctgtggagaagtttggagaagaaaatattgaggtgtaccacagctacttctggcccctggagtggaccatccccagccgggacaacaacaagtgctacgccaagatcatctgcaacaccaaggacaatgaaagagtggtgggcttccacgtgctgggccccaatgctggggaggtgacccagggctttgctgctgccctgaagtgtggcctgaccaagaagcagctggacagcaccatcggcatccaccctgtgtgtgccgaggtgttcaccaccctgtctgtgaccaagaggtctggggccagcatcctgcaggccggcggctag

SEQ ID NO: 38294 - DNA, 1746 bp, Artificial Sequence
  derived and/or modified sequence
atgcagcaggtgatgctgacctgcaagggcgtgaaccggggccacgcagtaccagctggcccagggaggaaaccccggccgagacgaagttcccgccttttagctggagagaaacatctgactaggtctgccctgttactttgccacaccgaggatggaagggcgttagaaggaaccctcagtgaattagctgcggagacagacctgccggttgtgttcgtgaagcaacgaaagatcggtggacatgggcctacactgaaagcttatcaggaggggcgcttgcagaaactcctgaagatgaatggtcccgaggacctccctaagtcctatgactacgacctcatcattataggaggcgggtccggtgggctcgctgccgcgaaggaagcagcccaatatggcaagaaagtgatggttctggattttgtgactccgacaccacttggcactcggtgggggttgggtggcacctgcgtgaatgtcggatgtatccctaaaaaactcatgcatcaagctgccttgttgggccaggccctgcaggacagtcgcaactacgggtggaaagtggaggagaccgtaaagcacgattgggaccggatgatcgaagctgttcagaatcatatcgggtcccttaactggggttatagagtcgctctcagagagaaaaaggtcgtgtacgagaatgcctatggccagtttataggcccacaccgcataaaggcaactaataacaagggtaaagaaaagatttacagcgcagaaagattcctgatagccacgggggagcgtccccgctacttgggcattccaggcgacaaggagtattgcatcagcagcgacgatttatttagcttaccatactgtcctggaaagacactagtcgtgggtgcttcatatgtggctctggagtgcgccgggtttctcgcaggaatcggattagacgtgaccgtgatggtgcggtcgatcctactgcgtggttttgaccaggatatggccaacaaaatcggtgagcatatggaagaacacggaatcaaatttattcgtcagtttgtgcccatcaaggttgaacagattgaagccggcacaccagggagacttcgggtggtggcacagagcaccaattcggaggaaatcattgaaggcgaatataataccgtcatgctagctatagggagggatgcatgcactcggaagatcgggttagagacagtgggcgtcaaaataaacgagaaaactgggaagatcccagtgacggacgaggagcagactaacgttccatacatctatgctatcggtgacattctggaagacaaggtcgagcttacgccagttgctatccaggctggtaggttacttgctcagcggttatatgctggatccaccgtaaagtgtgactacgagaacgttccaactaccgtgttcacacccctcgagtatggggcttgcggtctttcagaagagaaggcagtagaaaagtttggggaggaaaacatcgaagtatatcactcctatttctggcccctggagtggactataccctcccgtgacaacaacaagtgctatgctaaaatcatctgcaacaccaaggacaacgagagggttgtgggctttcacgtgcttggcccgaacgcaggggaagtaacccagggctttgccgcggccctgaaatgcggtctgacgaaaaaacaattagacagcactattggcatccatccagtttgcgccgagttttttagtttcatctag

SEQ ID NO: 38295 - DNA, 1944 bp, Artificial Sequence
  derived and/or modified sequence
atgggctgcgccgagggcaaggccgtggccgccgccgcccccaccgagttgcagaccaaaggtaaaaatggagatggccgccggcggtccgccaaagaccaccaccctggaaagaccctgcccgagaacccagccgggttcactagcaccgccacagccgacagcagagccctgctccaggcctatattgacgggcattctgtagttatctttagccggtctacctgcactcggtgcactgaggtgaagaagttgttcaagtccctttgcgtgccctactttgttcttgagcttgatcagaccgaagacggacgtgcgctggagggtacgctctccgagctggctgccgaaacagatctgcccgtcgtctttgtgaagcagagaaagatcggtggccatggacccactttgaaagcttaccaagagggccgactgcagaagctcctaaagatgaacggtcccgaggacctacccaagtcgtatgactacgacttgattataattgggggcggatccggcggcctcgctgcagccaaagaggctgcccaatatgggaaaaaggtcatggtcctggactttgtaactcctaccccacttggtacacgctggggcctgggcggaacgtgcgtaaacgtcggatgtatccctaagaaactgatgcatcaggccgcgctgttagggcaagctctgcaggactcacgaaactatgggtggaaggtcgaggagaccgtcaaacacgactgggaccggatgattgaagcggtccagaatcacattgggtccctgaactggggttatcgggtcgcactaagggagaagaaagtggtttatgagaacgcatacggtcagttcataggtcctcataggatcaaggcaaccaacaataagggcaaggagaaaatctactctgcggaacgattcctaattgccactggcgagcggcccaggtatctcggaatcccaggcgataaagagtactgtatctcttctgatgacctcttttctctcccatactgccctggcaaaactctagtggtgggggctagctacgttgcccttgaatgtgccggatttctggccggaatcggccttgatgtcaccgtgatggtgaggtcaatcctactccggggatttgaccaggatatggctaacaagatcggagaacacatggaagagcatggcatcaaattcataaggcagtttgttcccattaaagtggagcaaatcgaagcagggactcccgggcgactccgtgtggttgcccagtcaacaaactctgaggaaattatagaaggtgaatataacacagtcatgcttgccatcggcagagatgcgtgcaccaggaaaataggcctcgaaacagtgggggtgaaaattaacgaaaaaactggaaagatccccgtaacagatgaggagcagactaatgttccatacatttatgctatcggagacattctggaagacaaggtggaactcacccccgtggctattcaggcgggacgtcttcttgcgcagcgtctctacgccggctctacagtgaaatgcgactatgagaacgtcccaaccactgtatttaccccgctggaatacggagcatgcggactctccgaagagaaggcagtggagaaattcggggaggagaacatcgaggtgtaccactcatacttttggcctctggagtggaccatcccatcgagagacaataacaaatgctatgctaagatcatttgtaacactaaggacaacgagcgcgtggtgggctttcacgtgctgggccccaatgctggagaggttacccagggattcgccgcagctctcaaatgcggtttgacaaaaaaacagcttgactctaccattggtatccaccccgtgtgcgcagaggtattcaccacattgtcggtcacaaagcgatcaggcgcatcaatcctgcaggccggttgctag

SEQ ID NO: 38296 - DNA, 1950 bp, Artificial Sequence
  derived and/or modified sequence
atgggctgcgccgagggcaaggccgtggccgccgccgcccccaccgagctgcagactaaaggcaaaaacggtgacggacgtcggcgaagtgccaaggatcaccatcccggtaagaccttgcctgagaatcctgccggatttacgtccacagccaccgcagactctcgggctctcctgcaagcctatatcgacggccactcagtggtgatcttcagcagatcaacctgcacacgctgcacagaggtgaagaagctatttaaatctctatgcgtcccctatttcgtgctcgagctggatcaaacagaggatgggcgcgctctcgagggtaccctatctgagcttgccgctgaaaccgacctgcctgtggtgttcgtgaaacaaaggaagatcggtggccacgggcccactcttaaagcttaccaggagggcagactccagaagttgttgaaaatgaacggccctgaggatctgcctaagtcttacgactacgacctcattattataggcggaggctcaggggggctcgccgccgctaaggaggccgctcaatacggaaaaaaagtgatggtgctggactttgtcacccctacgcctctgggcacacggtgggggctcggaggcacatgtgtcaacgttggttgcattccaaaaaagcttatgcaccaagccgccctgctgggtcaagctcttcaggatagcagaaattatggttggaaggtagaggagacagtgaagcacgattgggaccggatgatcgaagcagtgcagaaccacataggctctctgaattggggttaccgcgtagctttgagggaaaaaaaggtggtatacgagaacgcctacggccagtttatcgggccccatcgaattaaagctacaaacaacaagggaaaagaaaaaatctacagcgcggaacggttcctgatcgccacaggggaacggccccgatacctaggtatccctggagacaaagaatactgcatttcttccgatgatttgttctctctaccgtattgtcctgggaagactctggtcgtgggcgctagctatgtggccctggagtgcgcagggttcctggctggaattggcctcgatgtgacagttatggtgagaagtattctgttgaggggatttgaccaggacatggccaataaaatcggcgagcatatggaggagcacggtatcaagttcataagacaattcgtcccgattaaggtggagcaaatagaagcgggcacaccagggagactccgcgttgtagcgcagtcaaccaactccgaagagatcatcgagggagaatacaataccgttatgctggcgataggaagagatgcctgcactcgcaaaatcggcctggaaaccgtgggggtcaagatcaacgagaagactgggaaaattcccgtgaccgacgaagaacagaccaatgtgccatacatatacgctatcggcgatatacttgaagacaaggtggagctgactcctgtcgcaatacaggctggtaggctgctcgctcagcggctttacgcggggtcaaccgtaaagtgcgactatgagaatgtccctacaacagtctttacaccactggaatacggggcctgcgggctgagcgaggagaaggccgttgagaagtttggcgaagagaatattgaagtgtaccacagctacttctggccactagagtggacaatcccgtcgagagacaacaacaagtgttacgccaagatcatctgtaacactaaggataatgagcgagttgtgggttttcacgtcttgggacccaatgccggggaggttacccaaggattcgcagcagcactcaagtgcggcctcacgaagaagcagcttgatagcaccatcggtatccacccagtttgcgcagaggtcttcacgaccttgtccgttaccaagcgatccggcgcatcaattctccaggccggatgttgaggttag

SEQ ID NO: 38297 - DNA, 1746 bp, Artificial Sequence
  derived and/or modified sequence
atgcagcaggttatgctcacttgcaagggagtgaacagagggcacgctgtgcctgcaggcccagggcgaaagcctcgaccacgtcgctcttcacgactgctggcaggagaaaagcacctaacccgaagtgccctgctgctgtgccataccgaggacggaagggccctggaggggacactgtccgaacttgctgctgagaccgatttgcctgtagtttttgtgaagcagaggaagatcggcggtcatggcccaactcttaaggcatatcaggagggcagactgcaaaaattactaaagatgaacggccctgaggatcttcccaagtcctacgattacgacctgataattattggcggaggatctggcggactggctgctgcgaaagaggcagctcagtatggtaaaaaagtgatggtactggatttcgtgacacccacccccctgggcacaagatgggggctgggcggaacatgcgtgaacgtcgggtgtatcccgaaaaagctcatgcatcaggccgctttgctgggccaagcacttcaagattctcgtaactacggctggaaagtggaggagactgtgaagcacgattgggatcgtatgatcgaagcggtccagaaccacataggcagcctgaactggggctatagggtggcccttcgggagaagaaggtagtatatgagaacgcctatggacagttcattggtcctcatcgcatcaaggccaccaataacaaagggaaggaaaaaatttactccgctgagcgctttttgattgcgaccggagagcgacccagatacctgggcattcccggtgataaagaatattgcatttcttcggatgacctgttctcactgccgtactgccctggaaagaccctcgtcgtgggggcaagttatgtcgcactcgagtgcgcgggattcctggcagggatcggactcgacgtcaccgtgatggtgcgttcaatcctccttagagggttcgaccaggacatggctaacaaaatcggcgaacatatggaggagcacgggatcaaattcatacggcagttcgtccctatcaaagtcgagcagattgaggccggaaccccagggagactgcgtgttgtggctcagtcaacgaactcagaggagatcattgagggtgaatacaataccgtgatgctcgcaataggcagagacgcatgtactcggaagatcgggttggagaccgtcggggtcaaaattaatgaaaaaaccggcaaaatccccgtcacagatgaggagcagaccaacgtgccatacatttatgcaattggagatatactcgaagacaaagtggagctgacccctgtcgcaatccaggccggtcgcctactggctcaacggctctatgccggatcgactgtcaagtgcgactatgagaacgtgccaaccacagtgtttaccccactggagtatggagcatgtggcctgtccgaggagaaggccgttgagaaatttggcgaggaaaatatagaagtttaccattcatatttttggccactcgaatggacaattccaagtcgggacaacaacaagtgttacgcaaaaatcatctgcaacaccaaagacaatgaacgagtagtcgggttccatgtgcttgggccaaacgcgggagaggtaacccaggggttcgccgcagccttgaaatgtggtttgaccaaaaaacagttggacagcaccatcggtatccatccagtttgcgcagagttttttagcttcatctag

SEQ ID NO: 38298 - DNA, 1944 bp, Artificial Sequence
  derived and/or modified sequence
atggggtgcgcagaaggaaaggctgttgcagctgccgcaccaacagaattgcagactaaggggaagaatggtgacggtcgcaggcggtcagctaaagaccatcatcctgggaaaacactgcccgaaaatcctgcagggtttacctcgaccgccacggccgactccagagcgctacttcaagcttacatcgacggacatagcgtagtaattttctccaggtccacatgcacaaggtgtactgaggtcaaaaagctattcaagtccctatgcgtgccctatttcgttctggaattggatcagaccgaagatgggagagcgctggagggcaccctcagcgagctggcagcggaaaccgatctccccgtcgtttttgtgaagcagcgcaagataggaggacacgggccaaccctgaaagcgtaccaggaggggaggcttcagaagctgctgaagatgaacgggcctgaggatctgcctaagtcctacgactacgatcttataattattgggggaggatcagggggactagccgcagctaaggaagccgctcaatacggcaagaaggttatggtgctcgatttcgtcacccccacacctcttggaactcggtggggcttgggcggaacttgcgtcaacgttggttgcattccaaagaagctgatgcaccaggccgctttgttgggtcaggcgttgcaggattcccgaaactacggctggaaggtggaggagactgtaaaacatgattgggatcgcatgatagaagccgttcaaaaccacattggaagtctgaattggggctatagggtggccctccgcgaaaaaaaggtggtctatgaaaatgcttatgggcaattcattggccctcatcgaatcaaggctacgaacaacaagggcaaagaaaagatttatagtgccgaacgatttcttattgccactggtgaacgccctaggtacctcggaatcccaggtgacaaggaatattgcataagtagcgatgatctattctcacttccctactgccctgggaaaactttggtggtcggcgctagttatgtagccctggagtgcgccggattcttagcgggtattgggcttgacgtgactgttatggtccggagcattctcctgagggggtttgaccaggacatggccaataagatcggcgaacatatggaggagcatggcattaagtttatcagacagtttgtgcccatcaaagtggagcaaattgaggctggcactccaggaaggctaagggttgtcgcccaaagtaccaactcggaggaaattatagaaggagagtataataccgtgatgctcgcgatcgggagagatgcctgcacccgaaagatcggtctggagactgtgggggtgaaaatcaatgagaagaccggaaaaatacccgtgacagacgaagagcagacaaacgtcccatatatttatgcaatcggagacatcctggaggacaaagtggagctgacacccgtggctatccaggccggacgcttattggcccaacggctctatgctggttcaacagtgaaatgtgactatgaaaacgtgccaaccacagtgttcacccctctcgagtacggcgcttgcggtttatccgaagaaaaggcagtggagaaattcggtgaagagaatattgaggtttatcactcatatttctggccactagaatggacgataccttccagagacaataacaagtgttacgcaaagattatttgcaacacgaaagacaatgaacgagttgtgggatttcacgtccttggacccaatgcaggtgaagtcacccagggattcgcagccgcattgaagtgtggcttgaccaagaagcagcttgacagcacaatcggaatccaccccgtgtgcgctgaggttttcacgacactgagcgtgaccaaacgctctggcgcatctatcttgcaagcaggttgctag

SEQ ID NO: 38299 - DNA, 1950 bp, Artificial Sequence
  derived and/or modified sequence
atgggctgcgccgaaggaaaggctgtggcggcagccgcacctacagagctgcagactaagggcaagaacggggacggaagacgacgatcagcgaaagaccatcatccaggtaaaaccctgccagaaaatccggctggtttcacatccaccgctaccgcggactcccgcgcactgcttcaggcttacattgatgggcacagtgtggtcatattttcccgatccacatgtacaaggtgcacggaggttaagaagctgttcaagtctctatgtgtgccatatttcgtgctggagctcgaccagactgaagacggaagagccctcgagggaacattatcagaactggcagctgaaactgacctcccagtcgtctttgttaagcagagaaagataggcggacatggacccacgctcaaggcttaccaggagggacggttacagaaattgttaaagatgaacgggcctgaggacctgccgaagtcatacgattacgatttgatcattattgggggaggtagcgggggtctggcagcagctaaagaagctgcgcagtacggaaaaaaggtcatggttctggactttgttacgcctactccacttggaacccggtggggcctcggaggaacttgtgtcaatgtgggatgcattcctaagaagctgatgcaccaggctgcgcttttaggacaggccctccaggattctaggaattacggctggaaggttgaagagaccgtaaaacacgattgggaccgaatgattgaggccgtccagaaccatatcgggagcctcaattggggataccgggttgccttacgtgaaaaaaaggtggtatacgagaatgcatacggccaattcatcggaccacataggatcaaggccacaaataacaagggcaaagagaagatctattccgccgaacgatttctgatagccacaggtgaaagaccgcgatatcttggcattcccggtgataaggagtattgtatctccagcgatgatctgtttagtctgccctactgtccagggaagacactggtcgtcggcgcatcatatgtcgcactcgaatgtgcaggcttcttagcaggcataggattggacgtcaccgttatggtgcggtccatcttgctccgtggattcgaccaggatatggctaacaagatcggggaacatatggaggaacatgggatcaaattcatcagacagtttgtccccatcaaggtggagcagatcgaggctgggactccgggacggctgcgggtggtggcacagtctaccaactctgaggagatcattgaaggtgagtacaatactgtgatgttggctatcgggagagacgcgtgcaccagaaagatcggcctggaaactgttggagtcaagatcaatgaaaagacagggaaaattccagtgacagatgaggaacagaccaacgttccgtatatatatgcaatcggcgacatactggaggacaaagttgagttgacacctgtggcaattcaggccggtcgcctgcttgcccaacgactctatgctggtagtaccgtgaagtgtgactacgaaaatgttccgacgaccgtgtttacccctctggagtacggggcttgtgggctctcagaggaaaaggctgtggaaaagttcggagaggaaaatattgaggtgtatcattcctacttttggcctctggagtggactatcccatctagggataataacaagtgctatgcgaagatcatttgtaacacaaaagacaatgagcgtgtggtggggttccacgtcctagggccaaacgctggcgaggtgacccagggctttgcggcagccctgaaatgtggtcttactaagaaacagttagattcaaccatcggtatccacccagtctgcgccgaggtcttcaccaccctatctgtgaccaaaaggagtggtgcatcaatcttacaggctggttgctgaggatag

SEQ ID NO: 38300 - DNA, 3858 bp, Artificial Sequence
  derived and/or modified sequence
agtgtgcggatttgccggggtcagactccaagcttgattgtgagttctagcctttgtcagaaatgcagcaagtcatgctaacttgcaagggagtcaacagagggcacgcggtgcctgcggggccgggacggaagccccgcccccggcgcagttcccgcctgttagcgggggagaagcaccttacacgctccgctctgcttttgtgccacacagaggacggtcgggccctggaaggaacgctctcggaattggccgcggaaaccgatctgcccgttgtgtttgtgaaacagagaaagataggcggccatggtccaaccttgaaggcttatcaggagggcagacttcaaaagctactaaaaatgaacggccctgaagatcttcccaagtcctatgactatgaccttatcatcattggaggtggctcaggaggtctggcagctgctaaggaggcagcccaatatggcaagaaggtgatggtcctggactttgtcactcccacccctcttggaactagatggggtctcggaggaacatgtgtgaatgtgggttgcatacctaaaaaactgatgcatcaagcagctttgttaggacaagccctgcaagactctcgaaattatggatggaaagtcgaggagacagttaagcatgattgggacagaatgatagaagctgtacagaatcacattggctctttgaattggggctaccgagtagctctgcgggagaaaaaagtcgtctatgagaatgcttatgggcaatttattggtcctcacaggattaaggcaacaaataataaaggcaaagaaaaaatttattcagcagagagatttctcattgccactggtgaaagaccacgttacttgggcatccctggtgacaaagaatactgcatcagcagtgatgatcttttctccttgccttactgcccgggtaagaccctggttgttggagcatcctatgtcgctttggagtgcgctggatttcttgctggtattggtttagacgtcactgttatggttaggtccattcttcttagaggatttgaccaggacatggccaacaaaattggtgaacacatggaagaacatggcatcaagtttataagacagttcgtaccaattaaagttgaacaaattgaagcagggacaccaggccgactcagagtagtagctcagtccaccaatagtgaggaaatcattgaaggagaatataatacggtgatgctggcaataggaagagatgcttgcacaagaaaaattggcttagaaaccgtaggggtgaagataaatgaaaagactggaaaaatacctgtcacagatgaagaacagaccaatgtgccttacatctatgccattggcgatatattggaggataaggtggagctcaccccagttgcaatccaggcaggaagattgctggctcagaggctctatgcaggttccactgtcaagtgtgactatgaaaatgttccaaccactgtatttactcctttggaatatggtgcttgtggcctttctgaggagaaagctgtggagaagtttggggaagaaaatattgaggtttaccatagttacttttggccattggaatggacgattccgtcaagagataacaacaaatgttatgcaaaaataatctgtaatactaaagacaatgaacgtgttgtgggctttcacgtactgggtccaaatgctggagaagttacacaaggctttgcagctgcgctcaaatgtggactgaccaaaaagcagctggacagcacaattggaatccaccctgtctgtgcagagtttttttcatttatttgagatagggttcctgtcacccaggctggagtgcagtggtgtgatctcagttcactgcagccttgacctttcaagctcaagcgatgttcctgcctcagtctcctgagtagctgggaccacaggtattcacaacattgtctgtgaccaagcgctctggggcaagcatcctccaggctggctgctgaggttaagccccagtgtggatgctgttgccaagactgcaaaccactggctcgtttccgtgcccaaatccaaggcgaagttttctagagggttcttgggctcttggcacctgcgtgtcctgtgcttaccaccgcccaaggcccccttggatctcttggataggagttggtgaatagaaggcaggcagcatcacactggggtcactgacagacttgaagctgacatttggcagggcatcgaagggatgcatccatgaagtcaccagtctcaagcccatgtggtaggcggtgatggaacaactgtcaaatcagttttagcatgacctttccttgtggattttcttattctcgttgtcaagttttctagggttgaatttttttcttttttctccatggtgttaatgatattagagatgaaaaacgttagcagttgatttttgtccaaaagcaagtcatggctagagtatccatgcaaggtgtcttgttgcatggaagggatagtttggctcccttggaggctatgtaggcttgtcccgggaaagagaactgtcctgcagctgaaatggactgttctttactgacctgctcagcagtttcttctctcatatattcccaaaacaagtacatctgcgatcaactctagccaaatttgcccctgtgtgctacatgatggatgattattattttaaggtctgtttaggaagggaaatggctacttggccagccattgcctggcatttggtagtatagtatgattctcaccattatttgtcatggaggcagacatacaccagaaatgggggagaaacagtacatatctttctgtctttagtttattgtgtgctggtctaagcaagctgagatcatttgcaatggaaaacacgtaacttgtttaaaagtttttctggtagctttagctttatgctaaaaaaaataatgacattgggtatctatttctttctaagactacattagtaggaaaataagtcttttcatgcttatgatttagctgttttgtggtaattgctttttaaaggaagttattaatatcataagttattattaatattttgaacacaggtggatgtgaaggattttcatttaaaaaccaagtggttttgactttttctgttgaatgaacaactgtgccttgtggaatttttgcagaagtgtttatgctttgttagcatttcaacttgcattattataaagaggtattaatgcctcagttatgtgtttgtcaatgtactggctgaggattctatctcagctgtcttttctaactgtgtaggttgagttttgaacacgtgcttgtggacatcaggcctcctgccagcagttcttgaagcttctttttcattcctgctactctacctgtatttctcagttgcagcactgagtggtcaaaatacatttctgggccacctcagggaacccatgcatctgcctggcatttaggcagcagagcccctgaccgtcccccacagggctctgcctcacgtcctcatctcatttggctgtgtaaagaaatgggaaaagggaaaaggagagagcaattgaggcagttgaccatattcagttttatttatttatttttaatttgtttttttctccaagtccaccagtctctgaaattagaacagtaggcggtatgagataatcaggcctaatcatgttgtgattctcttttcttagtggagtggaatgttctatccccacaagaaggattatatcttatagacttgtcttgttcagattctgtatttacccattttattgaaacatatactaagttccatgtatttttgttacaaatcttctgaaaaaaaacaaaacaatgtgaaacattaaaattaaaaggcattaataat

SEQ ID NO: 38301 - DNA, 3828 bp, Artificial Sequence
  derived and/or modified sequence
ttcccacagggccttgtgcgacatgggctgcgccgagggcaaggcagtggcggcggccgccccaacggagctgcagacgaaaggcaagaacggcgatggccgccgtaggtcagctaaagatcatcaccctggtaaaactttgccagagaacccagcaggattcaccagcacggccactgcagactccagagccctgcttcaggcctatatagatggtcactctgtggtcatcttcagtaggtccacatgcacacgctgtactgaggtaaagaagttatttaaatctctgtgtgttccttattttgtgcttgaacttgatcaaacagaggacggtcgggccctggaaggaacgctctcggaattggccgcggaaaccgatctgcccgttgtgtttgtgaaacagagaaagataggcggccatggtccaaccttgaaggcttatcaggagggcagacttcaaaagctactaaaaatgaacggccctgaagatcttcccaagtcctatgactatgaccttatcatcattggaggtggctcaggaggtctggcagctgctaaggaggcagcccaatatggcaagaaggtgatggtcctggactttgtcactcccacccctcttggaactagatggggtctcggaggaacatgtgtgaatgtgggttgcatacctaaaaaactgatgcatcaagcagctttgttaggacaagccctgcaagactctcgaaattatggatggaaagtcgaggagacagttaagcatgattgggacagaatgatagaagctgtacagaatcacattggctctttgaattggggctaccgagtagctctgcgggagaaaaaagtcgtctatgagaatgcttatgggcaatttattggtcctcacaggattaaggcaacaaataataaaggcaaagaaaaaatttattcagcagagagatttctcattgccactggtgaaagaccacgttacttgggcatccctggtgacaaagaatactgcatcagcagtgatgatcttttctccttgccttactgcccgggtaagaccctggttgttggagcatcctatgtcgctttggagtgcgctggatttcttgctggtattggtttagacgtcactgttatggttaggtccattcttcttagaggatttgaccaggacatggccaacaaaattggtgaacacatggaagaacatggcatcaagtttataagacagttcgtaccaattaaagttgaacaaattgaagcagggacaccaggccgactcagagtagtagctcagtccaccaatagtgaggaaatcattgaaggagaatataatacggtgatgctggcaataggaagagatgcttgcacaagaaaaattggcttagaaaccgtaggggtgaagataaatgaaaagactggaaaaatacctgtcacagatgaagaacagaccaatgtgccttacatctatgccattggcgatatattggaggataaggtggagctcaccccagttgcaatccaggcaggaagattgctggctcagaggctctatgcaggttccactgtcaagtgtgactatgaaaatgttccaaccactgtatttactcctttggaatatggtgcttgtggcctttctgaggagaaagctgtggagaagtttggggaagaaaatattgaggtttaccatagttacttttggccattggaatggacgattccgtcaagagataacaacaaatgttatgcaaaaataatctgtaatactaaagacaatgaacgtgttgtgggctttcacgtactgggtccaaatgctggagaagttacacaaggctttgcagctgcgctcaaatgtggactgaccaaaaagcagctggacagcacaattggaatccaccctgtctgtgcagaggtattcacaacattgtctgtgaccaagcgctctggggcaagcatcctccaggctggctgctgaggttaagccccagtgtggatgctgttgccaagactgcaaaccactggctcgtttccgtgcccaaatccaaggcgaagttttctagagggttcttgggctcttggcacctgcgtgtcctgtgcttaccaccgcccaaggcccccttggatctcttggataggagttggtgaatagaaggcaggcagcatcacactggggtcactgacagacttgaagctgacatttggcagggcatcgaagggatgcatccatgaagtcaccagtctcaagcccatgtggtaggcggtgatggaacaactgtcaaatcagttttagcatgacctttccttgtggattttcttattctcgttgtcaagttttctagggttgaatttttttcttttttctccatggtgttaatgatattagagatgaaaaacgttagcagttgatttttgtccaaaagcaagtcatggctagagtatccatgcaaggtgtcttgttgcatggaagggatagtttggctcccttggaggctatgtaggcttgtcccgggaaagagaactgtcctgcagctgaaatggactgttctttactgacctgctcagcagtttcttctctcatatattcccaaaacaagtacatctgcgatcaactctagccaaatttgcccctgtgtgctacatgatggatgattattattttaaggtctgtttaggaagggaaatggctacttggccagccattgcctggcatttggtagtatagtatgattctcaccattatttgtcatggaggcagacatacaccagaaatgggggagaaacagtacatatctttctgtctttagtttattgtgtgctggtctaagcaagctgagatcatttgcaatggaaaacacgtaacttgtttaaaagtttttctggtagctttagctttatgctaaaaaaaataatgacattgggtatctatttctttctaagactacattagtaggaaaataagtcttttcatgcttatgatttagctgttttgtggtaattgctttttaaaggaagttattaatatcataagttattattaatattttgaacacaggtggatgtgaaggattttcatttaaaaaccaagtggttttgactttttctgttgaatgaacaactgtgccttgtggaatttttgcagaagtgtttatgctttgttagcatttcaacttgcattattataaagaggtattaatgcctcagttatgtgtttgtcaatgtactggctgaggattctatctcagctgtcttttctaactgtgtaggttgagttttgaacacgtgcttgtggacatcaggcctcctgccagcagttcttgaagcttctttttcattcctgctactctacctgtatttctcagttgcagcactgagtggtcaaaatacatttctgggccacctcagggaacccatgcatctgcctggcatttaggcagcagagcccctgaccgtcccccacagggctctgcctcacgtcctcatctcatttggctgtgtaaagaaatgggaaaagggaaaaggagagagcaattgaggcagttgaccatattcagttttatttatttatttttaatttgtttttttctccaagtccaccagtctctgaaattagaacagtaggcggtatgagataatcaggcctaatcatgttgtgattctcttttcttagtggagtggaatgttctatccccacaagaaggattatatcttatagacttgtcttgttcagattctgtatttacccattttattgaaacatatactaagttccatgtatttttgttacaaatcttctgaaaaaaaacaaaacaatgtgaaacattaaaattaaaaggcatt

SEQ ID NO: 38302 - DNA, 3836 bp, Artificial Sequence
  derived and/or modified sequence
agttcccacagggccttgtgcgacatgggctgcgccgagggcaaggcagtggcggcggccgccccaacggagctgcagacgaaaggcaagaacggcgatggccgccgtaggtcagctaaagatcatcaccctggtaaaactttgccagagaacccagcaggattcaccagcacggccactgcagactccagagccctgcttcaggcctatatagatggtcactctgtggtcatcttcagtaggtccacatgcacacgctgtactgaggtaaagaagttatttaaatctctgtgtgttccttattttgtgcttgaacttgatcaaacagaggacggtcgggccctggaaggaacgctctcggaattggccgcggaaaccgatctgcccgttgtgtttgtgaaacagagaaagataggcggccatggtccaaccttgaaggcttatcaggagggcagacttcaaaagctactaaaaatgaacggccctgaagatcttcccaagtcctatgactatgaccttatcatcattggaggtggctcaggaggtctggcagctgctaaggaggcagcccaatatggcaagaaggtgatggtcctggactttgtcactcccacccctcttggaactagatggggtctcggaggaacatgtgtgaatgtgggttgcatacctaaaaaactgatgcatcaagcagctttgttaggacaagccctgcaagactctcgaaattatggatggaaagtcgaggagacagttaagcatgattgggacagaatgatagaagctgtacagaatcacattggctctttgaattggggctaccgagtagctctgcgggagaaaaaagtcgtctatgagaatgcttatgggcaatttattggtcctcacaggattaaggcaacaaataataaaggcaaagaaaaaatttattcagcagagagatttctcattgccactggtgaaagaccacgttacttgggcatccctggtgacaaagaatactgcatcagcagtgatgatcttttctccttgccttactgcccgggtaagaccctggttgttggagcatcctatgtcgctttggagtgcgctggatttcttgctggtattggtttagacgtcactgttatggttaggtccattcttcttagaggatttgaccaggacatggccaacaaaattggtgaacacatggaagaacatggcatcaagtttataagacagttcgtaccaattaaagttgaacaaattgaagcagggacaccaggccgactcagagtagtagctcagtccaccaatagtgaggaaatcattgaaggagaatataatacggtgatgctggcaataggaagagatgcttgcacaagaaaaattggcttagaaaccgtaggggtgaagataaatgaaaagactggaaaaatacctgtcacagatgaagaacagaccaatgtgccttacatctatgccattggcgatatattggaggataaggtggagctcaccccagttgcaatccaggcaggaagattgctggctcagaggctctatgcaggttccactgtcaagtgtgactatgaaaatgttccaaccactgtatttactcctttggaatatggtgcttgtggcctttctgaggagaaagctgtggagaagtttggggaagaaaatattgaggtttaccatagttacttttggccattggaatggacgattccgtcaagagataacaacaaatgttatgcaaaaataatctgtaatactaaagacaatgaacgtgttgtgggctttcacgtactgggtccaaatgctggagaagttacacaaggctttgcagctgcgctcaaatgtggactgaccaaaaagcagctggacagcacaattggaatccaccctgtctgtgcagaggtattcacaacattgtctgtgaccaagcgctctggggcaagcatcctccaggctggctgctgaggttaagccccagtgtggatgctgttgccaagactgcaaaccactggctcgtttccgtgcccaaatccaaggcgaagttttctagagggttcttgggctcttggcacctgcgtgtcctgtgcttaccaccgcccaaggcccccttggatctcttggataggagttggtgaatagaaggcaggcagcatcacactggggtcactgacagacttgaagctgacatttggcagggcatcgaagggatgcatccatgaagtcaccagtctcaagcccatgtggtaggcggtgatggaacaactgtcaaatcagttttagcatgacctttccttgtggattttcttattctcgttgtcaagttttctagggttgaatttttttcttttttctccatggtgttaatgatattagagatgaaaaacgttagcagttgatttttgtccaaaagcaagtcatggctagagtatccatgcaaggtgtcttgttgcatggaagggatagtttggctcccttggaggctatgtaggcttgtcccgggaaagagaactgtcctgcagctgaaatggactgttctttactgacctgctcagcagtttcttctctcatatattcccaaaacaagtacatctgcgatcaactctagccaaatttgcccctgtgtgctacatgatggatgattattattttaaggtctgtttaggaagggaaatggctacttggccagccattgcctggcatttggtagtatagtatgattctcaccattatttgtcatggaggcagacatacaccagaaatgggggagaaacagtacatatctttctgtctttagtttattgtgtgctggtctaagcaagctgagatcatttgcaatggaaaacacgtaacttgtttaaaagtttttctggtagctttagctttatgctaaaaaaaataatgacattgggtatctatttctttctaagactacattagtaggaaaataagtcttttcatgcttatgatttagctgttttgtggtaattgctttttaaaggaagttattaatatcataagttattattaatattttgaacacaggtggatgtgaaggattttcatttaaaaaccaagtggttttgactttttctgttgaatgaacaactgtgccttgtggaatttttgcagaagtgtttatgctttgttagcatttcaacttgcattattataaagaggtattaatgcctcagttatgtgtttgtcaatgtactggctgaggattctatctcagctgtcttttctaactgtgtaggttgagttttgaacacgtgcttgtggacatcaggcctcctgccagcagttcttgaagcttctttttcattcctgctactctacctgtatttctcagttgcagcactgagtggtcaaaatacatttctgggccacctcagggaacccatgcatctgcctggcatttaggcagcagagcccctgaccgtcccccacagggctctgcctcacgtcctcatctcatttggctgtgtaaagaaatgggaaaagggaaaaggagagagcaattgaggcagttgaccatattcagttttatttatttatttttaatttgtttttttctccaagtccaccagtctctgaaattagaacagtaggcggtatgagataatcaggcctaatcatgttgtgattctcttttcttagtggagtggaatgttctatccccacaagaaggattatatcttatagacttgtcttgttcagattctgtatttacccattttattgaaacatatactaagttccatgtatttttgttacaaatcttctgaaaaaaaacaaaacaatgtgaaacattaaaattaaaaggcattaataat

SEQ ID NO: 38303 - protein, 972 aa, Artificial Sequence
  derived and/or modified sequence
MRGARGAWDFLCVLLLLLRVQTGSSQPSVSPGEPSPPSIHPGKSDLIVRVGDEIRLLCTDPGFVKWTFEILDETNENKQNEWITEKAEATNTGKYTCTNKHGLSNSIYVFVRDPAKLFLVDRSLYGKEDNDTLVRCPLTDPEVTNYSLKGCQGKPLPKDLRFIPDPKAGIMIKSVKRAYHRLCLHCSVDQEGKSVLSEKFILKVRPAFKAVPVVSVSKASYLLREGEEFTVTCTIKDVSSSVYSTWKRENSQTKLQEKYNSWHHGDFNYERQATLTISSARVNDSGVFMCYANNTFGSANVTTTLEVVDKGFINIFPMINTTVFVNDGENVDLIVEYEAFPKPEHQQWIYMNRTFTDKWEDYPKSENESNIRYVSELHLTRLKGTEGGTYTFLVSNSDVNAAIAFNVYVNTKPEILTYDRLVNGMLQCVAAGFPEPTIDWYFCPGTEQRCSASVLPVDVQTLNSSGPPFGKLVVQSSIDSSAFKHNGTVECKAYNDVGKTSAYFNFAFKEQIHPHTLFTPLLIGFVIVAGMMCIIVMILTYKYLQKPMYEVQWKVVEEINGNNYVYIDPTQLPYDHKWEFPRNRLSFGKTLGAGAFGKVVEATAYGLIKSDAAMTVAVKMLKPSAHLTEREALMSELKVLSYLGNHMNIVNLLGACTIGGPTLVITEYCCYGDLLNFLRRKRDSFICSKQEDHAEAALYKNLLHSKESSCSDSTNEYMDMKPGVSYVVPTKADKRRSVRIGSYIERDVTPAIMEDDELALDLEDLLSFSYQVAKGMAFLASKNCIHRDLAARNILLTHGRITKICDFGLARDIKNDSNYVVKGNARLPVKWMAPESIFNCVYTFESDVWSYGIFLWELFSLGSSPYPGMPVDSKFYKMIKEGFRMLSPEHAPAEMYDIMKTCWDADPLKRPTFKQIVQLIEKQISESTNHIYSNLANCSPNRQKPVVDHSVRINSVGSTASSSQPLLVHDDV

SEQ ID NO: 38304 - protein, 413 aa, Artificial Sequence
  derived and/or modified sequence
MRGARGAWDFLCVLLLLLRVQTGSSQPSVSPGEPSPPSIHPGKSDLIVRVGDEIRLLCTDPGFVKWTFEILDETNENKQNEWITEKAEATNTGKYTCTNKHGLSNSIYVFVRDPAKLFLVDRSLYGKEDNDTLVRCPLTDPEVTNYSLKGCQGKPLPKDLRFIPDPKAGIMIKSVKRAYHRLCLHCSVDQEGKSVLSEKFILKVRPAFKAVPVVSVSKASYLLREGEEFTVTCTIKDVSSSVYSTWKRENSQTKLQEKYNSWHHGDFNYERQATLTISSARVNDSGVFMCYANNTFGSANVTTTLEVVDKGFINIFPMINTTVFVNDGENVDLIVEYEAFPKPEHQQWIYMNRTFTDKWEDYPKSENESNIRYVSELHLTRLKGTEGGTYTFLVSNSDVNAAIAFNVYVNSKL

SEQ ID NO: 38305 - DNA, 2919 bp, Artificial Sequence
  derived and/or modified sequence
atgagaggcgccagaggcgcctgggacttcctgtgcgtgctgctgctgctgctgagagtgcagaccggcagcagccagcccagcgtgagccccggcgagcccagcccccccagcatccaccccggcaagagcgacctgatcgtgagagtgggcgacgagatcagactgctgtgcaccgaccccggcttcgtgaagtggaccttcgagatcctggacgagaccaacgagaacaagcagaacgagtggatcaccgagaaggccgaggccaccaacaccggcaagtacacctgcaccaacaagcacggcctgagcaacagcatctacgtgttcgtgagagaccccgccaagctgttcctggtggacagaagcctgtacggcaaggaggacaacgacaccctggtgagatgccccctgaccgaccccgaggtgaccaactacagcctgaagggctgccagggcaagcccctgcccaaggacctgagattcatccccgaccccaaggccggcatcatgatcaagagcgtgaagagagcctaccacagactgtgcctgcactgcagcgtggaccaggagggcaagagcgtgctgagcgagaagttcatcctgaaggtgagacccgccttcaaggccgtgcccgtggtgagcgtgagcaaggccagctacctgctgagagagggcgaggagttcaccgtgacctgcaccatcaaggacgtgagcagcagcgtgtacagcacctggaagagagagaacagccagaccaagctgcaggagaagtacaacagctggcaccacggcgacttcaactacgagagacaggccaccctgaccatcagcagcgccagagtgaacgacagcggcgtgttcatgtgctacgccaacaacaccttcggcagcgccaacgtgaccaccaccctggaggtggtggacaagggcttcatcaacatcttccccatgatcaacaccaccgtgttcgtgaacgacggcgagaacgtggacctgatcgtggagtacgaggccttccccaagcccgagcaccagcagtggatctacatgaacagaaccttcaccgacaagtgggaggactaccccaagagcgagaacgagagcaacatcagatacgtgagcgagctgcacctgaccagactgaagggcaccgagggcggcacctacaccttcctggtgagcaacagcgacgtgaacgccgccatcgccttcaacgtgtacgtgaacaccaagcccgagatcctgacctacgacagactggtgaacggcatgctgcagtgcgtggccgccggcttccccgagcccaccatcgactggtacttctgccccggcaccgagcagagatgcagcgccagcgtgctgcccgtggacgtgcagaccctgaacagcagcggcccccccttcggcaagctggtggtgcagagcagcatcgacagcagcgccttcaagcacaacggcaccgtggagtgcaaggcctacaacgacgtgggcaagaccagcgcctacttcaacttcgccttcaaggagcagatccacccccacaccctgttcacccccctgctgatcggcttcgtgatcgtggccggcatgatgtgcatcatcgtgatgatcctgacctacaagtacctgcagaagcccatgtacgaggtgcagtggaaggtggtggaggagatcaacggcaacaactacgtgtacatcgaccccacccagctgccctacgaccacaagtgggagttccccagaaacagactgagcttcggcaagaccctgggcgccggcgccttcggcaaggtggtggaggccaccgcctacggcctgatcaagagcgacgccgccatgaccgtggccgtgaagatgctgaagcccagcgcccacctgaccgagagagaggccctgatgagcgagctgaaggtgctgagctacctgggcaaccacatgaacatcgtgaacctgctgggcgcctgcaccatcggcggccccaccctggtgatcaccgagtactgctgctacggcgacctgctgaacttcctgagaagaaagagagacagcttcatctgcagcaagcaggaggaccacgccgaggccgccctgtacaagaacctgctgcacagcaaggagagcagctgcagcgacagcaccaacgagtacatggacatgaagcccggcgtgagctacgtggtgcccaccaaggccgacaagagaagaagcgtgagaatcggcagctacatcgagagagacgtgacccccgccatcatggaggacgacgagctggccctggacctggaggacctgctgagcttcagctaccaggtggccaagggcatggccttcctggccagcaagaactgcatccacagagacctggccgccagaaacatcctgctgacccacggcagaatcaccaagatctgcgacttcggcctggccagagacatcaagaacgacagcaactacgtggtgaagggcaacgccagactgcccgtgaagtggatggcccccgagagcatcttcaactgcgtgtacaccttcgagagcgacgtgtggagctacggcatcttcctgtgggagctgttcagcctgggcagcagcccctaccccggcatgcccgtggacagcaagttctacaagatgatcaaggagggcttcagaatgctgagccccgagcacgcccccgccgagatgtacgacatcatgaagacctgctgggacgccgaccccctgaagagacccaccttcaagcagatcgtgcagctgatcgagaagcagatcagcgagagcaccaaccacatctacagcaacctggccaactgcagccccaacagacagaagcccgtggtggaccacagcgtgagaatcaacagcgtgggcagcaccgccagcagcagccagcccctgctggtgcacgacgacgtgtag

SEQ ID NO: 38306 - DNA, 1242 bp, Artificial Sequence
  derived and/or modified sequence
atgagaggcgccagaggcgcctgggacttcctgtgcgtgctgctgctgctgctgagagtgcagaccggcagcagccagcccagcgtgagccccggcgagcccagcccccccagcatccaccccggcaagagcgacctgatcgtgagagtgggcgacgagatcagactgctgtgcaccgaccccggcttcgtgaagtggaccttcgagatcctggacgagaccaacgagaacaagcagaacgagtggatcaccgagaaggccgaggccaccaacaccggcaagtacacctgcaccaacaagcacggcctgagcaacagcatctacgtgttcgtgagagaccccgccaagctgttcctggtggacagaagcctgtacggcaaggaggacaacgacaccctggtgagatgccccctgaccgaccccgaggtgaccaactacagcctgaagggctgccagggcaagcccctgcccaaggacctgagattcatccccgaccccaaggccggcatcatgatcaagagcgtgaagagagcctaccacagactgtgcctgcactgcagcgtggaccaggagggcaagagcgtgctgagcgagaagttcatcctgaaggtgagacccgccttcaaggccgtgcccgtggtgagcgtgagcaaggccagctacctgctgagagagggcgaggagttcaccgtgacctgcaccatcaaggacgtgagcagcagcgtgtacagcacctggaagagagagaacagccagaccaagctgcaggagaagtacaacagctggcaccacggcgacttcaactacgagagacaggccaccctgaccatcagcagcgccagagtgaacgacagcggcgtgttcatgtgctacgccaacaacaccttcggcagcgccaacgtgaccaccaccctggaggtggtggacaagggcttcatcaacatcttccccatgatcaacaccaccgtgttcgtgaacgacggcgagaacgtggacctgatcgtggagtacgaggccttccccaagcccgagcaccagcagtggatctacatgaacagaaccttcaccgacaagtgggaggactaccccaagagcgagaacgagagcaacatcagatacgtgagcgagctgcacctgaccagactgaagggcaccgagggcggcacctacaccttcctggtgagcaacagcgacgtgaacgccgccatcgccttcaacgtgtacgtgaacagcaagctgtag

SEQ ID NO: 38307 - DNA, 2919 bp, Artificial Sequence
  derived and/or modified sequence
atgcgtggcgcacgcggagcctgggattttctgtgtgttcttcttcttctgctgagagtgcagactggaagctcccagcccagcgtgtcccccggtgagcccagccctccatcgattcatcctggaaaatccgacctcatcgtgagagtcggcgatgaaatcagactgctctgcacagaccccgggttcgtgaaatggacttttgaaattctcgatgaaacaaacgagaataagcagaacgaatggattaccgagaaggctgaggccaccaacaccggcaaatatacctgtactaataaacatggcctctctaactccatatacgtgtttgttcgcgatcccgccaagctatttctagtggaccgttccctgtatgggaaggaggataatgacacattagttcgctgccccctgaccgatcccgaggtgactaactattcactgaaaggatgccagggaaaacccctccctaaagacctgcgtttcattcccgatcccaaagctggaataatgattaaatctgtgaagcgtgcctaccaccgactgtgcctgcactgcagtgtcgaccaggaaggaaagagcgtgttaagtgagaagtttatcctcaaggtgcgcccagcattcaaagcggtgcctgtggtgtctgtgtctaaagccagttacctgttgagggagggtgaagagttcaccgtgacttgtactatcaaagacgtttcctcatcggtgtactcaacatggaagcgagaaaattcccagacaaagctccaggagaagtataattcttggcatcacggagacttcaactacgagcggcaagctaccctgacaatcagtagcgctcgtgtaaatgatagcggcgtattcatgtgctacgccaacaataccttcggatccgcgaacgtgaccacaacacttgaggtggttgataagggcttcattaatattttcccaatgatcaataccaccgtgttcgtgaatgacggtgaaaacgtcgatctgattgtggaatacgaagcatttccaaagcctgaacaccagcagtggatttacatgaacagaacatttacagataaatgggaggactaccctaagtcggagaacgaaagtaacataagatacgtgagcgaactgcatctcaccagacttaagggcactgaaggtgggacctatacctttttggtgagtaattccgatgtcaacgcagccatcgctttcaacgtgtacgtcaacacgaaaccagaaattctcacttatgatcgattagtgaacgggatgctccagtgcgtggcggcaggttttcctgaaccaaccatagactggtacttttgccccggtactgagcaacggtgctcagccagcgtacttccagtggacgtgcagacactgaacagcagcggccccccattcggcaagctggtcgtgcaaagtagtatcgacagctcggcctttaaacacaatggcactgtggaatgtaaagcctataacgatgtcggcaaaacctcagcctacttcaacttcgcatttaaggagcagattcaccctcacaccctgttcacccccctgctcatcgggttcgtaattgtggccggcatgatgtgcattatcgtgatgattttgacctataaatatctgcagaaacctatgtatgaagtgcagtggaaagtagtcgaagagattaatggcaataattacgtatacattgacccgactcagcttccttatgatcacaagtgggagtttccccggaatcgattgagttttggaaaaactctgggggccggtgcttttggaaaggttgtggaggctaccgcttatggcctaatcaaatcggacgcagccatgaccgtggcagtgaagatgctcaaaccgtcggcccatctcactgaaagagaagctctgatgagcgaattgaaggtgttgtcttacctggggaaccacatgaatatcgtgaacttactcggtgcatgtacgatcggcgggccaacccttgtgatcactgagtattgctgttatggagatctactgaacttcctcaggaggaaacgtgactccttcatctgctccaaacaagaggatcacgcggaagcagccctttataaaaatctactgcactccaaggagtccagctgttctgattccacaaatgaatacatggatatgaagcccggagtttcatatgtggttcccaccaaggctgacaaacgaagatccgtccgaatcgggtcatatatcgagagagacgtgacacccgcaataatggaagacgacgagctggcactcgatctcgaagacctgctctcattctcctaccaggttgctaagggcatggccttcttggcttctaagaattgtatccaccgagacttggctgctaggaacattttgctcacccacggtagaatcactaagatctgcgactttggcctggctcgcgacataaaaaatgactccaactacgtggtgaaaggcaatgcacgactacccgtgaagtggatggcgcctgagtccatttttaattgtgtctacacctttgagagcgacgtgtggagctacggaatatttttgtgggagctcttcagtctcggatcgtcgccctaccccggtatgcccgtcgacagcaaattttacaagatgatcaaggaagggttcaggatgctgagtccagagcacgcgcctgcagaaatgtacgacataatgaaaacgtgttgggacgcggatcccttaaagaggcctacattcaagcaaatagtgcagctgatcgagaaacaaatcagcgagagtactaatcacatttactcgaacttggctaattgcagccctaataggcagaagcccgtggttgaccacagtgttaggatcaactctgtgggatcaacagcctcaagctcccagcccctgctggtacatgatgacgtttag

SEQ ID NO: 38308 - DNA, 1242 bp, Artificial Sequence
  derived and/or modified sequence
atgcgaggagcacggggagcctgggattttctatgcgtattgctcttactgctccgcgtgcaaactggcagtagccagccatccgtgagcccaggagagcctagccctcctagtatccatcctggcaaaagtgatctcatcgttcgcgtgggagatgagattcggctgctgtgtacagaccctggattcgtcaaatggacatttgagatcttagacgagactaacgagaacaagcagaacgaatggattacagagaaagcagaggcaacaaataccggcaagtacacatgcactaacaagcacggcctctccaattcaatttacgtattcgtaagagaccccgcaaagctgttcctggtagatagatcgctgtatgggaaggaggacaatgacacactggtaaggtgccctctgactgaccctgaagtgacgaactattctctcaaaggatgccaaggcaaaccgctgcccaaagacctgcgttttatccccgacccaaaggccgggataatgataaagtccgtgaagcgcgcataccaccgcctatgcctgcactgctccgtggaccaggaaggaaagtctgtgctgtccgaaaagtttatcctcaaggtgaggccggcctttaaggccgtacccgtggttagcgtgagcaaggcgtcgtatctcctgagagaaggtgaggaattcaccgtgacttgtacaatcaaagatgtttcctcctcagtttattccacctggaaaagggagaactcgcagactaaactgcaggagaaatacaattcctggcaccacggcgacttcaactacgaaaggcaggcaacgctgaccatctcatctgcccgtgttaacgacagcggggttttcatgtgctatgccaataacacgttcgggagtgcgaacgtgaccaccaccctcgaggtggtggataagggattcattaacatatttccaatgattaacaccaccgtatttgttaacgatggggagaacgtggacctcatcgtggagtacgaagccttccccaaaccagagcaccaacagtggatttacatgaatagaacttttaccgataagtgggaagattatccaaagtccgaaaatgaaagtaacatcagatatgtgagcgaactccatctcactcgccttaaaggaaccgagggaggcacatacaccttcctggtatcaaactcagacgtgaacgcagctatagctttcaatgtctatgttaactctaagctgtag

SEQ ID NO: 38309 - DNA, 2919 bp, Artificial Sequence
  derived and/or modified sequence
atgagaggagcccggggggcctgggacttcctgtgtgtgctgctgctgctgctgcgggtgcagacaggcagcagccagcccagcgtgtccccaggagagcccagcccccccagcatccaccctgggaagagtgacctgattgtgcgggtgggagatgagatccggctgctgtgcacagatcctggctttgtgaagtggacctttgagatcctggatgagaccaatgaaaacaagcagaatgagtggatcacagagaaggccgaggccaccaacacaggcaagtacacctgcaccaacaagcacggcctgagcaacagcatctacgtgtttgtgcgggaccctgccaagctgttcctggtggacaggagcctgtatggcaaggaggacaatgacaccctggtgcgctgccccctgacagatcctgaggtgaccaactacagcctgaagggctgccagggcaagcccctgcccaaggacctgcgcttcatcccagaccccaaggccggcatcatgatcaagtctgtgaagagggcctaccaccggctgtgcctgcactgcagcgtggaccaggagggcaagtctgtgctgtctgagaagttcatcctgaaggtgcggcctgccttcaaggctgtgcctgtggtgtctgtgtccaaggccagctacctgctgcgggagggggaggagttcaccgtgacctgcaccatcaaggatgtgagcagctctgtgtacagcacctggaagcgggagaacagccagaccaagctgcaggagaagtacaacagctggcaccacggggacttcaactatgagcggcaggccaccctgaccatcagcagcgcccgggtgaatgattctggagtcttcatgtgctacgccaacaacaccttcggcagcgccaacgtgaccaccaccctggaggtggtggacaagggcttcatcaacatcttccccatgatcaacaccaccgtgtttgtgaatgatggagaaaatgtggacctgattgtggagtatgaggccttccccaagccagagcaccagcagtggatctacatgaacagaaccttcacagacaagtgggaggactaccccaagtcagaaaatgaaagcaacatccgctacgtgtctgagctgcacctgacccggctgaagggcacagaaggaggcacctacaccttcctggtgagcaacagtgatgtgaatgctgccatcgccttcaacgtgtatgtgaacaccaagccagagatcctgacctatgaccggctggtgaatggcatgctgcagtgtgtggccgccggcttccctgagcccaccatcgactggtacttctgccccggcacagagcagcgctgcagcgcctctgtgctgcctgtggatgtgcagaccctgaacagcagcggccccccatttgggaagctggtggtgcagagcagcattgacagcagcgccttcaagcacaacggcaccgtggagtgcaaggcctacaatgatgtgggcaagaccagcgcctacttcaactttgccttcaaggagcagatccacccccacaccctcttcacccccctgctgattggatttgtgattgtggccggcatgatgtgcatcatcgtgatgatcctgacctacaagtacctgcagaagcccatgtatgaggtgcagtggaaggtggtggaggagatcaatggaaacaactacgtgtacatcgaccccacccagctgccctatgaccacaagtgggagttccccaggaaccggctgagctttgggaagaccctgggcgctggggccttcggcaaggtggtggaggccacagcctacggcctcatcaagagtgatgctgccatgacagtggccgtgaagatgctgaagcccagcgcccacctgacagagcgggaggccctgatgtctgagctgaaggtgctgagctacctgggcaaccacatgaacatcgtgaacctgctgggcgcctgcaccatcggcggccccaccctggtgatcacagagtactgctgctatggagacctgctgaacttcctgcggaggaagagggacagcttcatctgcagcaagcaggaggaccacgccgaggccgccctgtacaagaacctgctgcacagcaaggagagcagctgcagcgacagcaccaatgagtacatggacatgaagccaggagtgtcctatgtggtgcccaccaaggctgacaagagaagatctgtgcgcatcggcagctacatcgagagagatgtgaccccagccatcatggaggatgatgagctggccctggacctggaggacctgctgtccttctcctaccaggtggccaagggcatggccttcctggccagcaagaactgcatccaccgggacctggccgccaggaacatcctgctgacccacggccgcatcaccaagatctgtgactttggcctggcccgggacatcaagaatgacagcaactacgtggtgaagggaaatgcccggctgcctgtgaagtggatggcccctgagagcatcttcaactgtgtgtacacctttgaaagtgatgtgtggagctatggcatcttcctgtgggagctgttcagcctgggcagcagcccctacccaggcatgcctgtggacagcaagttctacaagatgatcaaggagggcttcaggatgctgagccctgagcacgccccagctgagatgtatgacatcatgaagacctgctgggatgctgaccccctgaagaggcccaccttcaagcagatcgtgcagctgattgagaagcagatcagcgagagcaccaaccacatctacagcaacctggccaactgcagccccaaccggcagaagcctgtggtggaccacagcgtgcgcatcaacagcgtgggcagcacagccagcagcagccagcccctgctggtgcatgatgatgtgtag

SEQ ID NO: 38310 - DNA, 1242 bp, Artificial Sequence
  derived and/or modified sequence
atgagaggagcccggggggcctgggacttcctgtgtgtgctgctgctgctgctgcgggtgcagacaggcagcagccagcccagcgtgtccccaggagagcccagcccccccagcatccaccctgggaagagtgacctgattgtgcgggtgggagatgagatccggctgctgtgcacagatcctggctttgtgaagtggacctttgagatcctggatgagaccaatgaaaacaagcagaatgagtggatcacagagaaggccgaggccaccaacacaggcaagtacacctgcaccaacaagcacggcctgagcaacagcatctacgtgtttgtgcgggaccctgccaagctgttcctggtggacaggagcctgtatggcaaggaggacaatgacaccctggtgcgctgccccctgacagatcctgaggtgaccaactacagcctgaagggctgccagggcaagcccctgcccaaggacctgcgcttcatcccagaccccaaggccggcatcatgatcaagtctgtgaagagggcctaccaccggctgtgcctgcactgcagcgtggaccaggagggcaagtctgtgctgtctgagaagttcatcctgaaggtgcggcctgccttcaaggctgtgcctgtggtgtctgtgtccaaggccagctacctgctgcgggagggggaggagttcaccgtgacctgcaccatcaaggatgtgagcagctctgtgtacagcacctggaagcgggagaacagccagaccaagctgcaggagaagtacaacagctggcaccacggggacttcaactatgagcggcaggccaccctgaccatcagcagcgcccgggtgaatgattctggagtcttcatgtgctacgccaacaacaccttcggcagcgccaacgtgaccaccaccctggaggtggtggacaagggcttcatcaacatcttccccatgatcaacaccaccgtgtttgtgaatgatggagaaaatgtggacctgattgtggagtatgaggccttccccaagccagagcaccagcagtggatctacatgaacagaaccttcacagacaagtgggaggactaccccaagtcagaaaatgaaagcaacatccgctacgtgtctgagctgcacctgacccggctgaagggcacagaaggaggcacctacaccttcctggtgagcaacagtgatgtgaatgctgccatcgccttcaacgtgtatgtgaacagcaagctgtag

SEQ ID NO: 38311 - DNA, 2919 bp, Artificial Sequence
  derived and/or modified sequence
atgcggggcgcccggggcgcctgggacttcctgtgcgtgctgctgctgttgctacgagtccagacaggttcttctcagccatcagtaagtccgggagaaccaagtcctccctctatccaccctggcaagtcagacttaatcgtgcgagttggtgatgaaatcaggttactgtgtaccgatccaggatttgtcaaatggaccttcgagattctggatgagacgaatgagaacaaacagaacgaatggatcacggagaaggcggaggccacgaataccggaaagtacacatgtacgaataagcacggtctaagcaactctatctacgtgttcgtgcgcgatcccgccaagctgttcctcgtcgatcgttccctgtacggaaaggaggataacgacaccctggtaaggtgccctctcacggatcccgaggtgacgaactatagtctgaagggatgtcagggtaaaccattacccaaggacctgcgcttcattcctgatccaaaggccggaatcatgatcaagtctgtgaagagggcctaccataggctctgcctgcactgtagcgttgatcaggagggtaagagcgtactcagcgagaaatttatcctgaaggtgcgccctgccttcaaagccgtccctgttgtctccgtgtcaaaagcctcgtatttactgcgggagggagaggaatttaccgtgacgtgtacgataaaggacgtgtctagtagtgtctacagtacgtggaaacgggagaacagccagactaagttgcaggaaaaatataattcctggcatcatggagattttaactatgagcggcaagccaccctcacaatctcatctgcccgagtgaacgacagtggcgtgttcatgtgctatgcaaataatacatttggttccgcgaacgttactacaaccttggaggttgtggacaaagggtttattaacatttttcctatgattaatactactgtattcgtcaatgacggcgaaaacgtcgatttgatcgtggagtatgaggcatttcccaaaccggagcaccagcagtggatatatatgaatcgcactttcacagacaaatgggaggattacccaaagtctgagaatgaaagtaatatacgttatgtgtctgagctgcatctcacaagactcaaaggcaccgaaggaggtacttacacctttctcgtgagcaactccgatgtcaatgccgctatcgctttcaatgtgtacgtcaacaccaagccagagattctcacctatgatcgcctggtgaatgggatgcttcaatgcgtggctgcaggcttccctgaacccactattgactggtatttttgcccaggcactgagcaacgctgctccgcctctgttctgcctgttgatgttcaaacgcttaacagtagcggtcctcccttcggtaagctggttgttcagagctccatagatagtagcgcatttaaacacaacggcaccgttgagtgcaaagcctacaacgatgtgggcaaaaccagcgcttattttaatttcgcctttaaagagcagattcacccccacacactatttacgccacttctcattggctttgttattgtagccggtatgatgtgcataatagtgatgatcctcacttataaatacctacagaaacctatgtacgaggtacaatggaaggtggtagaggaaattaatgggaataattacgtgtacatcgatcctacacaattaccctatgaccacaaatgggagtttccccggaataggctctcatttggaaaaacgctcggtgccggagctttcgggaaagtcgtagaggctaccgcttacggcctcatcaagagtgatgctgccatgacagtggcagtgaaaatgttaaaaccctcggctcacctaaccgaacgtgaggctctcatgagcgagttaaaagtcctgagttacctgggaaatcatatgaacattgtcaatctcttaggggcttgcacaatcggtggacctacccttgtgatcaccgagtattgttgttacggcgatctcttgaactttctccgtaggaaacgggacagctttatttgctctaagcaggaggaccacgctgaagccgcattatacaagaacctgcttcatagtaaggagtcaagttgctcggactctaccaatgagtacatggacatgaagcccggcgtaagctacgtggtgcccaccaaggctgataagaggaggtctgtgaggatcggctcgtatatcgagcgtgacgtgacgcctgccatcatggaagacgatgaattagcgttggacctggaggaccttcttagctttagctaccaggtggccaaaggaatggctttcctggcaagcaaaaactgcatccacagggatttggctgccagaaatatccttctgacccatgggcgtatcacaaagatctgcgacttcggcctcgctagggacatcaagaacgatagtaactatgtcgtgaaaggcaatgcccgcctcccagtgaagtggatggcgcccgagagcatcttcaattgcgtatacacctttgaatccgatgtgtggagttatggcatttttctctgggaacttttctcactgggctctagcccgtaccccggcatgccagtcgatagcaagttctacaagatgatcaaggaaggcttcaggatgctgagcccagaacatgcgcctgccgaaatgtatgacattatgaagacatgttgggacgcagaccccttgaagagacccactttcaagcagatcgtgcaactcattgagaaacagatcagtgagagcacaaaccacatctactcgaacctggccaactgtagcccgaacaggcaaaagccagttgtggatcattctgtccggatcaactcggtgggtagcacagcttctagtagccagccactgttggtgcacgatgacgtgtag

SEQ ID NO: 38312 - DNA, 1242 bp, Artificial Sequence
  derived and/or modified sequence
atgcggggcgcccggggcgcctgggacttcctgtgcgtgctgctgctgttactccgagtccagaccggttcaagccaaccttctgtgagcccaggggagccgagtcctccaagcatccatcctggcaagtccgacctaatagtacgggtcggcgatgaaattcgattgctatgcactgacccaggattcgtaaagtggacttttgagatcttggatgagacgaatgagaacaagcagaatgaatggatcacggaaaaagcagaggcgaccaataccgggaagtatacgtgtactaacaaacatgggctgtcaaatagcatctatgtgttcgtccgggaccctgctaaactcttcctggtcgaccgttccctttatggcaaagaggacaacgatacactggtgcgttgcccgctgacagatccggaagtaactaattatagtctaaagggctgtcaaggaaagccattacccaaagatttacggttcatcccagaccccaaagctggtattatgatcaaaagcgtgaagcgggcgtatcatcggttgtgccttcactgctcggtggatcaagaaggcaagagcgtgctctcagagaagtttatcctcaaagttaggcctgctttcaaggctgttccagtagtgtcagtgtctaaggcctcttatctgttgagggaaggtgaggagttcactgtcacttgcaccatcaaggacgtgtccagctctgtgtatagcacctggaaacgcgagaattcccagacgaaactgcaagagaagtacaactcctggcaccacggggattttaactatgagcggcaagccaccctgacaatctcatctgctcgcgtgaatgattctggagttttcatgtgttatgctaacaacacgttcggcagtgctaatgtgactactaccctggaagtggtggataagggattcatcaatatattcccgatgattaacaccaccgtgttcgttaacgacggtgaaaatgtcgacctcatcgtcgagtatgaggcctttcctaagccggagcaccagcagtggatctatatgaatagaacatttactgacaaatgggaagattatcccaagagtgaaaacgaatctaatattcggtacgtctctgaattacacctgacacgcctgaaaggtacagaggggggcacctatacttttctagtgtccaacagcgacgtcaacgccgcaatcgcgtttaacgtgtacgttaatagtaaattatag

SEQ ID NO: 38313 - DNA, 2919 bp, Artificial Sequence
  derived and/or modified sequence
atgcgcggtgcccgtggcgcttgggatttcctgtgtgtgctgctgctgctgttacgtgtgcagaccgggtcttctcagccctccgtgagccctggcgaacctagtccgccttccattcacccaggcaaatctgacctgattgtgagggtaggcgatgagattaggctgctgtgcactgaccctggttttgtgaaatggacatttgagattctggatgagacgaatgagaacaagcaaaatgaatggattactgagaaagcggaggccacaaatactggaaaatatacttgtaccaataagcatggcctgtccaacagcatatatgtcttcgtcagggatccagctaagctctttctcgttgaccgatctctgtatgggaaagaagataacgatacgttagtccgctgtccgctgaccgacccggaggtcacaaactatagtctgaagggttgccaggggaagcccctccctaaagacttacggttcatccctgatccaaaggctggcatcatgataaagagtgtgaagcgggcttaccatcgcctgtgcctccattgtagcgttgatcaggagggaaagtcagtactcagcgagaagtttatcctaaaagtaagacccgctttcaaagcagtgcccgtagtttccgtgtcgaaagcctcctaccttttacgcgaaggggaagagtttaccgttacatgcactattaaggatgtaagttcaagcgtttactcaacgtggaaacgggaaaactcccagacaaagctgcaagaaaagtataatagttggcaccacggagacttcaattatgagagacaagccactttgactatcagctcggctcgggtcaatgactccggcgtgtttatgtgttatgcaaacaacaccttcggaagtgccaacgttacaaccacactggaggtcgttgacaaagggtttattaacattttccctatgattaatacgacagtgttcgtgaacgacggcgaaaacgtagatttaatcgtcgagtacgaggctttcccaaagcccgagcaccagcagtggatctacatgaaccgcacgttcaccgataagtgggaagactacccaaaatctgagaatgagagtaacattcgatacgtatccgaattgcacctgacaagactgaagggtaccgagggcggtacatacacctttctggtttctaatagtgacgtgaacgccgctatcgctttcaacgtctatgtaaatactaagccggagatcttgacttatgaccgattggtgaatgggatgttgcagtgcgtggctgccggattccctgagcctacgattgactggtatttctgtcctggcaccgagcagaggtgctccgctagcgtccttcctgttgacgtgcaaactctgaacagctccgggcctccattcggaaagctggtggtgcagtcttccattgacagctcagccttcaagcataatggcacggtggagtgcaaggcatataacgatgtgggaaagacaagcgcctacttcaatttcgcttttaaggaacaaatacaccctcacactcttttcaccccgttgctgataggtttcgtgatcgtggctggcatgatgtgtatcattgtcatgatccttacctataagtatcttcaaaagcccatgtacgaggttcaatggaaggtggtagaggagattaacggcaataactacgtgtacatcgaccccacacagctcccttatgaccacaaatgggagttccctcggaatcgtctctcgtttgggaaaacacttggggcaggtgccttcggtaaggttgtcgaggcaaccgcgtacgggctcatcaagtcggatgccgcaatgacagtggccgttaagatgctgaagccatctgctcacctgacagagagagaggctctgatgtccgagctaaaggtgctgtcctacctgggcaaccacatgaatattgttaacctgctcggggcttgtacaatcgggggtccgacactcgtcattactgagtattgttgctatggtgacctgctaaactttctgcggcgtaagcgcgactcctttatttgtagcaagcaagaggaccacgcggaggctgcactatacaaaaatctgcttcacagtaaggaaagttcatgctcggactccaccaatgagtacatggacatgaaaccaggcgtgagttatgtcgtgcccacaaaggctgacaaacgaagatctgttcgcatcggcagctatatcgaaagagacgttactccggctataatggaggacgatgaactcgccctggatctcgaagacctgctttccttcagctatcaggtggccaaaggaatggcattcctggcatcgaagaattgcatccatcgagatctcgccgcacggaacatactcctgacccatggccgtatcacaaagatatgtgacttcggcctcgcccgtgacatcaaaaacgactctaattacgttgttaaagggaacgctcgcctccctgttaagtggatggcccctgaatccatcttcaattgcgtctacacatttgagtctgatgtttggtcttatgggatattcctttgggagcttttctctcttggctcatcaccatatcctggcatgcccgtggacagcaagttctataaaatgatcaaggagggctttagaatgctgtctcccgaacacgcgcctgcagagatgtacgacatcatgaagacctgctgggatgctgacccattgaagaggcctacctttaagcagatcgtgcagctcattgaaaagcagattagcgaaagtaccaatcacatctattccaacctggctaactgctcccctaataggcagaagcccgttgtcgaccacagtgtgaggattaattctgtgggctccactgctagcagcagccagccacttctggtgcacgatgatgtgtag

SEQ ID NO: 38314 - DNA, 1242 bp, Artificial Sequence
  derived and/or modified sequence
atgcgcggagcaagaggggcttgggactttctgtgcgtgctccttttgcttctgagggtgcagaccggcagctcacagcccagtgtgagccccggagaacctagccctccatctattcaccctggcaagtccgatctgatcgtgcgcgtcggtgatgagatcaggctgctgtgtacagatccaggcttcgttaaatggacgtttgagattcttgacgaaactaacgagaacaaacagaatgaatggatcaccgaaaaggctgaggccactaatacaggaaagtacacttgcaccaacaagcacggcctgagcaatagcatttacgtatttgtacgggaccccgcaaagctcttcctggtggacagatctctctacgggaaagaggacaatgacaccctcgtgagatgcccactgactgatcctgaggtaacgaattactctttgaaagggtgccaggggaaacccctgcccaaggacttgcgcttcattcccgacccaaaagccggaatcatgatcaagagcgtcaaaagagcttatcaccggctgtgcctccactgttctgtggatcaggaggggaagtcggtgctgtcagagaaatttattctgaaggtgcggcctgctttcaaggcagtgccggtcgttagcgtttctaaagctagctaccttctgcgggaaggggaagagttcactgtcacatgcaccattaaggatgtctctagctcggtctacagcacctggaaacgggagaacagtcagactaagctccaagaaaaatacaactcatggcatcacggggacttcaattacgagcgtcaagctactctcacaatctcgagcgcccgagtgaacgattcaggcgtgttcatgtgctacgccaacaatacattcgggagcgccaacgtcacaactactctcgaagtagttgataaagggtttataaacatttttcccatgataaatactacggttttcgtgaatgacggggagaatgtcgacctgattgtcgaatatgaagcgtttccaaagccagaacatcaacagtggatctatatgaataggacttttactgacaagtgggaagactacccaaaaagcgagaacgagtctaatatcaggtacgtgtctgaactccatctcactcggttgaaaggtacggagggcggaacttatactttcctggtgtcaaacagtgacgttaacgctgcaattgccttcaatgtgtacgtcaatagcaaactctag

SEQ ID NO: 38315 - DNA, 3470 bp, Artificial Sequence
  derived and/or modified sequence
cgctcgcggctctgggggctcggctttgccgcgctcgctgcacttgggcgagagctggaacgtggaccagagctcggatcccatcgcagctaccgcgatgagaggcgctcgcggcgcctgggattttctctgcgttctgctcctactgcttcgcgtccagacaggctcttctcaaccatctgtgagtccaggggaaccgtctccaccatccatccatccaggaaaatcagacttaatagtccgcgtgggcgacgagattaggctgttatgcactgatccgggctttgtcaaatggacttttgagatcctggatgaaacgaatgagaataagcagaatgaatggatcacggaaaaggcagaagccaccaacaccggcaaatacacgtgcaccaacaaacacggcttaagcaattccatttatgtgtttgttagagatcctgccaagcttttccttgttgaccgctccttgtatgggaaagaagacaacgacacgctggtccgctgtcctctcacagacccagaagtgaccaattattccctcaaggggtgccaggggaagcctcttcccaaggacttgaggtttattcctgaccccaaggcgggcatcatgatcaaaagtgtgaaacgcgcctaccatcggctctgtctgcattgttctgtggaccaggagggcaagtcagtgctgtcggaaaaattcatcctgaaagtgaggccagccttcaaagctgtgcctgttgtgtctgtgtccaaagcaagctatcttcttagggaaggggaagaattcacagtgacgtgcacaataaaagatgtgtctagttctgtgtactcaacgtggaaaagagaaaacagtcagactaaactacaggagaaatataatagctggcatcacggtgacttcaattatgaacgtcaggcaacgttgactatcagttcagcgagagttaatgattctggagtgttcatgtgttatgccaataatacttttggatcagcaaatgtcacaacaaccttggaagtagtagataaaggattcattaatatcttccccatgataaacactacagtatttgtaaacgatggagaaaatgtagatttgattgttgaatatgaagcattccccaaacctgaacaccagcagtggatctatatgaacagaaccttcactgataaatgggaagattatcccaagtctgagaatgaaagtaatatcagatacgtaagtgaacttcatctaacgagattaaaaggcaccgaaggaggcacttacacattcctagtgtccaattctgacgtcaatgctgccatagcatttaatgtttatgtgaatacaaaaccagaaatcctgacttacgacaggctcgtgaatggcatgctccaatgtgtggcagcaggattcccagagcccacaatagattggtatttttgtccaggaactgagcagagatgctctgcttctgtactgccagtggatgtgcagacactaaactcatctgggccaccgtttggaaagctagtggttcagagttctatagattctagtgcattcaagcacaatggcacggttgaatgtaaggcttacaacgatgtgggcaagacttctgcctattttaactttgcatttaaagagcaaatccatccccacaccctgttcactcctttgctgattggtttcgtaatcgtagctggcatgatgtgcattattgtgatgattctgacctacaaatatttacagaaacccatgtatgaagtacagtggaaggttgttgaggagataaatggaaacaattatgtttacatagacccaacacaacttccttatgatcacaaatgggagtttcccagaaacaggctgagttttgggaaaaccctgggtgctggagctttcgggaaggttgttgaggcaactgcttatggcttaattaagtcagatgcggccatgactgtcgctgtaaagatgctcaagccgagtgcccatttgacagaacgggaagccctcatgtctgaactcaaagtcctgagttaccttggtaatcacatgaatattgtgaatctacttggagcctgcaccattggagggcccaccctggtcattacagaatattgttgctatggtgatcttttgaattttttgagaagaaaacgtgattcatttatttgttcaaagcaggaagatcatgcagaagctgcactttataagaatcttctgcattcaaaggagtcttcctgcagcgatagtactaatgagtacatggacatgaaacctggagtttcttatgttgtcccaaccaaggccgacaaaaggagatctgtgagaataggctcatacatagaaagagatgtgactcccgccatcatggaggatgacgagttggccctagacttagaagacttgctgagcttttcttaccaggtggcaaagggcatggctttcctcgcctccaagaattgtattcacagagacttggcagccagaaatatcctccttactcatggtcggatcacaaagatttgtgattttggtctagccagagacatcaagaatgattctaattatgtggttaaaggaaacgctcgactacctgtgaagtggatggcacctgaaagcattttcaactgtgtatacacgtttgaaagtgacgtctggtcctatgggatttttctttgggagctgttctctttaggaagcagcccctatcctggaatgccggtcgattctaagttctacaagatgatcaaggaaggcttccggatgctcagccctgaacacgcacctgctgaaatgtatgacataatgaagacttgctgggatgcagatcccctaaaaagaccaacattcaagcaaattgttcagctaattgagaagcagatttcagagagcaccaatcatatttactccaacttagcaaactgcagccccaaccgacagaagcccgtggtagaccattctgtgcggatcaattctgtcggcagcaccgcttcctcctcccagcctctgcttgtgcacgacgatgtctgagcagaatcagtgtttgggtcacccctccaggaatgatctcttcttttggcttccatgatggttattttcttttctttcaacttgcatccaactccaggatagtgggcaccccactgcaatcctgtctttctgagcacactttagtggccgatgatttttgtcatcagccaccatcctattgcaaaggttccaactgtatatattcccaatagcaacgtagcttctaccatgaacagaaaacattctgatttggaaaaagagagggaggtatggactgggggccagagtcctttccaaggcttctccaattctgcccaaaaatatggttgatagtttacctgaataaatggtagtaatcacagttggccttcagaaccatccatagtagtatgatgatacaagattagaagctgaaaacctaagtcctttatgtggaaaacagaacatcattaga

SEQ ID NO: 38316 - DNA, 1326 bp, Artificial Sequence
  derived and/or modified sequence
tctgggggctcggctttgccgcgctcgctgcacttgggcgagagctggaacgtggaccagagctcggatcccatcgcagctaccgcgatgagaggcgctcgcggcgcctgggattttctctgcgttctgctcctactgcttcgcgtccagacaggctcttctcaaccatctgtgagtccaggggaaccgtctccaccatccatccatccaggaaaatcagacttaatagtccgcgtgggcgacgagattaggctgttatgcactgatccgggctttgtcaaatggacttttgagatcctggatgaaacgaatgagaataagcagaatgaatggatcacggaaaaggcagaagccaccaacaccggcaaatacacgtgcaccaacaaacacggcttaagcaattccatttatgtgtttgttagagatcctgccaagcttttccttgttgaccgctccttgtatgggaaagaagacaacgacacgctggtccgctgtcctctcacagacccagaagtgaccaattattccctcaaggggtgccaggggaagcctcttcccaaggacttgaggtttattcctgaccccaaggcgggcatcatgatcaaaagtgtgaaacgcgcctaccatcggctctgtctgcattgttctgtggaccaggagggcaagtcagtgctgtcggaaaaattcatcctgaaagtgaggccagccttcaaagctgtgcctgttgtgtctgtgtccaaagcaagctatcttcttagggaaggggaagaattcacagtgacgtgcacaataaaagatgtgtctagttctgtgtactcaacgtggaaaagagaaaacagtcagactaaactacaggagaaatataatagctggcatcacggtgacttcaattatgaacgtcaggcaacgttgactatcagttcagcgagagttaatgattctggagtgttcatgtgttatgccaataatacttttggatcagcaaatgtcacaacaaccttggaagtagtagataaaggattcattaatatcttccccatgataaacactacagtatttgtaaacgatggagaaaatgtagatttgattgttgaatatgaagcattccccaaacctgaacaccagcagtggatctatatgaacagaaccttcactgataaatgggaagattatcccaagtctgagaatgaaagtaatatcagatacgtaagtgaacttcatctaacgagattaaaaggcaccgaaggaggcacttacacattcctagtgtccaattctgacgtcaatgctgccatagcatttaatgtttatgtgaatagtaagttg

SEQ ID NO: 38317 - protein, 421 aa, Artificial Sequence
  derived and/or modified sequence
MVEMLPTAILLVLAVSVVAKDNATCDGPCGLRFRQNPQGGVRIVGGKAAQHGAWPWMVSLQIFTYNSHRYHTCGGSLLNSRWVLTAAHCFVGKNNVHDWRLVFGAKEITYGNNKPVKAPLQERYVEKIIIHEKYNSATEGNDIALVEITPPISCGRFIGPGCLPHFKAGLPRGSQSCWVAGWGYIEEKAPRPSSILMEARVDLIDLDLCNSTQWYNGRVQPTNVCAGYPVGKIDTCQGDSGGPLMCKDSKESAYVVVGITSWGVGCARAKRPGIYTATWPYLNWIASKIGSNALRMIQSATPPPPTTRPPPIRPPFSHPISAHLPWYFQPPPRPLPPRPPAAQPRPPPSPPPPPPPPASPLPPPPPPPPPTPSSTTKLPQGLSFAKRLQQLIEVLKGKTYSDGKNHYDMETTELPELTSTS

SEQ ID NO: 38318 - DNA, 1266 bp, Artificial Sequence
  derived and/or modified sequence
atggtggagatgctgcccaccgccatcctgctggtgctggccgtgagcgtggtggccaaggacaacgccacctgcgacggcccctgcggcctgagattcagacagaacccccagggcggcgtgagaatcgtgggcggcaaggccgcccagcacggcgcctggccctggatggtgagcctgcagatcttcacctacaacagccacagataccacacctgcggcggcagcctgctgaacagcagatgggtgctgaccgccgcccactgcttcgtgggcaagaacaacgtgcacgactggagactggtgttcggcgccaaggagatcacctacggcaacaacaagcccgtgaaggcccccctgcaggagagatacgtggagaagatcatcatccacgagaagtacaacagcgccaccgagggcaacgacatcgccctggtggagatcaccccccccatcagctgcggcagattcatcggccccggctgcctgccccacttcaaggccggcctgcccagaggcagccagagctgctgggtggccggctggggctacatcgaggagaaggcccccagacccagcagcatcctgatggaggccagagtggacctgatcgacctggacctgtgcaacagcacccagtggtacaacggcagagtgcagcccaccaacgtgtgcgccggctaccccgtgggcaagatcgacacctgccagggcgacagcggcggccccctgatgtgcaaggacagcaaggagagcgcctacgtggtggtgggcatcaccagctggggcgtgggctgcgccagagccaagagacccggcatctacaccgccacctggccctacctgaactggatcgccagcaagatcggcagcaacgccctgagaatgatccagagcgccaccccccccccccccaccaccagacccccccccatcagaccccccttcagccaccccatcagcgcccacctgccctggtacttccagcccccccccagacccctgccccccagaccccccgccgcccagcccagacccccccccagcccccccccccccccccccccccccgccagccccctgcccccccccccccccccccccccccccacccccagcagcaccaccaagctgccccagggcctgagcttcgccaagagactgcagcagctgatcgaggtgctgaagggcaagacctacagcgacggcaagaaccactacgacatggagaccaccgagctgcccgagctgaccagcaccagctag

SEQ ID NO: 38319 - DNA, 1266 bp, Artificial Sequence
  derived and/or modified sequence
atggtggagatgctcccaaccgcaattctgctcgtgctagcagtatcagttgtggcgaaggataatgcaacgtgcgatgggccatgtggattaaggttcagacagaatccccaaggaggcgtccgcatcgtgggcggcaaggccgcccagcatggagcctggccctggatggtgtcccttcagattttcacctacaatagtcatcgataccacacatgcggcggttctctactaaattcccgatgggtactcacagcagcacactgcttcgttggcaaaaacaacgtacatgactggcgcttggtgttcggcgcgaaggagatcacttacgggaataacaaacccgttaaagcccccctccaggaacggtatgtagaaaagattatcatccatgagaagtacaatagcgctaccgaaggaaacgacattgctctagtcgaaatcacacccccaatctcttgtggtcgatttatagggcctggatgtttaccccattttaaagctgggcttccccggggttctcagagctgctgggtcgcaggttggggctatattgaggaaaaagctccacgcccttcctctatcctcatggaggctcgggtggacctcatcgatttagacctttgcaactcgacccagtggtataacgggcgtgtgcaacccactaatgtctgcgccggatatcccgttggcaaaatagacacttgtcaaggcgactccggcggaccgctaatgtgtaaagacagcaaggaaagcgcctacgtcgttgtcggcattacgtcttggggagtaggttgtgctcgcgcaaaacgacccggcatttacacagcaacctggccgtatctcaattggatagccagcaaaataggctccaatgccctccgcatgattcagtccgccacaccccctcctccaaccacccggcctccccccatccggccgccgttttctcaccctattagtgctcatctgccatggtattttcagcccccaccgcgccccctgcccccgcgcccgccagccgcccagcccagacctccacccagcccaccgccccccccgccaccacctgctagcccattgcctcccccaccccctccaccccccccaacaccaagctccacaacaaagctgccacagggactctcttttgctaaacgtcttcagcagttgattgaggtcctgaaagggaagacatatagtgatgggaagaaccattacgacatggagactaccgagttgcccgaactgacaagcacatcatag

SEQ ID NO: 38320 - DNA, 1266 bp, Artificial Sequence
  derived and/or modified sequence
atggtggagatgctgcccacagccatcctgctggtgctggccgtgtctgtggtggccaaggacaatgccacctgtgatggcccctgtggcctgcgcttccggcagaacccccagggcggcgtgagaattgtgggcggcaaggccgcccagcacggggcctggccctggatggtgtccctgcagatcttcacctacaacagccaccgctaccacacctgtggcggcagcctgctgaacagccgctgggtgctgacagctgcccactgctttgtgggcaagaacaacgtgcatgactggaggctggtgtttggagccaaggagatcacctacggcaacaacaagcctgtgaaggcccccctgcaggagcgctacgtggagaagatcatcatccacgagaagtacaacagcgccacagagggcaatgacatcgccctggtggagatcaccccacccatcagctgtggccgcttcatcggccctggctgcctgccccacttcaaggccggcctgccccggggcagccagagctgctgggtggccggctggggctacatcgaggagaaggccccccggcccagcagcatcctgatggaggcccgggtggacctgattgacctggacctgtgcaacagcacccagtggtacaacggccgggtgcagcccaccaacgtgtgtgccggctaccctgtgggcaagattgacacctgccagggcgacagcggcggccccctgatgtgcaaggacagcaaggagagcgcctacgtggtggtgggcatcacctcctggggcgtgggctgtgcccgggccaagaggcctggcatctacacagccacctggccctacctgaactggatcgccagcaagattggcagcaatgccctgaggatgatccagagcgccaccccacctccacccaccacccggcccccacccatccggccccccttcagccaccccatcagcgcccacctgccctggtacttccagcccccaccccggcccctgccccccaggcctcctgctgcccagccccggcccccacccagccccccacctcctcctcctcctccagccagccccctgcccccacctcctcctcctcctccacccacccccagcagcaccaccaagctgccccagggcctgagctttgccaagaggctgcagcagctgattgaggtgctgaagggcaagacctacagtgatggcaagaaccactatgacatggagaccacagagctgcctgagctgaccagcaccagctag

SEQ ID NO: 38321 - DNA, 1266 bp, Artificial Sequence
  derived and/or modified sequence
atggtggagatgctgcccaccgccatcctgctggtgctggccgtgtcagtggtggctaaagataacgccacgtgtgatggcccatgcggcttgcgattcagacagaatccacaaggcggtgtacggattgtgggtggaaaagcggctcagcacggggcctggccatggatggtctcgctccaaattttcacctacaatagtcacagataccacacttgtggtggctccctcctgaatagcaggtgggttctcacagcggcgcattgttttgtaggtaaaaacaatgtccacgattggaggctggtgttcggagccaaggaaattacttatggaaataataagcctgttaaggcgcctctccaggaacgatacgtggagaagataatcatacatgaaaaatataatagcgcgaccgaggggaatgacatcgccctggtggagatcacgcctccaatcagctgtggtcgattcatcgggcccggctgcctgcctcatttcaaagcgggactcccacgtgggagccagtcctgttgggtagcgggatgggggtacattgaggagaaggccccccgacccagctctattcttatggaggcaagagtggacttgattgacctggatctgtgcaattcgactcaatggtataatggacgggtgcagcccacaaatgtgtgtgcagggtatcctgttggtaaaatcgatacgtgtcagggagacagcgggggcccactgatgtgcaaagactccaaagagagtgcttatgtcgtggtgggaatcacatcttggggggtgggttgcgccagagccaaacggcccggcatctacacggccacttggccgtatcttaattggatcgcttccaagatcggctctaacgctctgcggatgattcagtccgctacacctccgccacccacgacccgaccgcctccaattaggccaccgttctcccatccaatctctgcacacctgccatggtattttcagcccccaccaaggccattgcctcctaggccacccgcggcccagccaagacctccaccttctccgccaccgccacctcccccacccgcgtctccactgcccccccccccccctccacctcctcccacacctagctccacaaccaagctcccccaaggactcagtttcgccaagcgactgcagcagctgatcgaagtcctgaagggaaagacctactccgatggcaagaaccactacgacatggaaacaacagaactacccgagctcactagtacaagctag

SEQ ID NO: 38322 - DNA, 1266 bp, Artificial Sequence
  derived and/or modified sequence
atggtggagatgctgcccactgcaattctcctggtgttggcagtgtccgtggtcgctaaagataacgctacctgcgatggaccctgcgggcttcgctttcgtcagaacccacagggcggagtacggattgtcggcggtaaggccgcacagcatggggcttggccctggatggtgagtctgcagatttttacatacaatagccaccgctatcatacatgtggtggctccctgcttaattctcgctgggtgctgacagccgcacattgttttgtaggaaaaaataatgtgcatgattggcgtctagttttcggcgcaaaagagatcacttacggaaataacaagccggtcaaagccccactgcaggagaggtacgttgagaagataattattcacgaaaagtacaactctgccactgaaggtaatgatatagcactggtggagataacccctccaatcagttgtggtaggtttatcggcccaggttgcctgcctcacttcaaagccggtctccccaggggaagccagtcctgctgggtggcagggtgggggtacatcgaggaaaaagcacccaggccgagcagcattctgatggaggccagagttgacctgattgacctagatctgtgcaattccacacagtggtataatggacgcgtgcaacccacaaatgtctgtgccggatatcccgtcggcaagatcgacacgtgccagggggattctggtggcccactcatgtgtaaagacagtaaagagagcgcatacgtcgtcgtcggaataacatcttggggggtgggatgcgcccgtgctaaacgacctggcatttatacagcgacctggccctacttgaattggattgcctccaagataggatccaacgccctacgcatgattcagtctgcaacaccaccacctcccacgactcgccctccacctatccgaccgcctttcagccacccaatcagtgcacatctgccctggtattttcagccgccaccaagacccctaccgccacggcctcctgcggctcaacctagacccccaccctcccccccaccgcctcctccccctcccgcttctccgttaccacctcctccaccccctcctccccctaccccctcatccactacaaaactgccacaaggactgagctttgccaagcgtctccagcagctgattgaggtgctgaaaggtaagacgtacagtgatggtaagaaccactacgacatggagactacagaattaccagagctcacaagcacaagctag

SEQ ID NO: 38323 - DNA, 1433 bp, Artificial Sequence
  derived and/or modified sequence
gtgaggtcactaggcttgcaggccaggcagtgccaggagtatggttgagatgctaccaactgccattctgctggtcttggcagtgtccgtggttgctaaagataacgccacgtgtgatggcccctgtgggttacggttcaggcaaaacccacagggtggtgtccgcatcgtcggcgggaaggctgcacagcatggggcctggccctggatggtcagcctccagatcttcacgtacaacagccacaggtaccacacatgtggaggcagcttgctgaattcacgatgggtgctcactgctgctcactgcttcgtcggcaaaaataatgtgcatgactggagactggttttcggagcaaaggaaattacatatgggaacaataaaccagtaaaggcgcctctgcaagagagatatgtggagaaaatcatcattcatgaaaaatacaactctgcgacagagggaaatgacattgccctcgtggagatcacccctcccatttcgtgtgggcgcttcattgggccgggctgcctgccccactttaaggcaggcctccccagaggctcccagagctgctgggtggccggctggggatatatagaagagaaagcccccaggccatcatctatactgatggaggcacgtgtggatctcatcgacctggacttgtgtaactcgacccagtggtacaatgggcgcgttcagccaaccaatgtgtgcgcggggtatcctgtaggcaagatcgacacctgccagggagacagcggcgggcctctcatgtgcaaagacagcaaggaaagcgcctatgtggtcgtgggaatcacaagctggggggtaggctgtgcccgtgccaagcgccccggaatctacacggccacctggccctatctgaactggatcgcctccaagattggttctaacgctttgcgtatgattcaatcggccacccctccacctcccaccactcgaccgcccccgattcgaccccccttctcccaccctatctctgctcaccttccttggtatttccaaccgccccctcgaccacttccaccccgaccaccggcagcccagccccgacccccaccttcacccccgcccccacccccacctccagcctcacctttacccccacccccacccccacccccacctacaccctcatctaccacaaaacttccccaaggactttcttttgccaagcgcctacagcagctcatagaggtcttgaaggggaagacctattccgacggaaagaaccattatgacatggagaccacagagctcccagaactgacctcgacctcctgatctgacctggttctcaacagacccagtgagcccttcactcctgagaaaaaggaaagatgaaataaataaataaacatatatatatagatatacacacacacatatctgtatgtatacatgcatatac

SEQ ID NO: 38324 - protein, 780 aa, Artificial Sequence
  derived and/or modified sequence
MAPYSLLVTRLQKALGVRQYHVASVLCQRAKVAMSHFEPNEYIHYDLLEKNINIVRKRLNRPLTLSEKIVYGHLDDPASQEIERGKSYLRLRPDRVAMQDATAQMAMLQFISSGLSKVAVPSTIHCDHLIEAQVGGEKDLRRAKDINQEVYNFLATAGAKYGVGFWKPGSGIIHQIILENYAYPGVLLIGTDSHTPNGGGLGGICIGVGGADAVDVMAGIPWELKCPKVIGVKLTGSLSGWSSPKDVILKVAGILTVKGGTGAIVEYHGPGVDSISCTGMATICNMGAEIGATTSVFPYNHRMKKYLSKTGREDIANLADEFKDHLVPDPGCHYDQLIEINLSELKPHINGPFTPDLAHPVAEVGKVAEKEGWPLDIRVGLIGSCTNSSYEDMGRSAAVAKQALAHGLKCKSQFTITPGSEQIRATIERDGYAQILRDLGGIVLANACGPCIGQWDRKDIKKGEKNTIVTSYNRNFTGRNDANPETHAFVTSPEIVTALAIAGTLKFNPETDYLTGTDGKKFRLEAPDADELPKGEFDPGQDTYQHPPKDSSGQHVDVSPTSQRLQLLEPFDKWDGKDLEDLQILIKVKGKCTTDHISAAGPWLKFRGHLDNISNNLLIGAINIENGKANSVRNAVTQEFGPVPDTARYYKKHGIRWVVIGDENYGEGSSREHAALEPRHLGGRAIITKSFARIHETNLKKQGLLPLTFADPADYNKIHPVDKLTIQGLKDFTPGKPLKCIIKHPNGTQETILLNHTFNETQIEWFRAGSALNRMKELQQ

SEQ ID NO: 38325 - protein, 805 aa, Artificial Sequence
  derived and/or modified sequence
MAPYSLLVTRLQKALGVRQYHVASVLCQRAKVAMSHFEPNEYIHYDLLEKNINIVRKRLNRPLTLSEKIVYGHLDDPASQEIERGKSYLRLRPDRVAMQDATAQMAMLQFISSGLSKVAVPSTIHCDHLIEAQVGGEKDLRRAKDINQEVYNFLATAGAKYGVGFWKPGSGIIHQIILENYAYPGVLLIGTDSHTPNGGGLGGICIGVGGADAVDVMAGIPWELKCPKVIGVKLTGSLSGWSSPKDVILKVAGILTVKGGTGAIVEYHGPGVDSISCTGEEGGQATWPLPCAGPDGSPVGSRSGMATICNMGAEIGATTSVFPYNHRMKKYLSKTGREDIANLADEFKDHLVPDPGCHYDQLIEINLSELKPHINGPFTPDLAHPVAEVGKVAEKEGWPLDIRVGLIGSCTNSSYEDMGRSAAVAKQALAHGLKCKSQFTITPGSEQIRATIERDGYAQILRDLGGIVLANACGPCIGQWDRKDIKKGEKNTIVTSYNRNFTGRNDANPETHAFVTSPEIVTALAIAGTLKFNPETDYLTGTDGKKFRLEAPDADELPKGEFDPGQDTYQHPPKDSSGQHVDVSPTSQRLQLLEPFDKWDGKDLEDLQILIKVKGKCTTDHISAAGPWLKFRGHLDNISNNLLIGAINIENGKANSVRNAVTQEFGPVPDTARYYKKHGIRWVVIGDENYGEGSSREHAALEPRHLGGRAIITKSFARIHETNLKKQGLLPLTFADPADYNKIHPVDKLTIQGLKDFTPGKPLKCIIKHPNGTQETILLNHTFNETQIEWFRAGSALNRMKELQQ

SEQ ID NO: 38326 - protein, 501 aa, Artificial Sequence
  derived and/or modified sequence
MATICNMGAEIGATTSVFPYNHRMKKYLSKTGREDIANLADEFKDHLVPDPGCHYDQLIEINLSELKPHINGPFTPDLAHPVAEVGKVAEKEGWPLDIRVGLIGSCTNSSYEDMGRSAAVAKQALAHGLKCKSQFTITPGSEQIRATIERDGYAQILRDLGGIVLANACGPCIGQWDRKDIKKGEKNTIVTSYNRNFTGRNDANPETHAFVTSPEIVTALAIAGTLKFNPETDYLTGTDGKKFRLEAPDADELPKGEFDPGQDTYQHPPKDSSGQHVDVSPTSQRLQLLEPFDKWDGKDLEDLQILIKVKGKCTTDHISAAGPWLKFRGHLDNISNNLLIGAINIENGKANSVRNAVTQEFGPVPDTARYYKKHGIRWVVIGDENYGEGSSREHAALEPRHLGGRAIITKSFARIHETNLKKQGLLPLTFADPADYNKIHPVDKLTIQGLKDFTPGKPLKCIIKHPNGTQETILLNHTFNETQIEWFRAGSALNRMKELQQ

SEQ ID NO: 38327 - protein, 761 aa, Artificial Sequence
  derived and/or modified sequence
MAPYSLLVTRLQKALGVRQYHVASVLCQRAKVAMSHFEPNEYIHYDLLEKNINIVRKRLNRPLTLSEKIVYGHLDDPASQEIERGKSYLRLRPDRVAMVAVPSTIHCDHLIEAQVGGEKDLRRAKDINQEVYNFLATAGAKYGVGFWKPGSGIIHQIILENYAYPGVLLIGTDSHTPNGGGLGGICIGVGGADAVDVMAGIPWELKCPKVIGVKLTGSLSGWSSPKDVILKVAGILTVKGGTGAIVEYHGPGVDSISCTGMATICNMGAEIGATTSVFPYNHRMKKYLSKTGREDIANLADEFKDHLVPDPGCHYDQLIEINLSELKPHINGPFTPDLAHPVAEVGKVAEKEGWPLDIRVGLIGSCTNSSYEDMGRSAAVAKQALAHGLKCKSQFTITPGSEQIRATIERDGYAQILRDLGGIVLANACGPCIGQWDRKDIKKGEKNTIVTSYNRNFTGRNDANPETHAFVTSPEIVTALAIAGTLKFNPETDYLTGTDGKKFRLEAPDADELPKGEFDPGQDTYQHPPKDSSGQHVDVSPTSQRLQLLEPFDKWDGKDLEDLQILIKVKGKCTTDHISAAGPWLKFRGHLDNISNNLLIGAINIENGKANSVRNAVTQEFGPVPDTARYYKKHGIRWVVIGDENYGEGSSREHAALEPRHLGGRAIITKSFARIHETNLKKQGLLPLTFADPADYNKIHPVDKLTIQGLKDFTPGKPLKCIIKHPNGTQETILLNHTFNETQIEWFRAGSALNRMKELQQ

SEQ ID NO: 38328 - DNA, 2418 bp, Artificial Sequence
  derived and/or modified sequence
atggctccttatagtctgctggtgacacgtctgcagaaggctctgggggtccgacagtatcatgtggcctctgtcttgtgtcagagagcaaaagtcgcaatgagccactttgagcctaacgagtacatacattacgacctcctcgagaagaatattaacatcgtgcgaaaacgattaaaccggcccttgacactaagtgaaaagatcgtgtacggccatcttgatgacccggccagtcaggaaatcgagaggggcaaaagttacctgcggctgcgcccagaccgcgtcgcaatgcaggacgcaactgcccaaatggcgatgttacagtttatttcgagtggtttaagtaaagtggctgtcccaagcacaatccactgtgatcatctgatcgaggctcaggtaggaggcgagaaggatctaagacgggccaaggacattaatcaagaggtttacaattttctggctaccgctggggcgaagtatggcgtcggtttctggaagccaggaagtgggatcattcaccaaattattctggaaaactatgcataccccggggtccttttgatagggacagattctcatacccctaatggcggcggtttaggaggcatctgcatcggtgtcggcggcgccgatgcggtggacgtgatggcggggattccttgggaactgaagtgcccaaaagtaataggggtgaagttgaccggttcactgtctggctggtcctcaccaaaggatgtcatccttaaggtagcaggaattcttaccgtaaagggggggaccggggctatcgtggagtatcacggcccaggggtcgacagcatatcatgcaccggggaagaggggggacaggctacgtggccattaccctgcgccggtcccgatgggtcccctgtcggcagtagatcggggatggcaaccatctgtaacatgggagctgaaattggagctaccacttccgtgttcccttacaaccaccgcatgaagaaatatctgagtaaaacggggcgagaggacatcgctaacttggctgatgagttcaaggaccatctggtgcccgacccaggatgtcattacgaccaactaattgaaatcaatctgagcgaactgaagcctcatatcaacggtcctttcacacccgatcttgcacaccccgttgctgaagtcgggaaagtcgccgagaaggaagggtggccattggatatccgggttggactgatcggttcttgcacaaactcgagttacgaagacatgggccggagcgctgctgtggccaaacaggcactggcacacggcctcaagtgtaagagccagttcactatcactcccggcagtgaacaaatcagagccaccatagagagagatgggtatgctcaaattctccgcgatctgggcggtatcgttctggcgaacgcatgcggcccatgtattggccagtgggatcggaaagatattaagaaaggggaaaagaacactattgttacttcttacaatcgcaacttcaccgggaggaatgacgccaatccggagacacacgcttttgtcacaagtcccgaaatagtgactgctctggccatcgccggcacactgaagttcaaccccgaaactgactaccttacaggtaccgacggaaagaaatttcgactggaagctccggacgctgatgagctgcctaaaggcgaatttgatccaggacaggatacctaccagcaccctcctaaagactcgtcgggccagcatgttgacgttagccctacctcacagcgactgcaactcctggaaccttttgacaagtgggacggcaaggatttagaggacctacaaattcttataaaggttaaaggtaaatgtacaactgatcatattagcgccgccggcccatggttgaagtttcgcggacatctcgacaacattagtaataaccttctgatcggagcaataaatatcgaaaacggcaaagccaatagcgttagaaacgccgtcactcaggaatttggccccgtgcccgatacagcccggtattacaagaaacacggaatacgctgggtggtcataggcgatgagaattatggtgagggcagcagcagggagcacgctgctctggaaccccgccacttaggagggagagcaatcattacaaaaagcttcgccagaattcatgagactaacctgaagaagcagggcctgcttccactgaccttcgcagatccagcagattataacaagatccatccagtggataagctgaccattcagggtctgaaagacttcactcctgggaaacctttaaagtgcattattaagcacccaaacggcacgcaagaaacaatcctgcttaaccacacctttaacgagacccagattgaatggttccgcgcaggatccgcgctgaatcggatgaaggagttacagcaatag

SEQ ID NO: 38329 - DNA, 1506 bp, Artificial Sequence
  derived and/or modified sequence
atggccactatttgtaacatgggggcagaaatcggtgcaactacatctgtttttccatataatcataggatgaaaaaatatctgtcaaagacaggccgtgaagatatcgccaacctggcagatgagtttaaggaccatctggtacctgaccccggctgccactacgatcagttaattgaaataaatctgtctgagttaaagccccacattaatgggcctttcacccccgacctggcccacccagtcgcggaggtaggaaaggtggccgagaaggaaggttggcctcttgacattagggtgggcctgatcggaagttgtactaatagctcatacgaagacatgggtcgcagcgcggcagtggccaaacaggctctggctcacggactgaagtgcaagtcccagtttacaatcacccctggcagcgaacagatcagagccactatcgaaagggatggatatgcacagattctgcgggatctggggggaatagtcctggctaatgcctgcggcccgtgcatcggtcagtgggaccggaaggacatcaagaagggcgagaagaatacaattgtcacttcttacaatcggaattttacgggccggaacgatgctaatcctgagacccacgctttcgttacaagccccgaaatagtcactgccttggccatagcgggaaccctcaaattcaacccagaaacagactatctgacgggtacagacgggaagaaattccgcctggaggcacccgacgctgatgagctgccaaaaggggagttcgaccccggacaagatacttaccaacacccccccaaggacagcagtggacaacatgtcgacgtgtcaccaacgtcccagcggcttcagttgctggagccttttgacaaatgggacggaaaggacctggaggatctgcagattctgatcaaagtgaaagggaagtgcaccaccgatcacatctccgctgccggaccatggttgaagttccggggtcacctcgacaacatttcgaacaacctgctgatcggggcaatcaatattgagaacggcaaggccaattcagtgaggaacgcagttacccaggaattcggccccgtcccagataccgctcgatactataaaaagcacgggatcagatgggtcgtgataggtgatgagaactacggggaggggtcgtcaagagaacacgctgccctggaaccacgacacttagggggccgggctatcatcactaagtcctttgctcgcatccacgagactaaccttaaaaaacaaggtttacttcctctgacgttcgctgatcccgcagactacaacaagatccacccagtcgataagctgacaattcagggtctgaaggattttaccccgggcaaacctctgaagtgtattatcaagcacccaaacggcacccaggagaccattcttctgaaccacaccttcaacgagacacagattgagtggtttcgagctggctccgcccttaaccgcatgaaggagctgcagcagtag

SEQ ID NO: 38330 - DNA, 2286 bp, Artificial Sequence
  derived and/or modified sequence
atggcaccgtattccctgctggtgaccagattgcagaaggctctcggcgtgcggcagtatcacgtcgcttccgtcctctgtcagagggccaaagtggctatgtcccacttcgagcccaatgaatatatccactacgacctgctggagaagaatatcaacattgttaggaaacgcctcaaccggcctttgacactctctgagaagattgtttatggccacctggacgacccagcatcacaggaaattgagcgtgggaaaagctatcttagattaaggccagaccgggtggcgatggtcgccgtgccctccacaattcattgtgatcatcttatcgaggcccaggtgggcggggagaaggatttaagacgcgcaaaagatataaatcaggaagtgtataacttcctggccacagccggcgccaaatatggcgtaggcttttggaaaccaggaagcggaatcatacaccagatcatattagagaactatgcctatccaggggtcttactgatcggcaccgattcacacacgcctaacgggggtggactcggggggatatgcatcggcgtgggcggtgcagatgccgtcgacgtaatggccggaatcccgtgggagctcaaatgccccaaggtgattggcgtgaagctgaccggctctctatctggatggtcctccccaaaggacgttatactgaaagtggccggaatcctcaccgtcaagggcggcacgggcgcaatagtggaatatcatggcccaggcgttgattcaatttcctgtacaggcatggctacaatttgtaatatgggcgcggagattggagccacaaccagcgtgttcccatacaaccacagaatgaagaagtacctgagtaagaccggtcgcgaggatatcgccaatctggccgacgagtttaaggaccatctggtgccggatccaggctgccactacgaccagctcattgagatcaatctgagcgaactgaagcctcacatcaacggcccatttacaccagacctggcacaccccgtggcagaggtgggcaaagtcgcagagaaggagggctggccattggacatccgcgtgggcctcataggctcatgtactaatagcagctacgaggacatgggacgcagtgctgctgtggcaaaacaagccctcgcccatggtctgaaatgtaaaagccagtttacgatcacacccgggtcagaacagattagagccactatagaacgcgacggctatgcccaaattctcagggatttaggggggatcgttcttgccaatgcctgtggtccctgcataggtcagtgggaccgcaaggacattaagaaaggcgagaagaacacgattgtgacctcatacaaccgaaactttacaggtcgcaacgacgctaaccccgagactcacgcatttgtgacctctccagaaattgtgacagccctggctatagctggtacactgaaatttaatcctgagactgactatttgacaggcacagacggcaagaagttccgtcttgaggctccagatgccgacgagctgcctaagggcgagtttgatcccggtcaggacacttaccagcaccctcctaaggactcttctggccagcatgtcgatgtgtcacctacttcccagcgtctccaacttcttgaacccttcgacaaatgggacggtaaggacctggaagatctgcagattcttatcaaggtgaagggtaagtgtacaactgatcatattagcgctgccggcccctggcttaaattccggggccacctcgataatatctccaataatctgcttatcggcgccatcaacatcgagaacggtaaagccaatagcgttagaaatgcggtaacgcaagaatttggcccagtcccagacactgcccggtattataaaaaacatgggattcgctgggtggtcatcggcgacgagaattacggagaaggctcctcacgggagcacgcagctctcgagccacgccatctcggtggccgagccattatcaccaagtctttcgctaggatacacgaaacgaacctgaagaagcagggacttctccctctgaccttcgcagacccggccgattacaacaaaattcatcccgtcgataagctcacaattcaagggctgaaagacttcacgcctggtaagccattgaaatgtatcatcaagcatccgaacgggacccaagagacaatactgttgaaccacacatttaatgagactcagatagagtggtttagagctgggagcgccctgaatcgcatgaaagagctgcagcagtag

SEQ ID NO: 38331 - DNA, 2343 bp, Artificial Sequence
  derived and/or modified sequence
atggcaccttactcattgttggtaacacggctgcagaaagccctgggggtgcgccagtaccacgtggcgtccgtgctttgtcagagagccaaggttgcaatgagccacttcgagccaaatgagtacatccattacgacctactggagaagaacatcaatattgtcagaaagcgtctaaacaggcccttgacactgtccgaaaaaatcgtctacggccacctggacgaccctgcaagccaggagatcgaacggggcaagagttacctgaggttgcgtccagacagggtcgcaatgcaagatgctacagcccagatggctatgctccagtttattagttctggcctgagcaaggtcgccgtgccctccacgatacactgtgatcatttaatcgaagctcaggtggggggagaaaaggacctgcgacgggcaaaggatatcaaccaagaagtctacaacttcttggctacagctggcgcgaagtacggggtgggattctggaagccagggtcaggaatcattcaccagatcatattagaaaactacgcttatccaggcgtactgcttataggcaccgactctcacaccccaaacggcgggggtctgggagggatctgcataggcgtcgggggggccgacgccgtggatgtgatggcaggtattccgtgggaacttaagtgtcccaaagtgatcggcgtgaaactaaccgggagcttgtctggctggtcatcccccaaagacgtgatcctgaaagtggcggggattctgactgtcaaaggcggcacaggtgctattgttgagtatcacggtcctggtgtggatagtatcagctgtacgggtatggctaccatctgtaatatgggggcggaaattggtgctacaacttctgtgttcccctacaaccacagaatgaagaaatacctgtctaaaaccggaagggaagatatcgccaacttagctgacgagttcaaggatcatctggtgcctgaccctggatgccactacgaccagctcatcgaaataaacctctcagagctcaagccacacataaatggaccatttacacccgatttggcccatccagtggccgaggtcgggaaagtggcagagaaggaagggtggccattggacatccgagtgggactgataggctcttgcacgaactcaagctatgaagacatgggccggagcgctgccgttgccaagcaggcactggcccatggccttaagtgcaagagccagtttacaattactcctggtagcgagcaaattcgggccaccatcgaaagggacggctacgctcagattctgcgtgacctgggaggcatcgtgctcgccaacgcatgcgggccttgcatcggtcagtgggatcgcaaagacatcaaaaaaggcgagaaaaacaccattgttacatcctataaccgtaacttcaccggtcggaacgatgcaaatcctgagactcatgcattcgtaacgtcaccagagatcgtgaccgcactcgccatcgccgggactcttaaattcaacccggagacagattatctaactggaacggacggaaagaagttcaggctcgaagcacccgacgcagacgaactcccaaagggtgaattcgacccagggcaggatacataccagcacccccccaaagatagctctgggcaacacgttgacgtgtctccaacttcgcagcgcctgcagctcctagagccgtttgacaagtgggacggaaaggatctagaagacctgcagatcctaatcaaggtcaagggcaaatgtacaacagaccacatttctgccgctgggccctggctgaagtttagaggacatctcgacaacatatcgaacaacctccttattggagcaattaacatcgaaaatgggaaggccaacagcgtaaggaatgctgtcacccaggaatttggacccgtccctgatacggcccgatattataaaaaacacggtattagatgggttgttataggggatgagaattatggagaaggatcgtcaagggagcatgcggccttggagcctcggcaccttgggggtcgagcaatcataactaagtccttcgcccggatacacgagaccaacctgaaaaagcaagggctcctgcccctgactttcgctgatcctgccgactacaataaaattcaccccgtggataaactcacgatccagggactaaaggactttacgcctgggaagccactcaaatgcattattaaacatccaaacggtacgcaggagaccatcctgctcaaccacaccttcaatgaaacccaaattgaatggtttcgcgctgggtccgctttaaataggatgaaagagctccaacagtag

SEQ ID NO: 38332 - DNA, 2418 bp, Artificial Sequence
  derived and/or modified sequence
atggccccctacagcctgctggtgacccggctgcagaaggccctgggcgtgcggcagtaccacgtggcctctgtgctgtgccagagggccaaggtggccatgagccactttgagcccaatgagtacatccactatgacctgctggagaagaacatcaacatcgtgaggaagaggctgaaccggcccctgaccctgtctgagaagatcgtgtatggccacctggatgatcctgccagccaggagattgaaagaggcaagagctacctgcggctgcggccagacagagtggccatgcaggatgccacagcccagatggccatgctgcagttcatcagcagcggcctgagcaaggtggccgtgcccagcaccatccactgtgaccacctgattgaggcccaggtgggcggggagaaggacctgcggcgggccaaggacatcaaccaggaggtgtacaacttcctggccacagctggggccaagtatggagtgggcttctggaagccaggcagcggcatcatccaccagatcatcctggagaactatgcctacccaggagtgctgctgattggaacagacagccacaccccaaatggaggcggcctgggcggcatctgcatcggcgtgggcggcgcagatgctgtggatgtgatggccggcatcccctgggagctgaagtgccccaaggtgattggagtgaagctgaccggcagcctgagcggctggagcagccccaaggatgtgatcctgaaggtggccggcatcctgactgtgaagggcggcactggagccatcgtggagtaccacggccctggggtggacagcatcagctgcaccggggaggagggcggccaggccacctggcccctgccctgtgccggcccagatggcagccctgtgggcagccgcagcggcatggccaccatctgcaacatgggcgctgagattggagccaccaccagcgtcttcccctacaaccacaggatgaagaagtacctgagcaagacaggccgggaggacatcgccaacctggctgatgagttcaaggaccacctggtgcctgaccccggctgccactatgaccagctgattgagatcaacctgtctgagctgaagccccacatcaatggccccttcaccccagacctggcccaccctgtggccgaggtgggcaaggtggccgagaaggagggctggcccctggacatccgggtgggcctgattggcagctgcaccaacagcagctatgaggacatgggccgctctgctgctgtggccaagcaggccctggcccacggcctgaagtgcaagagccagttcaccatcaccccaggcagcgagcagatccgggccaccatcgagagagatggctacgcccagatcctgcgggacctgggcggcatcgtgctggccaatgcctgtggcccctgcatcggccagtgggacaggaaggacatcaagaagggggagaagaacaccatcgtgaccagctacaacagaaacttcaccggcagaaatgatgccaaccctgagacccacgcctttgtgaccagccctgagatcgtgacagccctggccatcgccggcaccctgaagttcaaccctgagacagactacctgaccggcacagatggcaagaagttccggctggaggccccagatgctgatgagctgcccaagggggagtttgaccccggccaggacacctaccagcacccccccaaggacagcagcggccagcacgtggatgtgagccccaccagccagaggctgcagctgctggagccctttgacaagtgggatggcaaggacctggaggacctgcagatcctgatcaaggtgaagggcaagtgcaccacagaccacatctctgctgctggcccctggctgaagttccggggccacctggacaacatcagcaacaacctgctgattggagccatcaacattgaaaatggcaaggccaacagcgtgagaaatgctgtgacccaggagtttggacctgtgcctgacacagcccgctactacaagaagcacggcatccgctgggtggtgattggagatgagaactacggggagggcagcagccgggagcacgccgccctggagcccaggcacctgggcggccgggccatcatcaccaagagctttgcccgcatccacgagaccaacctgaagaagcagggcctgctgcccctgacctttgctgaccctgctgactacaacaagatccaccctgtggacaagctgaccatccagggcctgaaggacttcaccccaggcaagcccctgaagtgcatcatcaagcaccccaacggcacccaggagaccatcctgctgaaccacaccttcaatgagacccagatcgagtggttccgggccggcagcgccctgaacaggatgaaggagctgcagcagtag

SEQ ID NO: 38333 - DNA, 1506 bp, Artificial Sequence
  derived and/or modified sequence
atggccaccatctgcaacatgggcgctgagattggagccaccaccagcgtcttcccctacaaccacaggatgaagaagtacctgagcaagacaggccgggaggacatcgccaacctggctgatgagttcaaggaccacctggtgcctgaccccggctgccactatgaccagctgattgagatcaacctgtctgagctgaagccccacatcaatggccccttcaccccagacctggcccaccctgtggccgaggtgggcaaggtggccgagaaggagggctggcccctggacatccgggtgggcctgattggcagctgcaccaacagcagctatgaggacatgggccgctctgctgctgtggccaagcaggccctggcccacggcctgaagtgcaagagccagttcaccatcaccccaggcagcgagcagatccgggccaccatcgagagagatggctacgcccagatcctgcgggacctgggcggcatcgtgctggccaatgcctgtggcccctgcatcggccagtgggacaggaaggacatcaagaagggggagaagaacaccatcgtgaccagctacaacagaaacttcaccggcagaaatgatgccaaccctgagacccacgcctttgtgaccagccctgagatcgtgacagccctggccatcgccggcaccctgaagttcaaccctgagacagactacctgaccggcacagatggcaagaagttccggctggaggccccagatgctgatgagctgcccaagggggagtttgaccccggccaggacacctaccagcacccccccaaggacagcagcggccagcacgtggatgtgagccccaccagccagaggctgcagctgctggagccctttgacaagtgggatggcaaggacctggaggacctgcagatcctgatcaaggtgaagggcaagtgcaccacagaccacatctctgctgctggcccctggctgaagttccggggccacctggacaacatcagcaacaacctgctgattggagccatcaacattgaaaatggcaaggccaacagcgtgagaaatgctgtgacccaggagtttggacctgtgcctgacacagcccgctactacaagaagcacggcatccgctgggtggtgattggagatgagaactacggggagggcagcagccgggagcacgccgccctggagcccaggcacctgggcggccgggccatcatcaccaagagctttgcccgcatccacgagaccaacctgaagaagcagggcctgctgcccctgacctttgctgaccctgctgactacaacaagatccaccctgtggacaagctgaccatccagggcctgaaggacttcaccccaggcaagcccctgaagtgcatcatcaagcaccccaacggcacccaggagaccatcctgctgaaccacaccttcaatgagacccagatcgagtggttccgggccggcagcgccctgaacaggatgaaggagctgcagcagtag

SEQ ID NO: 38334 - DNA, 2286 bp, Artificial Sequence
  derived and/or modified sequence
atggccccctacagcctgctggtgacccggctgcagaaggccctgggcgtgcggcagtaccacgtggcctctgtgctgtgccagagggccaaggtggccatgagccactttgagcccaatgagtacatccactatgacctgctggagaagaacatcaacatcgtgaggaagaggctgaaccggcccctgaccctgtctgagaagatcgtgtatggccacctggatgatcctgccagccaggagattgaaagaggcaagagctacctgcggctgcggccagacagagtggccatggtggccgtgcccagcaccatccactgtgaccacctgattgaggcccaggtgggcggggagaaggacctgcggcgggccaaggacatcaaccaggaggtgtacaacttcctggccacagctggggccaagtatggagtgggcttctggaagccaggcagcggcatcatccaccagatcatcctggagaactatgcctacccaggagtgctgctgattggaacagacagccacacccccaacggcggcggcctgggcggcatctgcattggagtgggcggcgcagatgctgtggatgtgatggccggcatcccctgggagctgaagtgccccaaggtgattggagtgaagctgaccggcagcctgagcggctggagcagccccaaggatgtgatcctgaaggtggccggcatcctgactgtgaagggcggcaccggggccatcgtggagtaccacggccctggggtggacagcatcagctgcaccggcatggccaccatctgcaacatgggcgctgagattggagccaccaccagcgtcttcccctacaaccacaggatgaagaagtacctgagcaagacaggccgggaggacatcgccaacctggctgatgagttcaaggaccacctggtgcctgaccccggctgccactatgaccagctgattgagatcaacctgtctgagctgaagccccacatcaatggccccttcaccccagacctggcccaccctgtggccgaggtgggcaaggtggccgagaaggagggctggcccctggacatccgggtgggcctgattggcagctgcaccaacagcagctatgaggacatgggccgctctgctgctgtggccaagcaggccctggcccacggcctgaagtgcaagagccagttcaccatcaccccaggcagcgagcagatccgggccaccatcgagagagatggctacgcccagatcctgcgggacctgggcggcatcgtgctggccaatgcctgtggcccctgcatcggccagtgggacaggaaggacatcaagaagggggagaagaacaccatcgtgaccagctacaacagaaacttcaccggcagaaatgatgccaaccctgagacccacgcctttgtgaccagccctgagatcgtgacagccctggccatcgccggcaccctgaagttcaaccctgagacagactacctgaccggcacagatggcaagaagttccggctggaggccccagatgctgatgagctgcccaagggggagtttgaccccggccaggacacctaccagcacccccccaaggacagcagcggccagcacgtggatgtgagccccaccagccagaggctgcagctgctggagccctttgacaagtgggatggcaaggacctggaggacctgcagatcctgatcaaggtgaagggcaagtgcaccacagaccacatctctgctgctggcccctggctgaagttccggggccacctggacaacatcagcaacaacctgctgattggagccatcaacattgaaaatggcaaggccaacagcgtgagaaatgctgtgacccaggagtttggacctgtgcctgacacagcccgctactacaagaagcacggcatccgctgggtggtgattggagatgagaactacggggagggcagcagccgggagcacgccgccctggagcccaggcacctgggcggccgggccatcatcaccaagagctttgcccgcatccacgagaccaacctgaagaagcagggcctgctgcccctgacctttgctgaccctgctgactacaacaagatccaccctgtggacaagctgaccatccagggcctgaaggacttcaccccaggcaagcccctgaagtgcatcatcaagcaccccaacggcacccaggagaccatcctgctgaaccacaccttcaatgagacccagatcgagtggttccgggccggcagcgccctgaacaggatgaaggagctgcagcagtag

SEQ ID NO: 38335 - DNA, 2343 bp, Artificial Sequence
  derived and/or modified sequence
atggccccctacagcctgctggtgacccggctgcagaaggccctgggcgtgcggcagtaccacgtggcctctgtgctgtgccagagggccaaggtggccatgagccactttgagcccaatgagtacatccactatgacctgctggagaagaacatcaacatcgtgaggaagaggctgaaccggcccctgaccctgtctgagaagatcgtgtatggccacctggatgatcctgccagccaggagattgaaagaggcaagagctacctgcggctgcggccagacagagtggccatgcaggatgccacagcccagatggccatgctgcagttcatcagcagcggcctgagcaaggtggccgtgcccagcaccatccactgtgaccacctgattgaggcccaggtgggcggggagaaggacctgcggcgggccaaggacatcaaccaggaggtgtacaacttcctggccacagctggggccaagtatggagtgggcttctggaagccaggcagcggcatcatccaccagatcatcctggagaactatgcctacccaggagtgctgctgattggaacagacagccacaccccaaatggaggcggcctgggcggcatctgcatcggcgtgggcggcgcagatgctgtggatgtgatggccggcatcccctgggagctgaagtgccccaaggtgattggagtgaagctgaccggcagcctgagcggctggagcagccccaaggatgtgatcctgaaggtggccggcatcctgactgtgaagggcggcactggagccatcgtggagtaccacggccctggggtggacagcatcagctgcaccggcatggccaccatctgcaacatgggcgctgagatcggggccaccacctctgtgttcccctacaaccacaggatgaagaagtacctgagcaagacaggaagagaagatattgccaacctggctgatgagttcaaggaccacctggtgcctgaccccggctgccactatgaccagctgattgagatcaacctgtctgagctgaagccccacatcaatggccccttcaccccagacctggcccaccctgtggccgaggtgggcaaggtggccgagaaggagggctggcccctggacatccgggtgggcctcatcggcagctgcaccaacagcagctatgaggacatgggccgctctgctgctgtggccaagcaggccctggcccacggcctgaagtgcaagagccagttcaccatcaccccaggcagcgagcagatccgggccaccatcgagagagatggctacgcccagatcctgcgggacctgggcggcatcgtgctggccaatgcctgtggcccctgcatcggccagtgggacaggaaggacatcaagaagggggagaagaacaccatcgtgaccagctacaacagaaacttcaccggcagaaatgatgccaaccctgagacccacgcctttgtgaccagccctgagatcgtgacagccctggccatcgccggcaccctgaagttcaaccctgagacagactacctgactggaacagatggcaagaagttccggctggaggccccagatgctgatgagctgcccaagggggagtttgatcctggccaggacacctaccagcacccccccaaggacagcagcggccagcacgtggatgtgagccccaccagccagaggctgcagctgctggagccctttgacaagtgggatggcaaggacctggaggacctgcagatcctgatcaaggtgaagggcaagtgcaccacagaccacatctctgctgctggcccctggctgaagttccggggccacctggacaacatcagcaacaacctgctgattggagccatcaacattgaaaatggcaaggccaacagcgtgagaaatgctgtgacccaggagtttggacctgtgcctgacacagcccgctactacaagaagcacggcatccgctgggtggtgattggagatgaaaattatggagagggcagcagccgggagcacgccgccctggagcccaggcacctgggcggccgggccatcatcaccaagagctttgcccgcatccacgagaccaacctgaagaagcagggcctgctgcccctgacctttgctgaccctgctgactacaacaagatccaccctgtggacaagctgaccatccagggcctgaaggacttcacccctgggaagcccctgaagtgcatcatcaagcaccccaacggcacccaggagaccatcctgctgaaccacaccttcaatgagacccagatcgagtggttccgggccggcagcgccctgaacaggatgaaggagctgcagcagtag

SEQ ID NO: 38336 - DNA, 2418 bp, Artificial Sequence
  derived and/or modified sequence
atggccccctacagcctgctggtgacccggctgcagaaggccctgggagtaaggcagtatcatgtcgccagcgtgttatgtcaaagggcaaaagtcgccatgtcccattttgaacctaacgagtatattcattacgatctgctggagaagaacatcaatattgtgaggaaaaggctcaaccggccgctgaccttgtctgagaaaatcgtgtatggtcacctggatgaccctgcctctcaagaaattgaaaggggtaagtcatacctgaggctgcgccccgacagggtcgcaatgcaagacgccaccgcacaaatggcaatgctgcagttcataagctcaggcttaagcaaagtggccgtgccatcaacaatccactgtgaccacctcattgaggctcaagtcggaggtgagaaggatttgcggagagccaaggatattaatcaagaggtgtataactttcttgctacagccggagcgaagtacggagtcggattttggaagccaggatccggaattatccaccagatcattctcgagaattacgcctacccaggcgtacttctaatcggcacggactcgcatactcctaacggaggcggcctcggagggatctgcatcggagtagggggggccgacgccgtggacgtgatggccggcatcccgtgggagctgaagtgtcctaaagtgattggcgtaaaactgactggcagcctctcaggttggtccagccctaaagacgtaatcctgaaggtcgccgggatcctaactgtgaaggggggaactggggccatcgtcgagtatcacggccccggcgtagattctattagctgcacaggtgaggagggagggcaggctacctggcctttgccctgcgccgggccggacgggagcccagtgggctcgaggtctgggatggccaccatctgtaacatgggcgctgagatcggggccaccacgtccgtcttcccctacaatcacaggatgaaaaaatacctgagtaagacgggacgtgaagacattgcaaatttggctgacgaatttaaagaccacctggtccccgaccctggctgccactatgatcagctcattgaaatcaatctctcggagctgaaaccacacatcaacgggccattcacccctgacctggcacaccccgtcgctgaggtcggaaaggttgctgagaaagagggctggccccttgacattagagtcggcttaattgggagctgcaccaatagcagttacgaagacatgggaaggagcgccgccgtcgctaaacaagctctggcccacggactcaagtgtaagtctcagttcacaattaccccgggatctgaacaaatccgcgccacaatagagcgggatggttatgcgcagattctgagggacttgggcgggattgtcctcgccaatgcctgtggcccttgtattggacaatgggaccggaaagacattaagaagggggagaaaaacaccatcgttacatcttacaaccggaacttcacagggaggaatgatgctaatcccgagacgcatgcctttgtgaccagcccggaaatcgttactgccctcgctatcgcagggactctgaaattcaacccggaaacggattacttgacaggtaccgacgggaagaagtttagactggaagcaccggatgccgatgagctgcctaagggtgagttcgacccagggcaggacacttaccagcaccctcccaaagattcatctggacagcacgtagatgtcagccccacctctcagcggctgcagctgctggagccattcgacaaatgggatgggaaggacctggaggaccttcagatactgatcaaagtcaagggaaaatgtactacagaccacatctccgctgccggaccctggcttaaatttcgcggtcatttggataacatcagcaacaacctcctgattggggccattaatatagaaaacgggaaagcgaactctgttcggaatgctgtaactcaggagtttggacctgtgccggataccgcacggtactataagaagcatgggattcggtgggtggtgataggcgatgagaactatggagagggttcgtcacgggagcatgcagctctcgagccacgacacctcggtggtcgcgccatcattaccaaaagttttgccagaatccatgagaccaatcttaaaaaacaggggttgctccctcttaccttcgccgacccggcagattataacaagatccacccagtggacaagctgaccattcaggggttaaaggactttactcctggcaaacccctgaaatgtattatcaagcaccccaacggaactcaggaaacaatattgctcaatcacacgttcaatgaaacacagattgagtggttccgcgcagggagtgctctcaacagaatgaaggaactccagcaatag

SEQ ID NO: 38337 - DNA, 1506 bp, Artificial Sequence
  derived and/or modified sequence
atggccaccatctgcaacatgggcgccgagatcggcgccaccacctcagtcttcccttataatcatagaatgaaaaaatatctgtctaaaacagggcgggaggacatcgccaacttagccgacgaattcaaggatcatctcgtccccgatcctgggtgccattacgaccagctgatcgaaatcaatcttagcgagctcaaaccgcatataaatggccctttcacccccgacttagcccatccagtggctgaggtggggaaggttgccgaaaaggaagggtggccactggacatccgggtaggcctgatcggttcgtgtactaacagcagttatgaagatatgggccggtcggccgcagtcgctaagcaagcccttgcacacggactgaagtgtaagtcccagtttactattacccccggcagcgagcagatccgtgccaccattgaacgcgacggctacgcacaaatactgagggacctggggggtatcgtgctggcaaacgcgtgcggtccttgcatcgggcagtgggacaggaaagacatcaaaaagggagaaaaaaatacaatagtgacatcctataaccggaacttcacgggtaggaatgacgcaaatccggagacgcatgctttcgtgacaagccccgaaattgtcacagcattagccatcgcggggacccttaaattcaaccctgaaaccgattatttaacgggaaccgatggcaagaaatttagactcgaggctcccgacgccgatgagttgccaaaaggcgagttcgatcccggacaagacacataccagcatcctcctaaggactctagcggccaacatgtggacgtcagcccaacttctcagcggctgcagctgctggaaccctttgacaagtgggatggcaaggatctggaagacttgcagatcttaatcaaagtaaagggcaaatgtacgacggaccacatctcggcagccggcccatggctgaagtttcgaggtcacctggacaacatcagcaacaacttactcattggagcaattaatattgagaacggcaaagctaactccgtgcgtaacgccgtaacccaggaatttggccctgtcccagataccgctcgttattataaaaaacacggcatccgctgggtggtgattggagacgaaaattacggagaaggctctagcagggagcacgccgctctggaaccgagacacctgggaggtagagctattatcacaaagtcctttgcccgcatccacgagaccaatttgaagaagcaggggctgcttccgctgacgttcgctgaccctgccgactataacaaaatacaccctgtagacaagttaaccattcagggcctaaaggattttacaccaggtaagcctctgaagtgcattataaaacatccgaacggtacccaggagactatcttgttgaatcatactttcaacgagacccaaatcgaatggtttcgtgccggcagcgcgctgaaccggatgaaggagctccagcagtag

SEQ ID NO: 38338 - DNA, 2286 bp, Artificial Sequence
  derived and/or modified sequence
atggccccctacagcctgctggtgacccggctgcagaaggccctgggcgtccgtcagtatcacgtggccagcgttctttgtcagagagccaaggttgctatgagccactttgagcctaatgagtacatccattatgatctattagaaaagaacatcaacattgttcgaaagagactgaatcggcccctgactctgagtgaaaagattgtctacggtcatctggatgaccctgccagccaggaaatagagcgaggcaaatcttatctgagactccgccccgacagagtggctatggtcgccgtcccaagtaccattcactgtgaccatcttattgaagcccaggtgggcggcgagaaggatctgaggcgcgcaaaggacataaatcaagaggtgtacaactttttggcaactgcaggggctaaatatggtgtggggttctggaaaccaggctctggcatcattcatcaaataattctcgaaaactatgcttatccaggtgtgctcttgattggtaccgactcgcacactccgaatgggggaggtttgggcggaatctgcatcggcgtggggggcgctgatgcagttgatgtgatggctgggataccttgggagctcaaatgccccaaggtgatcggagtgaagctgaccgggagcctctcaggttggagctcccctaaggatgtgatcctgaaagttgctggcattctcacagtgaaaggtgggactggcgcgattgtggagtaccacggcccaggtgttgacagcatttcatgtactggcatggctactatttgcaacatgggcgccgaaattggggctactacatcagtcttcccttataaccatagaatgaaaaagtatctgtcgaaaacggggagggaggacattgcaaatcttgcagatgaatttaaggatcacctggtacctgaccccggctgtcactacgaccagctcatcgagatcaatctcagtgagctgaagcctcatattaacggacccttcacccccgatctggcacatccagttgcagaggtgggaaaagtcgccgagaaggagggttggccgctggatatcagagtcggcttgattggaagctgcacaaattcatcctacgaggatatgggacgctctgctgctgttgccaaacaggcgttggctcacggattgaagtgcaaatcccagttcacaatcaccccggggtccgaacagattcgggctaccatcgagagggatggctacgcacagattctgcgggatttggggggcattgtactggctaatgcatgcgggccatgtattggacagtgggatagaaaggatattaagaaaggggagaaaaacactatcgtaacgtcttataataggaactttacagggaggaatgatgccaaccccgagacccacgcattcgttaccagccctgaaatcgtcactgccctggcgatcgctggcacccttaagtttaatcctgaaacggactacctgacggggactgacgggaagaagtttcgactggaagccccagatgccgacgagcttcctaagggggaatttgaccccggccaggacacttaccagcaccctccaaaggactcatctggtcagcatgtcgacgtgtccccgacaagccaaagattgcagctgctagagccctttgacaaatgggacgggaaagatctagaagatttgcagatcttaattaaagtcaaagggaagtgtacaactgaccatatttcagcagccggaccttggttgaaattccggggccacctggacaatatcagtaataacctgttgataggggctatcaatatcgagaacgggaaggccaattccgttcggaacgccgttacgcaggagtttggacctgtaccagataccgctaggtattacaagaaacacgggataagatgggtcgtgatcggtgacgagaattacggcgagggatcttctcgcgagcacgcagcgctagagccgagacacttaggggggcgggcgattattaccaagagctttgccagaatccatgagaccaatctaaagaagcagggcctgttgccattgacattcgctgacccagccgattacaacaagatccacccagtggataagctgaccatccaggggctgaaggacttcactcccggcaagcccctgaagtgtatcatcaagcatcccaatgggactcaggagacgattctgctgaaccacacctttaacgagactcaaatagagtggtttcgggccggtagtgccctcaatagaatgaaagaattgcagcagtag

SEQ ID NO: 38339 - DNA, 2343 bp, Artificial Sequence
  derived and/or modified sequence
atggccccctacagcctgctggtgacccggctgcagaaggccctgggagttcgccagtatcacgtggcttcagtgctgtgtcagcgcgcaaaagtcgccatgtcacacttcgagccaaacgagtacattcactatgatctcctggaaaaaaatataaacatcgtgcggaagcggttgaatcgccccctgactctgagtgagaaaatcgtttacggacatttggatgatcccgcctcccaggaaatagagagagggaaaagctatctccgactgcgccctgatagagtggccatgcaggatgccacggctcaaatggcaatgttacagtttatttcgtcaggtctttctaaggttgccgtgccaagtaccatccattgtgatcacctgatcgaagcccaagtgggaggggagaaagacctcaggagggcgaaagacattaatcaagaagtttacaactttctcgcaacagctggcgctaaatatggtgtggggttttggaagcctggctcaggaatcatccaccagatcattctggagaactatgcgtaccctggcgtgctgcttattggaacggatagccacaccccgaacggtgggggcttaggcggaatttgcatcggtgtgggtggcgccgacgccgtggatgtaatggcaggcataccgtgggagctcaagtgccctaaggttattggagtaaaactcaccgggtcactgtctggttggtcatcaccaaaagacgtcatcctgaaggtggctggaatactgaccgttaaggggggaacaggggcaatagtagaataccatggtcccggggttgactccatttcctgtactggtatggctacaatatgcaacatgggagccgaaatcggtgcgacaacttctgtgtttccttataaccacagaatgaagaaatacctgagcaaaacaggacgcgaggatatcgccaatctcgccgatgagtttaaggaccacctggtgcccgaccctggctgtcactacgatcaactgatagaaatcaacctctccgaactgaaaccccatatcaatggtccatttactcccgacctggcccaccccgtggcagaggtcggcaaagtcgcagagaaagagggatggcccttggacatacgcgtggggctgatcggttcttgcaccaatagctcttacgaggacatgggaagatctgctgccgtcgcaaagcaggcactggctcatggccttaagtgtaaaagccaatttacaataacgcctggaagcgaacaaatcagagccacaattgaaagggatggctatgcccagatcctgagagatcttggcggcatcgtgcttgcaaacgcatgcgggccatgcataggccaatgggatcggaaagatattaaaaagggggaaaaaaacacgatagttactagctacaaccgcaatttcaccggacgcaacgatgctaacccagaaacccatgccttcgtcacctctcctgaaattgtgacggccctggcgattgccggcacactgaagtttaaccctgagacagactatctaacgggcacagacgggaagaagtttagactcgaggcccctgatgctgatgagctgcccaagggggagttcgaccctggccaagacacataccagcatcctcctaaggattcctctgggcaacacgtggatgtttcccctacttcacagagattgcaattgttggagccgttcgataagtgggatgggaaggatctggaagatctacagatactgatcaaagtgaaagggaagtgcacgactgaccatatatctgctgccggaccctggctgaaatttagggggcatctggataacatcagtaacaatttattgattggtgccataaacatcgaaaacgggaaagccaattctgtgagaaacgccgtaacgcaggagttcggccctgttcccgataccgctcggtactacaagaagcacggaattcgatgggtggtcattggggatgaaaactatggcgagggctcgtcccgcgaacacgccgcattggagcccaggcacctggggggaagagccataatcaccaagtcatttgcacgaatccacgagactaacctgaagaagcaaggactgttgccactgacatttgccgatccagctgactacaataaaattcaccctgtcgacaagctgaccatccagggtctcaaggattttaccccaggcaagcccctcaagtgcattattaaacaccccaacggtacccaagaaactatcctcctgaatcatactttcaatgagacacagattgagtggtttcgagcgggctcagctctcaacaggatgaaggaactacagcagtag

SEQ ID NO: 38340 - DNA, 2418 bp, Artificial Sequence
  derived and/or modified sequence
atggcaccttattccttgcttgttactagactgcagaaagcactgggagttagacagtatcacgtggcatcagtgttgtgtcagcgcgcaaaggtcgcaatgtcccactttgagcctaatgagtacatacactatgatcttctggagaaaaacatcaacattgtgagaaagagactgaaccgccctctcacgctgtccgagaagatcgtttacggccatcttgacgaccctgcttctcaggaaatcgagaggggtaaatcttatctgaggctgcgcccagacagggtggcgatgcaggacgcgacggcacaaatggcaatgctgcaattcataagcagcggtctctcaaaagtcgccgttcccagcactatccactgcgaccatctcattgaggcacaggtgggaggcgaaaaagacctgagacgagctaaagatatcaaccaagaggtgtacaatttcctggctaccgccggagccaaatacggagtagggttttggaagccaggatcaggtattattcaccagatcatcctggaaaactatgcatacccaggcgtgctcctcatcggcacagattcacacacccccaatggtggcggtctgggaggcatctgcataggcgtggggggagccgacgccgtggacgtcatggccggaataccttgggagcttaagtgtccaaaggtcatcggggtgaagctgacgggctccctatccgggtggagttctccaaaagacgtaatcctgaaggtagcgggaatcctaactgtcaaaggtggcacaggggcaattgtggagtaccatggtccaggcgtggacagcatcagttgcaccggtgaggaggggggacaggccacttggccactgccatgtgcgggaccggatggatctcccgtcggctcaagatccgggatggctaccatatgtaatatgggcgctgagataggcgctaccaccagtgtgttcccctacaaccacagaatgaaaaaatatctgtctaagactggaagggaagacatcgcaaacttagccgatgagttcaaggatcacctggtccctgaccctggctgccactatgatcaacttattgagattaacctgtcggaactgaagccccacatcaacggaccttttactcctgaccttgcacatccagtggccgaggtcggaaaggtcgctgagaaggagggctggccacttgacatacgcgtcggactcattggttcctgtacaaatagctcttacgaggatatgggacgatcagctgcggtggcaaagcaggcgctggcacacgggctgaagtgcaagagtcagtttaccatcacccccggttccgaacaaattagggctacaatcgaacgcgatggttacgcccagattctgagggatctgggtggtattgtcttggctaatgcatgtggaccctgcattggacagtgggatagaaaggacatcaagaagggagagaaaaataccattgtgacaagctataatagaaacttcacgggtcgaaacgatgccaaccccgaaacacacgccttcgtgacatcccctgagattgtgaccgcactggctattgctggcacgcttaaatttaatcctgagaccgattatctgacaggaactgatgggaaaaaatttagactggaggcgccagatgccgacgaactcccgaaaggggagtttgatcccggacaggacacctatcaacacccacctaaagactcctcaggacagcacgtggatgtgagcccaacctcccaacgactgcagctgttggaacctttcgacaaatgggatggaaaagacctggaggatctgcaaattctcatcaaagtgaagggcaaatgtaccaccgaccacatctcagccgctggtccgtggctgaaattccggggtcacctagacaacatctctaacaatcttttgatcggggctatcaatattgagaatgggaaagcgaactccgtaaggaacgctgtcacccaggagtttggcccagtaccggacacagcaaggtactataagaaacatggaatacggtgggttgtgataggcgatgaaaattacggggaagggtcctctcgggaacatgccgctctggaaccacggcatctgggcggtcgcgctatcattacaaagtctttcgcaaggatccatgaaacaaaccttaagaagcagggcctgttgcctcttacattcgctgaccctgccgactacaacaaaatccacccagtggataagctcactatccaaggcctcaaagactttactccaggcaagcctttgaagtgcatcatcaagcaccctaacggtacccaggagactattctgttgaaccatacgtttaatgaaacacagatcgaatggttccgtgcaggatccgctctgaacagaatgaaggaactacaacagtag

SEQ ID NO: 38341 - DNA, 1506 bp, Artificial Sequence
  derived and/or modified sequence
atggcaaccatctgtaacatgggagccgagattggagccaccaccagtgtattcccctacaaccatcgcatgaaaaaatacttatccaagacaggccgagaggatattgcgaatttagccgatgagtttaaggaccatctcgttccagacccaggctgccactacgaccagttgattgagattaacctgagcgaactcaaaccacacatcaacggcccattcacccctgatcttgcccaccccgtcgccgaggtgggaaaagtggcagagaaagaaggctggccactggacatccgcgtcggtctgatcggttcttgcactaacagctcatacgaggacatgggaagatcagccgcagtggcaaagcaggcacttgctcacggtttgaagtgtaaaagccaatttaccattacgccaggctccgagcagataagagctacaatcgaacgcgatggctatgctcaaatcctgcgcgatcttgggggtattgtccttgccaacgcttgtggcccttgtatcggtcagtgggataggaaggacattaagaagggcgagaagaataccattgtcacttcctacaacaggaattttactgggagaaatgatgccaatcctgagacacatgcgtttgtcacgagtccagagattgtcactgctctcgcaatcgcgggaacactcaaatttaacccagaaactgattatcttacaggaactgacggcaagaaattccggctcgaggccccagacgcagatgaactgcccaaaggggagtttgaccccggacaagacacatatcaacaccctcctaaggatagctccgggcagcatgtagatgttagtcccacttctcaacgcttacaactactggaaccttttgacaagtgggacggcaaggacctggaggacctccagattcttatcaaggtcaagggaaagtgcacgacggaccacatatctgccgctggcccttggttaaagtttcggggacacttagataatatcagtaataacttgctaatcggagccattaatatcgaaaatgggaaggccaatagcgtccgaaatgccgtgacccaggagtttggacctgttcctgacactgcgaggtactataaaaagcacggcattcgctgggtggtaatcggcgacgaaaactacggagaaggttcctcccgggaacacgcagcacttgagccgaggcatctggggggaagagccataattactaagtccttcgctcggatccatgagacaaacctgaagaaacagggtctcctgccactgacttttgccgacccggctgactacaataagatccatccagttgacaaattgacaatccaagggctcaaagatttcacccccggtaagcccttgaaatgcattattaagcaccccaacggaactcaggagactattctgttaaatcatacttttaatgagacacaaattgaatggtttcgagccggttcggccctgaaccggatgaaagagttgcagcagtag

SEQ ID NO: 38342 - DNA, 2286 bp, Artificial Sequence
  derived and/or modified sequence
atggctccctacagtcttctggtcacaagactccagaaagcattaggtgttcgccagtaccatgtggcctcagtgctgtgccagagggccaaagtggccatgagccattttgaacctaatgagtacatccactacgacctcttggagaagaacatcaacattgttcgcaagaggctgaatcgccctctcacgctatcggagaagatcgtgtacgggcacctggatgaccctgcaagccaggagattgaacgcggtaaaagttatctgagactccgacccgacagagtggccatggttgctgtgccatccaccatccactgcgaccatctgatcgaggcccaggttgggggtgagaaagacctcaggcgagctaaggacatcaaccaggaggtttacaatttccttgccaccgcaggtgccaagtatggcgtgggtttctggaaaccaggcagtggcataatacaccagataatcctggagaactatgcatatccaggggttttactgattggcacagactcacacacgcctaatggagggggacttggcggtatttgtatcggggtggggggagcagacgccgtggacgtgatggcgggaatcccttgggaactgaagtgccctaaggtcattggagttaagctgactggctccttgtctggatggagctcccccaaggacgtgatccttaaggtggccggtatcctcactgtgaagggtggcactggcgctatagtggagtaccatggccctggcgtggatagcatcagttgcacggggatggctaccatttgtaacatgggggcagagataggtgctacaacaagtgtgttcccttacaaccaccggatgaagaagtatctgtcgaagaccgggcgagaagacatcgctaatctagccgacgaatttaaagatcatctggtgcctgatccgggatgccactatgatcaactcatcgagatcaacctgagtgaactcaaacctcatatcaacgggcctttcacacccgacctagcacaccccgtggccgaggtcggtaaagtggccgagaaggaggggtggcctttggatatacgggtgggcctcatcgggtcatgtactaatagcagttatgaggatatgggtcggtccgctgccgttgcaaaacaggcacttgcacatgggctgaaatgcaagagtcagttcaccattacccccggtagtgagcagattagggccactatagagcgggatggttacgctcaaatcttgagggatctcggaggcattgtcctggccaacgcctgtgggccatgcatcggtcagtgggaccggaaagatattaagaaaggggagaaaaataccatcgtaacatcctacaaccgaaactttacaggccgtaatgacgcgaaccctgagacccacgccttcgtgacaagtcccgaaatcgtcactgccctcgctattgccggaaccttaaaatttaaccctgaaactgattatttaactggcacagatggtaaaaagttccggttagaggcaccggatgctgacgaacttccgaagggcgaatttgaccctgggcaggatacatatcagcaccctcccaaggatagttctgggcaacatgtggacgtcagtccaaccagtcagagactacagttactagaaccatttgataagtgggacgggaaagacctcgaagatctacaaattttaatcaaagttaagggcaagtgcaccacggaccatattagcgccgcaggcccatggctcaagttccggggtcacctggataatataagtaacaaccttctcatcggtgctattaatatcgaaaatggcaaggccaactccgttaggaacgccgtgacccaggagtttggccctgtcccggatacagctcgctattacaaaaaacacggaattcgttgggtggtcatcggagacgagaattatggcgaagggtcgagcagggagcacgccgctctcgagcctcgacatttgggcggaagggctattatcacgaagagctttgccaggatccacgagactaatctcaagaagcaaggcctgctcccacttacatttgccgatcccgctgactataataaaattcatccagtggacaaattgaccattcagggacttaaagatttcacccctgggaaacctctgaaatgtattattaagcaccccaatggcactcaggagacaattctactgaaccatacctttaacgaaacccagatagaatggttccgggctggaagtgcactcaatcgcatgaaggagctgcaacagtag

SEQ ID NO: 38343 - DNA, 2343 bp, Artificial Sequence
  derived and/or modified sequence
atggcgccatacagcttgcttgtgacccggcttcagaaagccctgggcgtccgacagtaccacgtcgcctccgtgttgtgccaacgtgccaaagtggccatgtcacactttgaaccaaacgagtacatacattacgatctactcgaaaaaaacattaacattgttcgcaagagactcaataggccgctgacactctctgaaaaaatcgtgtatgggcacctcgacgatcctgccagtcaggagatcgagcggggtaagagttacctgagactcagaccagatcgggtggccatgcaagacgccactgctcagatggcgatgctgcagtttatcagcagtggcctaagcaaggtggccgtgccgtccacaatacattgtgatcacttgatcgaggcacaggtgggtggcgagaaagaccttcgtagagccaaagacattaaccaagaggtgtacaatttcctggcaactgccggtgctaagtacggtgttggcttctggaagcccggttctggaataattcaccagataatacttgagaattacgcgtacccgggtgttctgctgattggcaccgattctcacacccctaacggaggcggactggggggtatctgtattggtgtgggtggggctgatgccgtagatgtgatggcgggaatcccatgggagctgaagtgccctaaagtgattggcgtgaagctgaccggatcactgtctggctggtcttcgccgaaggatgtgatcctgaaggtggctggaattcttaccgtgaagggaggaaccggggctatcgttgaataccatggaccgggtgtggattcaataagctgtacaggcatggccaccatatgtaacatgggcgctgagattggggctactacgagcgtgtttccgtacaaccacagaatgaagaagtatttgtctaagaccggtcgggaggatatagcgaacctggcagatgagtttaaggaccatctcgtgcctgatcctggatgtcactacgaccagctcatcgagattaatctcagtgaactgaagcctcatattaacgggccatttacaccagatctggcccaccccgtggccgaagtcggcaaagtcgctgaaaaagagggctggcctttagatatccgggtcggtctgattgggagttgtaccaacagttcttacgaagacatgggtaggagcgctgcagtggcaaagcaggctttggcacacggtctaaaatgcaaatcacagttcacaatcaccccaggatctgaacagattcgcgctacgattgaaagggacgggtacgcccagattcttagagacttgggtggaatcgtgttagcgaatgcttgcggaccatgcataggccagtgggatagaaaagacatcaagaagggtgaaaagaacactattgtcacatcgtacaataggaacttcacgggcagaaatgatgccaacccagagacgcatgccttcgtgacttcaccagaaatcgtgactgcgctggccattgccggtactctgaagtttaatccagagaccgactatctgaccggcacagacggcaagaagttccgcctggaggcaccggacgccgatgaactccccaaaggtgaatttgacccaggccaagatacatatcagcacccaccgaaagatagcagtggacagcatgttgacgttagccccacctcacagcgcttgcagctgctcgaaccgtttgacaagtgggatgggaaagatctcgaagacttacagattttgattaaggtgaagggaaagtgcaccacagaccacatctctgccgcaggcccttggctgaaatttcggggacacctggacaacataagcaataacctgctcattggcgcaatcaacattgagaacgggaaagctaactccgtgcgcaatgcagtgacacaggaatttggacccgtgcctgacacggctcgctactataaaaagcatgggatcagatgggtggtgattggcgacgaaaactatggcgaaggttcatctagggagcacgccgctctagagcctagacacctgggaggacgggcaattattaccaaatcgttcgctcggatccatgagacgaacctgaagaagcaaggcctcctgcccctaaccttcgccgaccccgctgattacaataagatccatcccgtggataaactgaccatccaaggattaaaggattttactcctggcaaacccctgaaatgcatcattaagcaccctaacggcacccaagagaccattctactgaatcataccttcaacgagacccagattgaatggtttagagccggttctgccctgaatcggatgaaggagctgcagcaatag

SEQ ID NO: 38344 - DNA, 2741 bp, Artificial Sequence
  derived and/or modified sequence
ctcatctttgtcagtgcacaaaatggcgccctacagcctactggtgactcggctgcagaaagctctgggtgtgcggcagtaccatgtggcctcagtcctgtgccaacgggccaaggtggcgatgagccactttgagcccaacgagtacatccattatgacctgctagagaagaacattaacattgttcgcaaacgactgaaccggccgctgacactctcggagaagattgtgtatggacacctggatgaccccgccagccaggaaattgagcgaggcaagtcgtacctgcggctgcggccggaccgtgtggccatgcaggatgcgacggcccagatggccatgctccagttcatcagcagcgggctgtccaaggtggctgtgccatccaccatccactgtgaccatctgattgaagcccaggttgggggcgagaaagacctgcgccgggccaaggacatcaaccaggaagtttataatttcctggcaactgcaggtgccaaatatggcgtgggcttctggaagcctggatctggaatcattcaccagattattctggaaaactatgcgtaccctggtgttcttctgattggcactgactcccacacccccaatggtggcggccttgggggcatctgcattggagttgggggtgccgatgctgtggatgtcatggctgggatcccctgggagctgaagtgccccaaggtgattggcgtgaagctgacgggctctctctccggttggtcctcacccaaagatgtgatcctgaaggtggcaggcatcctcacggtgaaaggtggcacaggtgcaatcgtggaataccacgggcctggtgtagactccatctcctgcactggcatggcgacaatctgcaacatgggtgcagaaattggggccaccacttccgtgttcccttacaaccacaggatgaagaagtacctgagcaagaccggccgggaagacattgccaatctagctgatgaattcaaggatcacttggtgcctgaccctggctgccattatgaccaactaattgaaattaacctcagtgagctgaagccacacatcaatgggcccttcacccctgacctggctcaccctgtggcagaagtgggcaaggtggcagagaaggaaggatggcctctggacatccgagtgggtctaattggtagctgcaccaattcaagctatgaagatatggggcgctcagcagctgtggccaagcaggcactggcccatggcctcaagtgcaagtcccagttcaccatcactccaggttccgagcagatccgcgccaccattgagcgggacggctatgcacagatcttgagggatctgggtggcattgtcctggccaatgcttgtggcccctgcattggccagtgggacaggaaggacatcaagaagggggagaagaacacaatcgtcacctcctacaacaggaacttcacgggccgcaacgacgcaaaccccgagacccatgcctttgtcacgtccccagagattgtcacagccctggccattgcgggaaccctcaagttcaacccagagaccgactacctgacgggcacggatggcaagaagttcaggctggaggctccggatgcagatgagcttcccaaaggggagtttgacccagggcaggacacctaccagcacccacccaaggacagcagcgggcagcatgtggacgtgagccccaccagccagcgcctgcagctcctggagccttttgacaagtgggatggcaaggacctggaggacctgcagatcctcatcaaggtcaaagggaagtgtaccactgaccacatctcagctgctggcccctggctcaagttccgtgggcacttggataacatctccaacaacctgctcattggtgccatcaacattgaaaacggcaaggccaactccgtgcgcaatgccgtcactcaggagtttggccccgtccctgacactgcccgctactacaagaaacatggcatcaggtgggtggtgatcggagacgagaactacggcgagggctcgagccgggagcatgcagctctggagcctcgccaccttgggggccgggccatcatcaccaagagctttgccaggatccacgagaccaacctgaagaaacagggcctgctgcctctgaccttcgctgacccggctgactacaacaagattcaccctgtggacaagctgaccattcagggcctgaaggacttcacccctggcaagcccctgaagtgcatcatcaagcaccccaacgggacccaggagaccatcctcctgaaccacaccttcaacgagacgcagattgagtggttccgcgctggcagtgccctcaacagaatgaaggaactgcaacagtgagggcagtgcctccccgccccgccgctggcgtcaagttcagctccacgtgtgccatcagtggatccgatccgtccagccatggcttcctattccaagatggtgtgaccagacatgcttcctgctccccgcttagcccacggagtgactgtggttgtggtgggggggttcttaaaataactttttagcccccgtcttcctattttgagtttggttcagatcttaagcagctccatgcaactgtatttatttttgatgacaagactcccatctaaagtttttctcctgcctgatcatttcattggtggctgaaggattctagagaaccttttgttcttgcaaggaaaacaagaatccaaaaccagtgactgttctgtga

SEQ ID NO: 38345 - DNA, 2811 bp, Artificial Sequence
  derived and/or modified sequence
ctttgtcagtgcacaaaatggcgccctacagcctactggtgactcggctgcagaaagctctgggtgtgcggcagtaccatgtggcctcagtcctgtgccaacgggccaaggtggcgatgagccactttgagcccaacgagtacatccattatgacctgctagagaagaacattaacattgttcgcaaacgactgaaccggccgctgacactctcggagaagattgtgtatggacacctggatgaccccgccagccaggaaattgagcgaggcaagtcgtacctgcggctgcggccggaccgtgtggccatgcaggatgcgacggcccagatggccatgctccagttcatcagcagcgggctgtccaaggtggctgtgccatccaccatccactgtgaccatctgattgaagcccaggttgggggcgagaaagacctgcgccgggccaaggacatcaaccaggaagtttataatttcctggcaactgcaggtgccaaatatggcgtgggcttctggaagcctggatctggaatcattcaccagattattctggaaaactatgcgtaccctggtgttcttctgattggcactgactcccacacccccaatggtggcggccttgggggcatctgcattggagttgggggtgccgatgctgtggatgtcatggctgggatcccctgggagctgaagtgccccaaggtgattggcgtgaagctgacgggctctctctccggttggtcctcacccaaagatgtgatcctgaaggtggcaggcatcctcacggtgaaaggtggcacaggtgcaatcgtggaataccacgggcctggtgtagactccatctcctgcactggtgaggaaggcggccaggcgacgtggcccctaccctgtgctgggcctgatgggtctccagttgggagtagaagcggcatggcgacaatctgcaacatgggtgcagaaattggggccaccacttccgtgttcccttacaaccacaggatgaagaagtacctgagcaagaccggccgggaagacattgccaatctagctgatgaattcaaggatcacttggtgcctgaccctggctgccattatgaccaactaattgaaattaacctcagtgagctgaagccacacatcaatgggcccttcacccctgacctggctcaccctgtggcagaagtgggcaaggtggcagagaaggaaggatggcctctggacatccgagtgggtctaattggtagctgcaccaattcaagctatgaagatatggggcgctcagcagctgtggccaagcaggcactggcccatggcctcaagtgcaagtcccagttcaccatcactccaggttccgagcagatccgcgccaccattgagcgggacggctatgcacagatcttgagggatctgggtggcattgtcctggccaatgcttgtggcccctgcattggccagtgggacaggaaggacatcaagaagggggagaagaacacaatcgtcacctcctacaacaggaacttcacgggccgcaacgacgcaaaccccgagacccatgcctttgtcacgtccccagagattgtcacagccctggccattgcgggaaccctcaagttcaacccagagaccgactacctgacgggcacggatggcaagaagttcaggctggaggctccggatgcagatgagcttcccaaaggggagtttgacccagggcaggacacctaccagcacccacccaaggacagcagcgggcagcatgtggacgtgagccccaccagccagcgcctgcagctcctggagccttttgacaagtgggatggcaaggacctggaggacctgcagatcctcatcaaggtcaaagggaagtgtaccactgaccacatctcagctgctggcccctggctcaagttccgtgggcacttggataacatctccaacaacctgctcattggtgccatcaacattgaaaacggcaaggccaactccgtgcgcaatgccgtcactcaggagtttggccccgtccctgacactgcccgctactacaagaaacatggcatcaggtgggtggtgatcggagacgagaactacggcgagggctcgagccgggagcatgcagctctggagcctcgccaccttgggggccgggccatcatcaccaagagctttgccaggatccacgagaccaacctgaagaaacagggcctgctgcctctgaccttcgctgacccggctgactacaacaagattcaccctgtggacaagctgaccattcagggcctgaaggacttcacccctggcaagcccctgaagtgcatcatcaagcaccccaacgggacccaggagaccatcctcctgaaccacaccttcaacgagacgcagattgagtggttccgcgctggcagtgccctcaacagaatgaaggaactgcaacagtgagggcagtgcctccccgccccgccgctggcgtcaagttcagctccacgtgtgccatcagtggatccgatccgtccagccatggcttcctattccaagatggtgtgaccagacatgcttcctgctccccgcttagcccacggagtgactgtggttgtggtgggggggttcttaaaataactttttagcccccgtcttcctattttgagtttggttcagatcttaagcagctccatgcaactgtatttatttttgatgacaagactcccatctaaagtttttctcctgcctgatcatttcattggtggctgaaggattctagagaaccttttgttcttgcaaggaaaacaagaatccaaaaccagtgactgttctgtga

SEQ ID NO: 38346 - DNA, 1625 bp, Artificial Sequence
  derived and/or modified sequence
ctttaatgcgacctcatctttgtcagtgcacaaaatggcgccctacagcctactggtgactcggctgcagaaagctctggcatggcgacaatctgcaacatgggtgcagaaattggggccaccacttccgtgttcccttacaaccacaggatgaagaagtacctgagcaagaccggccgggaagacattgccaatctagctgatgaattcaaggatcacttggtgcctgaccctggctgccattatgaccaactaattgaaattaacctcagtgagctgaagccacacatcaatgggcccttcacccctgacctggctcaccctgtggcagaagtgggcaaggtggcagagaaggaaggatggcctctggacatccgagtgggtctaattggtagctgcaccaattcaagctatgaagatatggggcgctcagcagctgtggccaagcaggcactggcccatggcctcaagtgcaagtcccagttcaccatcactccaggttccgagcagatccgcgccaccattgagcgggacggctatgcacagatcttgagggatctgggtggcattgtcctggccaatgcttgtggcccctgcattggccagtgggacaggaaggacatcaagaagggggagaagaacacaatcgtcacctcctacaacaggaacttcacgggccgcaacgacgcaaaccccgagacccatgcctttgtcacgtccccagagattgtcacagccctggccattgcgggaaccctcaagttcaacccagagaccgactacctgacgggcacggatggcaagaagttcaggctggaggctccggatgcagatgagcttcccaaaggggagtttgacccagggcaggacacctaccagcacccacccaaggacagcagcgggcagcatgtggacgtgagccccaccagccagcgcctgcagctcctggagccttttgacaagtgggatggcaaggacctggaggacctgcagatcctcatcaaggtcaaagggaagtgtaccactgaccacatctcagctgctggcccctggctcaagttccgtgggcacttggataacatctccaacaacctgctcattggtgccatcaacattgaaaacggcaaggccaactccgtgcgcaatgccgtcactcaggagtttggccccgtccctgacactgcccgctactacaagaaacatggcatcaggtgggtggtgatcggagacgagaactacggcgagggctcgagccgggagcatgcagctctggagcctcgccaccttgggggccgggccatcatcaccaagagctttgccaggatccacgagaccaacctgaagaaacagggcctgctgcctctgaccttcgctgacccggctgactacaacaagattcaccctgtggacaagctgaccattcagggcctgaaggacttcacccctggcaagcccctgaagtgcatcatcaagcaccccaacgggacccaggagaccatcctcctgaaccacaccttcaacgagacgcagattgagtggttccgcgctggcagtgccctcaacagaatgaaggaactgcaacagtgagggcagtgcctccccgccccgccgctggcgtcaagttc

SEQ ID NO: 38347 - DNA, 2675 bp, Artificial Sequence
  derived and/or modified sequence
atgcgacctcatctttgtcagtgcacaaaatggcgccctacagcctactggtgactcggctgcagaaagctctgggtgtgcggcagtaccatgtggcctcagtcctgtgccaacgggccaaggtggcgatgagccactttgagcccaacgagtacatccattatgacctgctagagaagaacattaacattgttcgcaaacgactgaaccggccgctgacactctcggagaagattgtgtatggacacctggatgaccccgccagccaggaaattgagcgaggcaagtcgtacctgcggctgcggccggaccgtgtggccatggtggctgtgccatccaccatccactgtgaccatctgattgaagcccaggttgggggcgagaaagacctgcgccgggccaaggacatcaaccaggaagtttataatttcctggcaactgcaggtgccaaatatggcgtgggcttctggaagcctggatctggaatcattcaccagattattctggaaaactatgcgtaccctggtgttcttctgattggcactgactcccacacccccaatggtggcggccttgggggcatctgcattggagttgggggtgccgatgctgtggatgtcatggctgggatcccctgggagctgaagtgccccaaggtgattggcgtgaagctgacgggctctctctccggttggtcctcacccaaagatgtgatcctgaaggtggcaggcatcctcacggtgaaaggtggcacaggtgcaatcgtggaataccacgggcctggtgtagactccatctcctgcactggcatggcgacaatctgcaacatgggtgcagaaattggggccaccacttccgtgttcccttacaaccacaggatgaagaagtacctgagcaagaccggccgggaagacattgccaatctagctgatgaattcaaggatcacttggtgcctgaccctggctgccattatgaccaactaattgaaattaacctcagtgagctgaagccacacatcaatgggcccttcacccctgacctggctcaccctgtggcagaagtgggcaaggtggcagagaaggaaggatggcctctggacatccgagtgggtctaattggtagctgcaccaattcaagctatgaagatatggggcgctcagcagctgtggccaagcaggcactggcccatggcctcaagtgcaagtcccagttcaccatcactccaggttccgagcagatccgcgccaccattgagcgggacggctatgcacagatcttgagggatctgggtggcattgtcctggccaatgcttgtggcccctgcattggccagtgggacaggaaggacatcaagaagggggagaagaacacaatcgtcacctcctacaacaggaacttcacgggccgcaacgacgcaaaccccgagacccatgcctttgtcacgtccccagagattgtcacagccctggccattgcgggaaccctcaagttcaacccagagaccgactacctgacgggcacggatggcaagaagttcaggctggaggctccggatgcagatgagcttcccaaaggggagtttgacccagggcaggacacctaccagcacccacccaaggacagcagcgggcagcatgtggacgtgagccccaccagccagcgcctgcagctcctggagccttttgacaagtgggatggcaaggacctggaggacctgcagatcctcatcaaggtcaaagggaagtgtaccactgaccacatctcagctgctggcccctggctcaagttccgtgggcacttggataacatctccaacaacctgctcattggtgccatcaacattgaaaacggcaaggccaactccgtgcgcaatgccgtcactcaggagtttggccccgtccctgacactgcccgctactacaagaaacatggcatcaggtgggtggtgatcggagacgagaactacggcgagggctcgagccgggagcatgcagctctggagcctcgccaccttgggggccgggccatcatcaccaagagctttgccaggatccacgagaccaacctgaagaaacagggcctgctgcctctgaccttcgctgacccggctgactacaacaagattcaccctgtggacaagctgaccattcagggcctgaaggacttcacccctggcaagcccctgaagtgcatcatcaagcaccccaacgggacccaggagaccatcctcctgaaccacaccttcaacgagacgcagattgagtggttccgcgctggcagtgccctcaacagaatgaaggaactgcaacagtgagggcagtgcctccccgccccgccgctggcgtcaagttcagctccacgtgtgccatcagtggatccgatccgtccagccatggcttcctattccaagatggtgtgaccagacatgcttcctgctccccgcttagcccacggagtgactgtggttgtggtgggggggttcttaaaataactttttagcccccgtcttcctattttgagtttggttcagatcttaagcagctccatgcaactgtatttatttttgatgacaagactcccatctaaagtttttctcctgcctgatcatttcattggtggctgaaggattctagagaaccttttgttcttgcaaggaaaacaagaatccaaaacc

SEQ ID NO: 38348 - DNA, 2418 bp, Artificial Sequence
  derived and/or modified sequence
atggccccctacagcctgctggtgaccagactgcagaaggccctgggcgtgagacagtaccacgtggccagcgtgctgtgccagagagccaaggtggccatgagccacttcgagcccaacgagtacatccactacgacctgctggagaagaacatcaacatcgtgagaaagagactgaacagacccctgaccctgagcgagaagatcgtgtacggccacctggacgaccccgccagccaggagatcgagagaggcaagagctacctgagactgagacccgacagagtggccatgcaggacgccaccgcccagatggccatgctgcagttcatcagcagcggcctgagcaaggtggccgtgcccagcaccatccactgcgaccacctgatcgaggcccaggtgggcggcgagaaggacctgagaagagccaaggacatcaaccaggaggtgtacaacttcctggccaccgccggcgccaagtacggcgtgggcttctggaagcccggcagcggcatcatccaccagatcatcctggagaactacgcctaccccggcgtgctgctgatcggcaccgacagccacacccccaacggcggcggcctgggcggcatctgcatcggcgtgggcggcgccgacgccgtggacgtgatggccggcatcccctgggagctgaagtgccccaaggtgatcggcgtgaagctgaccggcagcctgagcggctggagcagccccaaggacgtgatcctgaaggtggccggcatcctgaccgtgaagggcggcaccggcgccatcgtggagtaccacggccccggcgtggacagcatcagctgcaccggcgaggagggcggccaggccacctggcccctgccctgcgccggccccgacggcagccccgtgggcagcagaagcggcatggccaccatctgcaacatgggcgccgagatcggcgccaccaccagcgtgttcccctacaaccacagaatgaagaagtacctgagcaagaccggcagagaggacatcgccaacctggccgacgagttcaaggaccacctggtgcccgaccccggctgccactacgaccagctgatcgagatcaacctgagcgagctgaagccccacatcaacggccccttcacccccgacctggcccaccccgtggccgaggtgggcaaggtggccgagaaggagggctggcccctggacatcagagtgggcctgatcggcagctgcaccaacagcagctacgaggacatgggcagaagcgccgccgtggccaagcaggccctggcccacggcctgaagtgcaagagccagttcaccatcacccccggcagcgagcagatcagagccaccatcgagagagacggctacgcccagatcctgagagacctgggcggcatcgtgctggccaacgcctgcggcccctgcatcggccagtgggacagaaaggacatcaagaagggcgagaagaacaccatcgtgaccagctacaacagaaacttcaccggcagaaacgacgccaaccccgagacccacgccttcgtgaccagccccgagatcgtgaccgccctggccatcgccggcaccctgaagttcaaccccgagaccgactacctgaccggcaccgacggcaagaagttcagactggaggcccccgacgccgacgagctgcccaagggcgagttcgaccccggccaggacacctaccagcacccccccaaggacagcagcggccagcacgtggacgtgagccccaccagccagagactgcagctgctggagcccttcgacaagtgggacggcaaggacctggaggacctgcagatcctgatcaaggtgaagggcaagtgcaccaccgaccacatcagcgccgccggcccctggctgaagttcagaggccacctggacaacatcagcaacaacctgctgatcggcgccatcaacatcgagaacggcaaggccaacagcgtgagaaacgccgtgacccaggagttcggccccgtgcccgacaccgccagatactacaagaagcacggcatcagatgggtggtgatcggcgacgagaactacggcgagggcagcagcagagagcacgccgccctggagcccagacacctgggcggcagagccatcatcaccaagagcttcgccagaatccacgagaccaacctgaagaagcagggcctgctgcccctgaccttcgccgaccccgccgactacaacaagatccaccccgtggacaagctgaccatccagggcctgaaggacttcacccccggcaagcccctgaagtgcatcatcaagcaccccaacggcacccaggagaccatcctgctgaaccacaccttcaacgagacccagatcgagtggttcagagccggcagcgccctgaacagaatgaaggagctgcagcagtag

SEQ ID NO: 38349 - DNA, 1506 bp, Artificial Sequence
  derived and/or modified sequence
atggccaccatctgcaacatgggcgccgagatcggcgccaccaccagcgtgttcccctacaaccacagaatgaagaagtacctgagcaagaccggcagagaggacatcgccaacctggccgacgagttcaaggaccacctggtgcccgaccccggctgccactacgaccagctgatcgagatcaacctgagcgagctgaagccccacatcaacggccccttcacccccgacctggcccaccccgtggccgaggtgggcaaggtggccgagaaggagggctggcccctggacatcagagtgggcctgatcggcagctgcaccaacagcagctacgaggacatgggcagaagcgccgccgtggccaagcaggccctggcccacggcctgaagtgcaagagccagttcaccatcacccccggcagcgagcagatcagagccaccatcgagagagacggctacgcccagatcctgagagacctgggcggcatcgtgctggccaacgcctgcggcccctgcatcggccagtgggacagaaaggacatcaagaagggcgagaagaacaccatcgtgaccagctacaacagaaacttcaccggcagaaacgacgccaaccccgagacccacgccttcgtgaccagccccgagatcgtgaccgccctggccatcgccggcaccctgaagttcaaccccgagaccgactacctgaccggcaccgacggcaagaagttcagactggaggcccccgacgccgacgagctgcccaagggcgagttcgaccccggccaggacacctaccagcacccccccaaggacagcagcggccagcacgtggacgtgagccccaccagccagagactgcagctgctggagcccttcgacaagtgggacggcaaggacctggaggacctgcagatcctgatcaaggtgaagggcaagtgcaccaccgaccacatcagcgccgccggcccctggctgaagttcagaggccacctggacaacatcagcaacaacctgctgatcggcgccatcaacatcgagaacggcaaggccaacagcgtgagaaacgccgtgacccaggagttcggccccgtgcccgacaccgccagatactacaagaagcacggcatcagatgggtggtgatcggcgacgagaactacggcgagggcagcagcagagagcacgccgccctggagcccagacacctgggcggcagagccatcatcaccaagagcttcgccagaatccacgagaccaacctgaagaagcagggcctgctgcccctgaccttcgccgaccccgccgactacaacaagatccaccccgtggacaagctgaccatccagggcctgaaggacttcacccccggcaagcccctgaagtgcatcatcaagcaccccaacggcacccaggagaccatcctgctgaaccacaccttcaacgagacccagatcgagtggttcagagccggcagcgccctgaacagaatgaaggagctgcagcagtag

SEQ ID NO: 38350 - DNA, 2286 bp, Artificial Sequence
  derived and/or modified sequence
atggccccctacagcctgctggtgaccagactgcagaaggccctgggcgtgagacagtaccacgtggccagcgtgctgtgccagagagccaaggtggccatgagccacttcgagcccaacgagtacatccactacgacctgctggagaagaacatcaacatcgtgagaaagagactgaacagacccctgaccctgagcgagaagatcgtgtacggccacctggacgaccccgccagccaggagatcgagagaggcaagagctacctgagactgagacccgacagagtggccatggtggccgtgcccagcaccatccactgcgaccacctgatcgaggcccaggtgggcggcgagaaggacctgagaagagccaaggacatcaaccaggaggtgtacaacttcctggccaccgccggcgccaagtacggcgtgggcttctggaagcccggcagcggcatcatccaccagatcatcctggagaactacgcctaccccggcgtgctgctgatcggcaccgacagccacacccccaacggcggcggcctgggcggcatctgcatcggcgtgggcggcgccgacgccgtggacgtgatggccggcatcccctgggagctgaagtgccccaaggtgatcggcgtgaagctgaccggcagcctgagcggctggagcagccccaaggacgtgatcctgaaggtggccggcatcctgaccgtgaagggcggcaccggcgccatcgtggagtaccacggccccggcgtggacagcatcagctgcaccggcatggccaccatctgcaacatgggcgccgagatcggcgccaccaccagcgtgttcccctacaaccacagaatgaagaagtacctgagcaagaccggcagagaggacatcgccaacctggccgacgagttcaaggaccacctggtgcccgaccccggctgccactacgaccagctgatcgagatcaacctgagcgagctgaagccccacatcaacggccccttcacccccgacctggcccaccccgtggccgaggtgggcaaggtggccgagaaggagggctggcccctggacatcagagtgggcctgatcggcagctgcaccaacagcagctacgaggacatgggcagaagcgccgccgtggccaagcaggccctggcccacggcctgaagtgcaagagccagttcaccatcacccccggcagcgagcagatcagagccaccatcgagagagacggctacgcccagatcctgagagacctgggcggcatcgtgctggccaacgcctgcggcccctgcatcggccagtgggacagaaaggacatcaagaagggcgagaagaacaccatcgtgaccagctacaacagaaacttcaccggcagaaacgacgccaaccccgagacccacgccttcgtgaccagccccgagatcgtgaccgccctggccatcgccggcaccctgaagttcaaccccgagaccgactacctgaccggcaccgacggcaagaagttcagactggaggcccccgacgccgacgagctgcccaagggcgagttcgaccccggccaggacacctaccagcacccccccaaggacagcagcggccagcacgtggacgtgagccccaccagccagagactgcagctgctggagcccttcgacaagtgggacggcaaggacctggaggacctgcagatcctgatcaaggtgaagggcaagtgcaccaccgaccacatcagcgccgccggcccctggctgaagttcagaggccacctggacaacatcagcaacaacctgctgatcggcgccatcaacatcgagaacggcaaggccaacagcgtgagaaacgccgtgacccaggagttcggccccgtgcccgacaccgccagatactacaagaagcacggcatcagatgggtggtgatcggcgacgagaactacggcgagggcagcagcagagagcacgccgccctggagcccagacacctgggcggcagagccatcatcaccaagagcttcgccagaatccacgagaccaacctgaagaagcagggcctgctgcccctgaccttcgccgaccccgccgactacaacaagatccaccccgtggacaagctgaccatccagggcctgaaggacttcacccccggcaagcccctgaagtgcatcatcaagcaccccaacggcacccaggagaccatcctgctgaaccacaccttcaacgagacccagatcgagtggttcagagccggcagcgccctgaacagaatgaaggagctgcagcagtag

SEQ ID NO: 38351 - DNA, 2343 bp, Artificial Sequence
  derived and/or modified sequence
atggccccctacagcctgctggtgaccagactgcagaaggccctgggcgtgagacagtaccacgtggccagcgtgctgtgccagagagccaaggtggccatgagccacttcgagcccaacgagtacatccactacgacctgctggagaagaacatcaacatcgtgagaaagagactgaacagacccctgaccctgagcgagaagatcgtgtacggccacctggacgaccccgccagccaggagatcgagagaggcaagagctacctgagactgagacccgacagagtggccatgcaggacgccaccgcccagatggccatgctgcagttcatcagcagcggcctgagcaaggtggccgtgcccagcaccatccactgcgaccacctgatcgaggcccaggtgggcggcgagaaggacctgagaagagccaaggacatcaaccaggaggtgtacaacttcctggccaccgccggcgccaagtacggcgtgggcttctggaagcccggcagcggcatcatccaccagatcatcctggagaactacgcctaccccggcgtgctgctgatcggcaccgacagccacacccccaacggcggcggcctgggcggcatctgcatcggcgtgggcggcgccgacgccgtggacgtgatggccggcatcccctgggagctgaagtgccccaaggtgatcggcgtgaagctgaccggcagcctgagcggctggagcagccccaaggacgtgatcctgaaggtggccggcatcctgaccgtgaagggcggcaccggcgccatcgtggagtaccacggccccggcgtggacagcatcagctgcaccggcatggccaccatctgcaacatgggcgccgagatcggcgccaccaccagcgtgttcccctacaaccacagaatgaagaagtacctgagcaagaccggcagagaggacatcgccaacctggccgacgagttcaaggaccacctggtgcccgaccccggctgccactacgaccagctgatcgagatcaacctgagcgagctgaagccccacatcaacggccccttcacccccgacctggcccaccccgtggccgaggtgggcaaggtggccgagaaggagggctggcccctggacatcagagtgggcctgatcggcagctgcaccaacagcagctacgaggacatgggcagaagcgccgccgtggccaagcaggccctggcccacggcctgaagtgcaagagccagttcaccatcacccccggcagcgagcagatcagagccaccatcgagagagacggctacgcccagatcctgagagacctgggcggcatcgtgctggccaacgcctgcggcccctgcatcggccagtgggacagaaaggacatcaagaagggcgagaagaacaccatcgtgaccagctacaacagaaacttcaccggcagaaacgacgccaaccccgagacccacgccttcgtgaccagccccgagatcgtgaccgccctggccatcgccggcaccctgaagttcaaccccgagaccgactacctgaccggcaccgacggcaagaagttcagactggaggcccccgacgccgacgagctgcccaagggcgagttcgaccccggccaggacacctaccagcacccccccaaggacagcagcggccagcacgtggacgtgagccccaccagccagagactgcagctgctggagcccttcgacaagtgggacggcaaggacctggaggacctgcagatcctgatcaaggtgaagggcaagtgcaccaccgaccacatcagcgccgccggcccctggctgaagttcagaggccacctggacaacatcagcaacaacctgctgatcggcgccatcaacatcgagaacggcaaggccaacagcgtgagaaacgccgtgacccaggagttcggccccgtgcccgacaccgccagatactacaagaagcacggcatcagatgggtggtgatcggcgacgagaactacggcgagggcagcagcagagagcacgccgccctggagcccagacacctgggcggcagagccatcatcaccaagagcttcgccagaatccacgagaccaacctgaagaagcagggcctgctgcccctgaccttcgccgaccccgccgactacaacaagatccaccccgtggacaagctgaccatccagggcctgaaggacttcacccccggcaagcccctgaagtgcatcatcaagcaccccaacggcacccaggagaccatcctgctgaaccacaccttcaacgagacccagatcgagtggttcagagccggcagcgccctgaacagaatgaaggagctgcagcagtag

SEQ ID NO: 38352 - protein, 386 aa, Artificial Sequence
  derived and/or modified sequence
MRAAPLLLARAASLSLGFLFLLFFWLDRSVLAKELKFVTLVFRHGDRSPIDTFPTDPIKESSWPQGFGQLTQLGMEQHYELGEYIRKRYRKFLNESYKHEQVYIRSTDVDRTLMSAMTNLAALFPPEGVSIWNPILLWQPIPVHTVPLSEDQLLYLPFRNCPRFQELESETLKSEEFQKRLHPYKDFIATLGKLSGLHGQDLFGIWSKVYDPLYCESVHNFTLPSWATEDTMTKLRELSELSLLSLYGIHKQKEKSRLQGGVLVNEILNHMKRATQIPSYKKLIMYSAHDTTVSGLQMALDVYNGLLPPYASCHLTELYFEKGEYFVEMYYRNETQHEPYPLMLPGCSPSCPLERFAELVGPVIPQDWSTECMTTNSHQGTEDSTD

SEQ ID NO: 38353 - DNA, 1161 bp, Artificial Sequence
  derived and/or modified sequence
atgcgagccgcgccactgctgttagcaagagccgcgagcctctcgcttggtttcctctttctcttgttcttctggctggaccggtcagttctggccaaggaactcaaatttgtcacactggtgtttcgacatggagatcgctcacccattgacacattccccactgatccaatcaaagaaagttcctggccccaaggcttcgggcagttgactcaattgggaatggagcagcactacgaactgggggagtacatccggaagcgctaccggaaattcttgaacgagtcctataaacacgaacaggtgtacatcagatctacagatgtagaccggacattgatgtccgcgatgactaatctggctgccctgtttccccctgaaggtgtgagcatctggaatcctattctcttatggcagcccattcctgtccatactgtgcctctgtccgaggaccaactactgtacctgcccttcagaaactgtccacgttttcaggagctggagagcgagaccttaaaaagcgaagaatttcagaagcgactccatccttataaggactttattgctacacttggaaagctgagcgggctgcatggccaggatcttttcggcatctggtctaaggtgtatgatccactgtactgcgagagcgttcataatttcactctcccctcgtgggcaacagaggatacaatgacgaagcttagagaacttagtgagctgtctctgctctccctctacggtatccacaagcagaaagaaaagtcccgcctgcagggtggtgttctggttaatgagatcctgaatcacatgaagcgagcaacccagattccctcttataagaaattgatcatgtattcagcccatgataccaccgtctcgggactccaaatggctctggatgtatataacggacttttgcccccatacgctagctgccacttgactgagttgtacttcgagaagggcgaatacttcgtggagatgtactacaggaacgagacccagcacgagccttatcctttgatgctccctggatgtagtccgtcgtgtcccctcgagaggtttgcagagctggtcggacccgtaatcccgcaggactggtctaccgagtgcatgactacaaatagccatcaaggaacagaggactcaacggattag

SEQ ID NO: 38354 - DNA, 1161 bp, Artificial Sequence
  derived and/or modified sequence
atgagagctgcccccctgctgctggcccgggccgccagcctgagcctgggcttcctgttcctgctcttcttctggctggacagatctgtgctggccaaggagctgaagtttgtgaccctggtgttccgccacggggacaggagccccatcgacaccttccccacagaccccatcaaggagagctcctggccccagggcttcggccagctgacccagctgggcatggagcagcactatgagctgggggagtacatcaggaagcgctacaggaagttcctgaatgaaagctacaagcatgagcaggtgtacatccgcagcacagatgtggacaggaccctgatgtctgccatgaccaacctggccgccctcttccccccagagggcgtgtccatctggaaccccatcctgctgtggcagcccatccctgtgcacacagtgcccctgtctgaggaccagctgctgtacctgcccttcaggaactgcccccgcttccaggagctggagagcgagaccctgaagtctgaggagttccagaagaggctgcacccctacaaggacttcatcgccaccctgggcaagctgagcggcctgcacggccaggacctgtttggcatctggagcaaggtgtatgaccccctgtactgtgagagcgtgcacaacttcaccctgcccagctgggccacagaggacaccatgaccaagctgcgggagctgtctgagctgagcctgctgagcctgtatggcatccacaagcagaaggagaagagccggctgcagggcggcgtgctggtgaatgagatcctgaaccacatgaagagggccacccagatccccagctacaagaagctgatcatgtacagcgcccatgacaccaccgtgtctggcctgcagatggccctggatgtgtacaacggcctgctgcccccctatgccagctgccacctgacagagctgtactttgagaagggggagtactttgtggagatgtactacagaaatgagacccagcacgagccctaccccctgatgctgcccggctgcagccccagctgccccctggagagatttgctgagctggtgggccctgtgatcccccaggactggagcacagagtgcatgaccaccaacagccaccagggcacagaggacagcacagactag

SEQ ID NO: 38355 - DNA, 1161 bp, Artificial Sequence
  derived and/or modified sequence
atgcgggccgcccccctgctgctggcccgggccgccagcctgagccttggattcctttttctgttatttttctggttggatcgctccgtactggctaaagaattaaagttcgtgaccctagtgttcaggcacggtgaccgatctcccattgacacatttcctactgatcccattaaggaatccagctggccacagggttttggccagctcactcagctgggaatggagcaacactacgaactgggggagtatatccggaagagataccgcaagttccttaacgagagctacaagcatgaacaggtctatataaggtcgaccgacgtcgaccgaactctcatgtccgccatgacgaacctggccgctcttttcccaccagaaggagttagcatctggaatcccatcttactctggcagcctatcccggtgcacaccgtgcccctgagtgaagaccagttgctgtacctcccattccgcaattgtcctcgcttccaagagctcgagtcggagactctcaaaagcgaggaatttcagaaacgcctgcatccgtacaaggatttcattgcaaccctgggaaagctgtctggcctgcacggacaggacctgtttgggatttggtcgaaagtatatgatcctctctattgcgagagtgtacacaactttactcttccgtcgtgggccaccgaggacaccatgacaaaactccgggaactttcagaactttccctgttgtcgctgtatggaatccataagcagaaggagaaaagcaggctccaaggcggcgtactggtgaacgagattttaaaccacatgaaacgggcaacacagataccctcatataagaagctaatcatgtattcggcccacgacactacagtgagcggtctgcagatggcccttgacgtgtacaacgggcttctaccaccttacgctagttgccatctgactgaactgtattttgagaagggcgagtacttcgtcgaaatgtattacagaaacgaaacacagcacgagccttatcctttaatgcttccaggatgctccccctcatgcccgctcgagaggtttgcagagctggtcggaccagtgattcctcaagactggtccactgagtgcatgacaactaattctcaccaggggacagaggactctaccgactag

SEQ ID NO: 38356 - DNA, 1161 bp, Artificial Sequence
  derived and/or modified sequence
atgagggccgcaccccttctcctggcaagggcagcctccctgagcctggggtttctgtttctgctgtttttctggctggataggtcggttctggcaaaagagctcaagtttgtgacccttgtgttccgccacggcgaccgtagccctattgacacatttccaactgacccaataaaggaaagctcttggcctcagggcttcggccagctgacacagctggggatggagcaacattacgagctgggagagtatatcaggaagcgttatcgcaaattcctgaatgagagctataaacatgaacaggtctacattcggtctacagacgtcgaccggacactgatgtccgcaatgactaatcttgctgcgttatttccgccagaaggcgtcagcatctggaatcccatcctgttgtggcagcccattcctgtgcataccgtgcctctcagtgaagatcagctactctacctcccctttcgcaactgtccaaggttccaagagctggaaagtgagacgctgaagagcgaagagttccagaagcgcctccacccttacaaggatttcatagcaaccctcgggaaactgagtggcctgcatggccaagacttgttcggcatctggtcaaaggtgtatgaccctctgtactgcgagagtgtacataacttcacacttccaagttgggcaacggaggacacaatgacaaagctcagagaactgtctgagctatctttgttatcactgtacggcatccacaaacaaaaggagaaaagtcggctacaggggggtgtccttgtaaacgagatcctgaatcacatgaagcgtgcgacccagataccttcttacaagaagttgatcatgtactcagctcatgacacaaccgtgagcggtctccagatggcattggacgtgtataacggactgctgccaccatatgcttcatgccacttaacagaattgtactttgagaagggcgagtattttgtcgaaatgtattatcgcaacgaaacccagcacgagccttaccccctcatgctgcctggctgcagccccagttgccctttagaaaggttcgccgagctggtgggtccagtgatcccccaggactggtctactgaatgcatgacaaccaattcacatcaaggaacggaagactctactgattag

SEQ ID NO: 38357 - DNA, 3125 bp, Artificial Sequence
  derived and/or modified sequence
tcaatcccttaattaaatagcttcccctctacaggcttttgaagtggtagcagttcctcctaactcctgccagaaacagctctcctcaacatgagagctgcacccctcctcctggccagggcagcaagccttagccttggcttcttgtttctgctttttttctggctagaccgaagtgtactagccaaggagttgaagtttgtgactttggtgtttcggcatggagaccgaagtcccattgacacctttcccactgaccccataaaggaatcctcatggccacaaggatttggccaactcacccagctgggcatggagcagcattatgaacttggagagtatataagaaagagatatagaaaattcttgaatgagtcctataaacatgaacaggtttatattcgaagcacagacgttgaccggactttgatgagtgctatgacaaacctggcagccctgtttcccccagaaggtgtcagcatctggaatcctatcctactctggcagcccatcccggtgcacacagttcctctttctgaagatcagttgctatacctgcctttcaggaactgccctcgttttcaagaacttgagagtgagactttgaaatcagaggaattccagaagaggctgcacccttataaggattttatagctaccttgggaaaactttcaggattacatggccaggacctttttggaatttggagtaaagtctacgaccctttatattgtgagagtgttcacaatttcactttaccctcctgggccactgaggacaccatgactaagttgagagaattgtcagaattgtccctcctgtccctctatggaattcacaagcagaaagagaaatctaggctccaagggggtgtcctggtcaatgaaatcctcaatcacatgaagagagcaactcagataccaagctacaaaaaactcatcatgtattctgcgcatgacactactgtgagtggcctacagatggcgctagatgtttacaacggactccttcctccctatgcttcttgccacttgacggaattgtactttgagaagggggagtactttgtggagatgtactatcggaatgagacgcagcacgagccgtatcccctcatgctacctggctgcagccccagctgtcctctggagaggtttgctgagctggttggccctgtgatccctcaagactggtccacggagtgtatgaccacaaacagccatcaaggtactgaagacagtacagattagtgtgcacagagatctctgtagaaggagtagctgccctttctcagggcagatgatgctttgagaacatactttggccattacccccagctttgaggaaaatgggctttggatgattattttatgttttagggacccccaacctcaggcaattcctacctcttcacctgaccctgcccccacttgccataaaacttagctaagttttgttttgtttttcagcgttaatgtaaaggggcagcagtgccaaaatataatcagagataaagcttaggtcaaagttcatagagttcccatgaactatatgactggccacacaggatcttttgtatttaaggattctgagattttgcttgagcaggattagataaggctgttctttaaatgtctgaaatggaacagatttcaaaaaaaaaccccacaatctaggatgggaacaaggaaggaaagatgtgaataggctgatgggcaaaaaaccaatttacccatcagttccagccttctctcaaggagaggcaaagaaaggagatacagtggagacatctggaaagttttctccactggaaaactgctactatctgtttttatatttctgttaaaatatatgaggctacagaactaaaaattaaaacctctttgtgtcccttggtcctggaacatttatgttccttttaaagaaacaaaaatcaaactttacagaaagatttgatgtatgtaatacatatagcagctcttgaagtatatatatcatagcaaataagtcatctgatgagaacaagctatttgggcacaacacatcaggaaagagagcaccacgtgatggagtttctctagaagctccagtgataagagatgttgactctaaagttgatttaaggccaggcatggtggtttacgcctataatcccagcattttgggagtccgaggtgggcagatcacttgagctcaggaggtcaagatcagcctgggcaacatggtgaaacctggtctctacataaaatacaaaaacttagatgggcatggtggtgtgtgcctatagtcccactacttgtggggctaaggcaggaggatcacttgagccccggaggtcgaggctacagtgagccaagagtgcactactgtactccagccagggcaagagagcgagaccctgtctcaataaataaataaataaataaataaataaataaataaataaataaaaacaaagttgattaagaaaggaagtataggccaggcacagtggctcacacctgtaatccttgcattttggaaggctgaggcaggaggatcactttaggcctggtgtgttcaagaccagcctggtcaacatagtgagacactgtctctaccaaaaaaaggaaggaagggacacatatcaaactgaaacaaaattagaaatgtaattatgttctaagtgcctccaagttcaaaacttattggaatgttgagagtgtggttacgaaatacgttaggaggacaaaaggaatgtgtaagtctttaatgccgatatcttcagaaaacctaagcaaacttacaggtcctgctgaaactgcccactctgcaagaagaaatcatgatatagctttgccatgtggcagatctacatgtctagagaacactgtgctctattaccattatggataaagatgagatggtttctagagatggtttctactggctgccagaatctagagcaaagccatccccgctcctggttggtcacagaatgactgacaaagacatcgattgatatgcttctttgtgttatttccctcccaagtaaatgtttgtccttgggtccattttctatgcttgtaactgtcttctagcagtgagccaaatgtaaaatagtgaataaagtcattattaggaa

SEQ ID NO: 38358 - DNA, 1161 bp, Artificial Sequence
  derived and/or modified sequence
atgagagccgcccccctgctgctggccagagccgccagcctgagcctgggcttcctgttcctgctgttcttctggctggacagaagcgtgctggccaaggagctgaagttcgtgaccctggtgttcagacacggcgacagaagccccatcgacaccttccccaccgaccccatcaaggagagcagctggccccagggcttcggccagctgacccagctgggcatggagcagcactacgagctgggcgagtacatcagaaagagatacagaaagttcctgaacgagagctacaagcacgagcaggtgtacatcagaagcaccgacgtggacagaaccctgatgagcgccatgaccaacctggccgccctgttcccccccgagggcgtgagcatctggaaccccatcctgctgtggcagcccatccccgtgcacaccgtgcccctgagcgaggaccagctgctgtacctgcccttcagaaactgccccagattccaggagctggagagcgagaccctgaagagcgaggagttccagaagagactgcacccctacaaggacttcatcgccaccctgggcaagctgagcggcctgcacggccaggacctgttcggcatctggagcaaggtgtacgaccccctgtactgcgagagcgtgcacaacttcaccctgcccagctgggccaccgaggacaccatgaccaagctgagagagctgagcgagctgagcctgctgagcctgtacggcatccacaagcagaaggagaagagcagactgcagggcggcgtgctggtgaacgagatcctgaaccacatgaagagagccacccagatccccagctacaagaagctgatcatgtacagcgcccacgacaccaccgtgagcggcctgcagatggccctggacgtgtacaacggcctgctgcccccctacgccagctgccacctgaccgagctgtacttcgagaagggcgagtacttcgtggagatgtactacagaaacgagacccagcacgagccctaccccctgatgctgcccggctgcagccccagctgccccctggagagattcgccgagctggtgggccccgtgatcccccaggactggagcaccgagtgcatgaccaccaacagccaccagggcaccgaggacagcaccgactag

SEQ ID NO: 38359 - protein, 147 aa, Artificial Sequence
  derived and/or modified sequence
MVMGLGVLLLVFVLGLGLTPPTLAQDNSRYTHFLTQHYDAKPQGRDDRYCESIMRRRGLTSPCKDINTFIHGNKRSIKAICENKNGNPHRENLRISKSSFQVTTCKLHGGSPWPPCQYRATAGFRNVVVACENGLPVHLDQSIFRRP

SEQ ID NO: 38360 - DNA, 1222 bp, Artificial Sequence
  derived and/or modified sequence
gtcctgccaaagaaagcagcagcgaataagtacgtggcagatggtgctgtcgaccagtgtcaagaccaagtttcatgggttcctggacgctcagccaggggtagtctctgaagggccgcctggcaattgggagcagaagccagtttcccgccatctgctctccgtggaggcagtgctctcgcggctgctgcccgttggggtccagctgaggaaggagcgcggatcccaggctcgttctttgcctgggctgcccctgcggcccctggggcgggtgctgctgcggcgccagctccaagggcggatccaggcgggaggggcctcctcggagaagcggggcgcggtcccaactacgcagaggctggcacgccgaccctccacacctcaccacgcccccatctccgtccgtgtacacacactcacacaaggacgccaaccccacctagatgcaaagcaggattcaaaagaacatctttgcgttttctaccggctccccatcatcgtactagggaggaagaagcgggtgagaaacaaaacttctttccattgtcctgcccgtttctgcggacttgttctgaggccgaggagcctgtgttggaagagatggtgatgggcctgggcgttttgttgttggtcttcgtgctgggtctgggtctgaccccaccgaccctggctcaggataactccaggtacacacacttcctgacccagcactatgatgccaaaccacagggccgggatgacagatactgtgaaagcatcatgaggagacggggcctgacctcaccctgcaaagacatcaacacatttattcatggcaacaagcgcagcatcaaggccatctgtgaaaacaagaatggaaaccctcacagagaaaacctaagaataagcaagtcttctttccaggtcaccacttgcaagctacatggaggttccccctggcctccatgccagtaccgagccacagcggggttcagaaacgttgttgttgcttgtgaaaatggcttacctgtccacttggatcagtcaattttccgtcgtccgtaaccagcgggcccctggtcaagtgctggctctgctgtccttgccttccatttcccctctgcacccagaacagtggtggcaacattcattgccaagggcccaaagaaagagctacctggaccttttgttttctgtttgacaacatgtttaataaataaaaatgtcttgatatcagtaagaa

SEQ ID NO: 38361 - DNA, 742 bp, Artificial Sequence
  derived and/or modified sequence
tccaggttcacacaactggaacccatctccaggaacaaacagctggaacccatctcccgttgaagggaaactgccagatttttgtaagattcttcctcctgggagcctgtgttggaagagatggtgatgggcctgggcgttttgttgttggtcttcgtgctgggtctgggtctgaccccaccgaccctggctcaggataactccaggtacacacacttcctgacccagcactatgatgccaaaccacagggccgggatgacagatactgtgaaagcatcatgaggagacggggcctgacctcaccctgcaaagacatcaacacatttattcatggcaacaagcgcagcatcaaggccatctgtgaaaacaagaatggaaaccctcacagagaaaacctaagaataagcaagtcttctttccaggtcaccacttgcaagctacatggaggttccccctggcctccatgccagtaccgagccacagcggggttcagaaacgttgttgttgcttgtgaaaatggcttacctgtccacttggatcagtcaattttccgtcgtccgtaaccagcgggcccctggtcaagtgctggctctgctgtccttgccttccatttcccctctgcacccagaacagtggtggcaacattcattgccaagggcccaaagaaagagctacctggaccttttgttttctgtttgacaacatgtttaataaataaaaatgtcttgatatcagtaagaa

SEQ ID NO: 38362 - DNA, 444 bp, Artificial Sequence
  derived and/or modified sequence
atggtcatgggcctcggcgttctgttactggtctttgtactgggactaggcctgacaccaccgaccctggcccaggacaacagccggtatacacatttcctgacacagcactacgacgccaagccacaggggcgggacgatcggtattgtgagtctatcatgcggcggcgaggcctgacctcaccttgcaaggacatcaacacctttattcacggaaataagcgaagtataaaggccatctgtgagaacaagaacgggaatcctcacagagaaaaccttaggattagtaaaagttccttccaggttacaacctgtaagcttcatggaggttccccttggcctccgtgtcagtatagagctaccgccgggttccggaatgtggtcgtcgcgtgtgaaaatggattacccgtgcacctggaccaaagcatatttcgacgaccatag

SEQ ID NO: 38363 - DNA, 444 bp, Artificial Sequence
  derived and/or modified sequence
atggtgatgggtctcggagtgttattactggtgttcgtgctgggcctggggctgactcctcctaccctcgctcaggataattctcggtatacacattttttgactcagcactatgatgcaaagccacagggtcgagatgatcggtattgcgagtccatcatgagacggcgtggcctgacatccccatgcaaggacattaacactttcatccatgggaacaaacgcagcattaaggccatctgcgaaaacaaaaacggcaaccctcatagggagaacttgaggatctcaaagagttctttccaggtgacaacctgcaaactgcacgggggctctccctggccgccatgtcaatacagggcaacagccggatttaggaatgttgtggtggcctgtgagaatggactcccggtccacttggatcaatccatttttcggcgaccttag

SEQ ID NO: 38364 - DNA, 444 bp, Artificial Sequence
  derived and/or modified sequence
atggtgatgggcctgggcgtgctgctgctggtgtttgtgctgggcctgggcctgaccccacccaccctggcccaggacaacagccgctacacccacttcctgacccagcactatgatgccaagccccagggcagagatgaccgctactgtgagagcatcatgagaagaagaggcctgaccagcccctgcaaggacatcaacaccttcatccacggcaacaagaggagcatcaaggccatctgtgagaacaagaatggaaacccccaccgggagaacctgcgcatcagcaagagcagcttccaggtgaccacctgcaagctgcacggcggcagcccctggccaccctgccagtaccgggccacagctggcttcagaaatgtggtggtggcctgtgaaaatggcctgcctgtgcacctggaccagagcatcttcagaagaccctag

SEQ ID NO: 38365 - DNA, 444 bp, Artificial Sequence
  derived and/or modified sequence
atggtgatgggcctgggcgtgctgctgctggtgttcgtgctgggcctcgggctcaccccacctacactcgctcaggacaactcccgatatactcactttctgacgcagcactacgatgcaaaacctcagggcagggacgaccggtactgtgaatctattatgcgccggagagggttgacctccccctgcaaagatatcaacacgttcatccacggtaacaagcgatcaattaaagcgatatgcgagaacaagaatgggaacccccacagggagaatttgcggatttctaagtcatcgttccaagtcaccacctgcaaactgcacggtggcagtccctggcctccctgccagtacagggccaccgcagggtttaggaacgttgtagtggcttgcgagaatggcctgccggtgcatctggatcagagtatctttcgccggccctag

SEQ ID NO: 38366 - DNA, 444 bp, Artificial Sequence
  derived and/or modified sequence
atggtgatgggcctgggcgtgctgctgctggtgttcgtgctgggcctcggactaacacctccaactcttgcccaggataacagccggtatacacacttcctcactcagcattatgatgctaaaccgcagggcagggacgatagatattgtgagagcatcatgagaagacgaggtctgaccagtccatgcaaggatattaacaccttcattcacggaaacaagcggtctatcaaggcaatttgtgaaaacaagaatgggaatccgcaccgcgagaacctgagaatctccaagagcagtttccaggtgactacatgcaagctccacggtggctcaccctggcccccctgccagtaccgggccaccgccggatttcggaatgtagtggtggcttgtgaaaatgggctgcccgtgcacttagatcagagtatattccggcgaccttag

SEQ ID NO: 38367 - DNA, 444 bp, Artificial Sequence
  derived and/or modified sequence
atggtgatgggactgggagtgctgctgctcgtcttcgtcctcggactaggcctcacacctcctaccctcgcccaagacaatagtaggtacactcatttcctcacacagcattacgacgccaagccacagggccgtgatgatcgctactgtgagtccataatgaggcggagagggctgactagtccttgtaaagatatcaatacctttattcatgggaacaaacgatccataaaagctatttgcgaaaataagaatggcaatcctcatagggagaacctgcgcattagcaagagttctttccaagtcacaacttgtaaactccacgggggatccccttggccgccatgccaatatcgtgcaaccgctggctttaggaatgttgttgtggcttgtgaaaatggactcccagtccacctcgaccaaagcatcttccggagaccatag

SEQ ID NO: 38368 - DNA, 444 bp, Artificial Sequence
  derived and/or modified sequence
atggtaatgggattgggcgtgctgttgctcgtgtttgtccttgggctggggctgactccacctactttggctcaggacaatagtaggtatactcacttcttgacccagcactacgacgctaagccgcagggaagagatgaccggtattgtgaatcgatcatgcgcaggaggggacttacaagcccttgtaaggacattaacacttttatccatggaaacaagagaagcatcaaggccatctgcgagaacaagaacgggaacccacatcgagagaatttgagaatctccaaaagttcattccaagttaccacatgcaaattgcacggcggatctccctggcccccatgtcagtacagggctacagccggattcaggaacgtggtagttgcctgtgagaacggacttcctgtgcatctggatcaatccatatttaggcgaccctag

SEQ ID NO: 38369 - DNA, 444 bp, Artificial Sequence
  derived and/or modified sequence
atggtgatgggcctgggcgtgctgctgctggtgttcgtgctgggcctgggcctgaccccccccaccctggcccaggacaacagcagatacacccacttcctgacccagcactacgacgccaagccccagggcagagacgacagatactgcgagagcatcatgagaagaagaggcctgaccagcccctgcaaggacatcaacaccttcatccacggcaacaagagaagcatcaaggccatctgcgagaacaagaacggcaacccccacagagagaacctgagaatcagcaagagcagcttccaggtgaccacctgcaagctgcacggcggcagcccctggcccccctgccagtacagagccaccgccggcttcagaaacgtggtggtggcctgcgagaacggcctgcccgtgcacctggaccagagcatcttcagaagaccctag

SEQ ID NO: 38370 - protein, 381 aa, Artificial Sequence
  derived and/or modified sequence
MRSHTITMTTTSVSSWPYSSHRMRFITNHSDQPPQNFSATPNVTTCPMDEKLLSTVLTTSYSVIFIVGLVGNIIALYVFLGIHRKRNSIQIYLLNVAIADLLLIFCLPFRIMYHINQNKWTLGVILCKVVGTLFYMNMYISIILLGFISLDRYIKINRSIQQRKAITTKQSIYVCCIVWMLALGGFLTMIILTLKKGGHNSTMCFHYRDKHNAKGEAIFNFILVVMFWLIFLLIILSYIKIGKNLLRISKRRSKFPNSGKYATTARNSFIVLIIFTICFVPYHAFRFIYISSQLNVSSCYWKEIVHKTNEIMLVLSSFNSCLDPVMYFLMSSNIRKIMCQLLFRRFQGEPSRSESTSEFKPGYSLHDTSVAVKIQSSSKST

SEQ ID NO: 38371 - protein, 334 aa, Artificial Sequence
  derived and/or modified sequence
MDEKLLSTVLTTSYSVIFIVGLVGNIIALYVFLGIHRKRNSIQIYLLNVAIADLLLIFCLPFRIMYHINQNKWTLGVILCKVVGTLFYMNMYISIILLGFISLDRYIKINRSIQQRKAITTKQSIYVCCIVWMLALGGFLTMIILTLKKGGHNSTMCFHYRDKHNAKGEAIFNFILVVMFWLIFLLIILSYIKIGKNLLRISKRRSKFPNSGKYATTARNSFIVLIIFTICFVPYHAFRFIYISSQLNVSSCYWKEIVHKTNEIMLVLSSFNSCLDPVMYFLMSSNIRKIMCQLLFRRFQGEPSRSESTSEFKPGYSLHDTSVAVKIQSSSKST

SEQ ID NO: 38372 - DNA, 1815 bp, Artificial Sequence
  derived and/or modified sequence
agctgacacaaccaagacgagtctcagtgtctagggaagcttggggttctgctccttttacttcaggcgaacctgaactttaatgcaattttgaagcatgccctgaatagattcagtcattatcaagtcaaactaaaaacggtgaaaggttgcgactattaccaaatagaagacaatgagaagtcataccataacaatgacgacaacttcagtcagcagctggccttactcctcccacagaatgcgctttataaccaatcatagcgaccaaccgccacaaaacttctcagcaacaccaaatgttactacctgtcccatggatgaaaaattgctatctactgtgttaaccacatcctactctgttattttcatcgtgggactggttgggaacataatcgccctctatgtatttctgggtattcaccgtaaaagaaattccattcaaatttatctacttaacgtagccattgcagacctcctactcatcttctgcctccctttccgaataatgtatcatattaaccaaaacaagtggacactaggtgtgattctgtgcaaggttgtgggaacactgttttatatgaacatgtacattagcattattttgcttggattcatcagtttggatcgctatataaaaattaatcggtctatacagcaacggaaggcaataacaaccaaacaaagtatttatgtctgttgtatagtatggatgcttgctcttggtggattcctaactatgattattttaacacttaagaaaggagggcataattccacaatgtgtttccattacagagataagcataacgcaaaaggagaagccatttttaacttcattcttgtggtaatgttctggctaattttcttactaataatcctttcatatattaagattgggaagaatctattgaggatttctaaaaggaggtcaaaatttcctaattctggtaaatatgccactacagctcgtaactcctttattgtacttatcatttttactatatgttttgttccctatcatgcctttcgattcatctacatttcttcacagctaaatgtatcatcttgctactggaaagaaattgttcacaaaaccaatgagatcatgctggttctctcatctttcaatagttgcttagatccagtcatgtatttcctgatgtccagtaacattcgcaaaataatgtgccaacttctttttagacgatttcaaggtgaaccaagtaggagtgaaagcacttcagaatttaaaccaggatactccctgcatgatacatctgtggcagtgaaaatacagtctagttctaaaagtacttgaggtaaacatactaaaatgaattatataatgcagcctcttaattctttgaagaactaaaaaattaggaaacaaagttctagcatttacaaaactcagatctcaaagctctgcttgtatttgtgatatttcatttgcttaactgtaaaccatttcaaggtactaacttttaaatctgtatgtaaaatcttttcaaaatacatttttaagctaatactcttaacatagattatgaagttaagtgaaatttatggctctaacagcaaaataattaaagtgccatagtttctcaagtgactaaagtagttattaaaatcaagcacttgatactaatttgaagtgtgtttaaaagtaaatgatttgggaactgacaatgtgtcagaaaatatatgttcatttatcattttaaaatcttgtataatttgccactgtattcatttatgcctaaatctctataacagatgaaaagataattaataaaatcctaattaaaaaat

SEQ ID NO: 38373 - DNA, 1924 bp, Artificial Sequence
  derived and/or modified sequence
aaccaattgcaccacgaccggatggaagagcccagctgacacaaccaagacgagtctcagtgtctagggaagcttggggttctgctccttttacttcaggcgaacctgaactcagttaatgcaattttgaagcatgccctgaatagattcagtcattatcaagtcaaactaaaaacggtgaaaggttgcgactattaccaaataggaaaaatctgaagacataagaactacacatgaggaatatgtcatttagcactttcactttttgatctccacagaagacaatgagaagtcataccataacaatgacgacaacttcagtcagcagctggccttactcctcccacagaatgcgctttataaccaatcatagcgaccaaccgccacaaaacttctcagcaacaccaaatgttactacctgtcccatggatgaaaaattgctatctactgtgttaaccacatcctactctgttattttcatcgtgggactggttgggaacataatcgccctctatgtatttctgggtattcaccgtaaaagaaattccattcaaatttatctacttaacgtagccattgcagacctcctactcatcttctgcctccctttccgaataatgtatcatattaaccaaaacaagtggacactaggtgtgattctgtgcaaggttgtgggaacactgttttatatgaacatgtacattagcattattttgcttggattcatcagtttggatcgctatataaaaattaatcggtctatacagcaacggaaggcaataacaaccaaacaaagtatttatgtctgttgtatagtatggatgcttgctcttggtggattcctaactatgattattttaacacttaagaaaggagggcataattccacaatgtgtttccattacagagataagcataacgcaaaaggagaagccatttttaacttcattcttgtggtaatgttctggctaattttcttactaataatcctttcatatattaagattgggaagaatctattgaggatttctaaaaggaggtcaaaatttcctaattctggtaaatatgccactacagctcgtaactcctttattgtacttatcatttttactatatgttttgttccctatcatgcctttcgattcatctacatttcttcacagctaaatgtatcatcttgctactggaaagaaattgttcacaaaaccaatgagatcatgctggttctctcatctttcaatagttgcttagatccagtcatgtatttcctgatgtccagtaacattcgcaaaataatgtgccaacttctttttagacgatttcaaggtgaaccaagtaggagtgaaagcacttcagaatttaaaccaggatactccctgcatgatacatctgtggcagtgaaaatacagtctagttctaaaagtacttgaggtaaacatactaaaatgaattatataatgcagcctcttaattctttgaagaactaaaaaattaggaaacaaagttctagcatttacaaaactcagatctcaaagctctgcttgtatttgtgatatttcatttgcttaactgtaaaccatttcaaggtactaacttttaaatctgtatgtaaaatcttttcaaaatacatttttaagctaatactcttaacatagattatgaagttaagtgaaatttatggctctaacagcaaaataattaaagtgccatagtttctcaagtgactaaagtagttattaaaatcaagcacttgatactaatttgaagtgtgtttaaaagtaaatgatttgggaactgacaatgtgtcagaaaatatatgttcatttatcattttaaaatcttgtataatttgccactgtattcatttatgcctaaatctctataacagatgaaaagataattaataaaatcctaattaaaaaat

SEQ ID NO: 38374 - DNA, 1282 bp, Artificial Sequence
  derived and/or modified sequence
ggttctgctccttttacttcaggcgaacctgaactcagttaatgcaattttgaagcatgccctgaatagattcagtcattatcaagtcaaactaaaaacggtgaaaggttgcgactattaccaaataggaaaaatctgaagacataagaactacacatgaggaatatgtcatttagcactttcactttttgatctccacagaagacaatgagaagtcataccataacaatgacgacaacttcagtcagcagcaacaccaaatgttactacctgtcccatggatgaaaaattgctatctactgtgttaaccacatcctactctgttattttcatcgtgggactggttgggaacataatcgccctctatgtatttctgggtattcaccgtaaaagaaattccattcaaatttatctacttaacgtagccattgcagacctcctactcatcttctgcctccctttccgaataatgtatcatattaaccaaaacaagtggacactaggtgtgattctgtgcaaggttgtgggaacactgttttatatgaacatgtacattagcattattttgcttggattcatcagtttggatcgctatataaaaattaatcggtctatacagcaacggaaggcaataacaaccaaacaaagtatttatgtctgttgtatagtatggatgcttgctcttggtggattcctaactatgattattttaacacttaagaaaggagggcataattccacaatgtgtttccattacagagataagcataacgcaaaaggagaagccatttttaacttcattcttgtggtaatgttctggctaattttcttactaataatcctttcatatattaagattgggaagaatctattgaggatttctaaaaggaggtcaaaatttcctaattctggtaaatatgccactacagctcgtaactcctttattgtacttatcatttttactatatgttttgttccctatcatgcctttcgattcatctacatttcttcacagctaaatgtatcatcttgctactggaaagaaattgttcacaaaaccaatgagatcatgctggttctctcatctttcaatagttgcttagatccagtcatgtatttcctgatgtccagtaacattcgcaaaataatgtgccaacttctttttagacgatttcaaggtgaaccaagtaggagtgaaagcacttcagaatttaaaccaggatactccctgcatgatacatctgtggcagtgaaaatacagtctagttctaaaagtacttga

SEQ ID NO: 38375 - DNA, 1146 bp, Artificial Sequence
  derived and/or modified sequence
atgagatcgcacaccatcaccatgaccacaacaagcgttagctcatggccctattcatcccaccgcatgaggtttattactaatcacagcgaccagcccccacaaaacttctcagccactccaaacgtgacgacgtgtcctatggatgagaaactcctctcgactgtgctgacgacatcgtacagcgtcatctttattgtagggctagtgggcaacatcatcgccctgtacgtctttctcgggatccacagaaaacgcaattcaatacaaatctatctgctgaatgtagccatcgccgatcttctgttgatattttgtctgccctttcgaatcatgtatcacatcaaccagaacaaatggactcttggagtcatactctgtaaggtcgtcgggaccttattttacatgaatatgtacatctcaattattctgctgggttttattagcctcgataggtacattaagataaatcgctctatccagcaaagaaaagccataacaaccaagcagtccatttacgtgtgctgtatcgtgtggatgctggccctgggcggcttcttgaccatgatcatcctcacgctgaagaaaggagggcacaactctacgatgtgctttcactatcgcgataagcacaacgcaaaaggagaagccatttttaatttcatactggtcgtcatgttctggctcatttttctcctgatcatcctatcatatattaagattgggaaaaacctgctcagaatctctaaacgtaggagcaagtttcctaattcggggaaatacgctacaacagctcgcaattccttcatcgtcttaatcattttcacaatatgtttcgtcccttaccatgcattcaggttcatatatatctcgtctcagctgaatgtgtcctcttgctactggaaagaaatagttcacaagaccaatgaaattatgctggtcctctctagcttcaatagctgtctcgatcctgtgatgtatttcctaatgtcctcaaacattaggaagattatgtgccagctgttgtttagacgcttccagggcgaaccttctcgttcagagtctacctcggaattcaagccaggctactctctccatgacaccagcgtcgccgtaaagatccaaagttcgtccaaatccacttag

SEQ ID NO: 38376 - DNA, 1146 bp, Artificial Sequence
  derived and/or modified sequence
atgagaagccacaccatcacaatgactaccacctccgtgagctcatggccctacagcagtcatagaatgaggtttattactaatcactctgaccagcctccccaaaacttctccgccacccctaatgtaaccacatgcccgatggatgaaaaacttctgtctaccgtattaacaacatcttattccgtcatcttcatcgtcggcctcgtcgggaacatcatcgcactgtatgtatttcttggtattcatagaaaacgcaattccatccagatatacctgctcaacgttgctatcgctgatctcttgctcattttttgtctcccctttagaattatgtaccatatcaaccaaaataaatggacactcggagtaattctgtgcaaggttgtgggaaccttgttctacatgaacatgtatatctccatcattctcctgggcttcatatccttggaccgctacatcaaaattaaccgaagtatacagcagcgaaaggcaatcaccactaaacagtcaatctacgtgtgctgtatcgtatggatgttagccctgggaggatttctgactatgataatcttgaccctgaagaaagggggccataattcgaccatgtgcttccattacagggacaaacataacgcaaaaggagaggcaatatttaactttattcttgttgttatgttttggctcatattcctcctaattatccttagctacataaagatcggcaagaatctgctccggatcagcaagcgtcgctcgaagttccctaactcggggaaatatgccaccaccgcaaggaactcatttattgttttgattattttcaccatctgcttcgtaccttaccacgcgttcaggtttatttacatttccagtcagctcaacgtgagctcttgctactggaaggaaatagtgcacaaaacaaacgaaatcatgcttgtcttatctagctttaactcttgcctggatcccgtcatgtatttcttaatgtcgtcgaacatccgtaagatcatgtgtcagcttcttttccgtcgcttccagggcgagcccagtcgatctgagagcacttccgagtttaagcctgggtacagcctgcatgatacctctgtcgcggtcaaaattcagtcatcatcaaaatctacctag

SEQ ID NO: 38377 - DNA, 1005 bp, Artificial Sequence
  derived and/or modified sequence
atggatgagaaattgctgtccacagttctcacaactagctacagcgtgatattcatcgttggccttgtgggaaacatcatcgccttatatgtgttcctgggcatacatcggaagcgcaactccattcagatttacctgttgaacgttgctatcgcggatttactgcttattttttgcctccctttccgcattatgtaccacatcaatcaaaacaaatggacgttgggggtcatcctgtgtaaagtggtaggaactctattctatatgaatatgtacatctctattattctcttgggctttatttcacttgaccgctacatcaagattaaccgttctatccagcagcgcaaggcaatcactacaaagcagtccatctacgtatgttgtatcgtttggatgctggctctcggtggtttcctcacgatgattatactcactcttaagaaaggcggacataatagtacaatgtgtttccattacagagacaaacataacgcaaaaggagaggcaatctttaacttcattttggtcgtcatgttctggcttatatttctcctgatcatcctgagctacatcaagatcggcaaaaacctccttcgcattagcaagcggcgcagtaagtttcccaactcaggcaaatatgccaccaccgcccgtaactcctttattgtgctaattatttttactatttgtttcgtgccttaccatgcgtttagatttatctacatcagctcccaactcaacgtgtcctcttgctattggaaggagatcgtccataagactaatgaaatcatgttagtgctatcttctttcaatagctgccttgatccggtaatgtatttcctgatgtctagcaacatccgtaagatcatgtgccaacttttgtttcgccgatttcagggcgagccatcacggagcgagagtacaagcgagttcaagccggggtatagcctccatgacacatccgtggctgtgaaaattcagtcatctagcaaaagtacttag

SEQ ID NO: 38378 - DNA, 1146 bp, Artificial Sequence
  derived and/or modified sequence
atgaggagccacaccatcaccatgaccaccacctctgtgtcctcctggccctacagcagccacaggatgaggttcatcaccaaccacagcgaccagcccccccagaacttcagcgccacccccaacgtgaccacctgccccatggatgagaagctgctgagcacagtgctgaccaccagctacagcgtcatcttcatcgtgggcctggtgggcaacatcatcgccctgtatgtgttcctgggcatccacaggaagaggaacagcatccagatctacctgctgaatgtggccatcgctgacctgctgctgatcttctgcctgcccttccgcatcatgtaccacatcaaccagaacaagtggaccctgggcgtcatcctgtgcaaggtggtgggcaccctcttctacatgaacatgtacatcagcatcatcctgctgggcttcatcagcctggaccgctacatcaagatcaacagaagcatccagcagaggaaggccatcaccaccaagcagagcatctacgtgtgctgcatcgtgtggatgctggccctgggcggcttcctgaccatgatcatcctgaccctgaagaagggcggccacaacagcaccatgtgcttccactacagagacaagcacaatgccaagggggaggccatcttcaacttcatcctggtggtgatgttctggctgatcttcctgctgatcatcctgagctacatcaagattggcaagaacctgctgcgcatcagcaagagaagaagcaagttccccaacagcggcaagtatgccaccacagccaggaacagcttcatcgtgctgatcatcttcaccatctgctttgtgccctaccacgccttccgcttcatctacatcagcagccagctgaatgtgagcagctgctactggaaggagatcgtgcacaagaccaatgagatcatgctggtgctgagcagcttcaacagctgcctggaccctgtgatgtacttcctgatgagcagcaacatcaggaagatcatgtgccagctgctcttccgccgcttccagggcgagcccagccgctctgagagcaccagcgagttcaagccaggctacagcctgcatgacacctctgtggccgtgaagatccagagcagcagcaagagcacctag

SEQ ID NO: 38379 - DNA, 1005 bp, Artificial Sequence
  derived and/or modified sequence
atggatgagaagctgctgagcacagtgctgaccaccagctacagcgtcatcttcatcgtgggcctggtgggcaacatcatcgccctgtatgtgttcctgggcatccacaggaagagaaattccatccagatctacctgctgaatgtggccatcgctgacctgctgctgatcttctgcctgcccttccgcatcatgtaccacatcaaccagaacaagtggaccctgggcgtcatcctgtgcaaggtggtgggcaccctcttctacatgaacatgtacatcagcatcatcctgctgggcttcatcagcctggaccgctacatcaagatcaacagaagcatccagcagaggaaggccatcaccaccaagcagagcatctacgtgtgctgcatcgtgtggatgctggccctgggcggcttcctgaccatgatcatcctgaccctgaagaagggcggccacaacagcaccatgtgcttccactacagagacaagcacaatgccaagggggaggccatcttcaacttcatcctggtggtgatgttctggctgatcttcctgctgatcatcctgagctacatcaagattggcaagaacctgctgcgcatcagcaagaggaggagcaagttccccaacagcggcaagtatgccaccacagccagaaattccttcatcgtgctgatcatcttcaccatctgctttgtgccctaccacgccttccgcttcatctacatcagcagccagctgaatgtgagcagctgctactggaaggagatcgtgcacaagaccaatgagatcatgctggtgctgagcagcttcaacagctgcctggaccctgtgatgtacttcctgatgagcagcaacatcaggaagatcatgtgccagctgctcttccgccgcttccagggcgagcccagccgctctgagagcaccagcgagttcaagccaggctacagcctgcatgacacctctgtggccgtgaagatccagagcagcagcaagagcacctag

SEQ ID NO: 38380 - DNA, 1146 bp, Artificial Sequence
  derived and/or modified sequence
atgcggagccacaccatcaccatgaccaccaccagcgtgagcagctggccatacagtagccatcgcatgagattcataaccaaccattctgatcagccacctcaaaatttcagcgcaacacctaatgtgaccacctgtcccatggacgaaaaacttctctctacagtgctgaccacctcttatagcgtcatatttatcgttgggctcgtgggtaatatcattgctctctacgtgtttcttgggatacaccgcaagaggaattctattcagatttacctgcttaacgtcgccatagctgaccttctgctgatcttctgtttgcctttccgaatcatgtatcacatcaatcaaaacaaatggacactaggggttatcttgtgtaaggtggttgggacactgttctacatgaacatgtatatttccatcatcttgctggggttcattagcctggaccgctacattaagatcaaccgctcaatccagcagcgtaaggccataacaacgaaacagtccatttatgtctgctgtattgtttggatgctggctctgggcggattccttacaatgattatactaacgctcaagaagggaggacataattccacgatgtgcttccattaccgggataagcataatgccaaaggcgaagccatatttaacttcatactcgttgtgatgttttggctcatctttcttctgattatcctgtcttatataaagattggaaaaaacctgctgagaatctcgaagcgaaggtcgaaatttcccaactccgggaagtacgccactaccgcacggaactcatttatcgttcttattatctttacgatatgctttgtgccgtaccatgcctttcgcttcatctacatatcatcccagctgaacgtctcttcttgttactggaaggagatcgtgcacaagactaatgaaatcatgctagtgctctcgagcttcaatagttgccttgatcctgtgatgtactttctcatgtcctctaatatacggaaaattatgtgccaactactctttagacgctttcagggcgaaccttcaaggtcagagtctacttctgagtttaaaccaggatattccctgcatgacacgtccgtcgccgtgaagatccagtcttcctcaaagtctacctag

SEQ ID NO: 38381 - DNA, 1146 bp, Artificial Sequence
  derived and/or modified sequence
atgcggagccacaccatcaccatgaccaccaccagcgtgagcagctggccctactcctctcatagaatgaggttcattaccaatcatagcgaccagcccccccagaattttagtgccaccccaaatgtaacaacatgcccaatggacgagaaattgctgtcaaccgttctgactacctcctatagcgtcatctttatcgttgggctcgttggcaacattattgcattgtatgtttttctgggcatacatcggaaaaggaattccattcaaatttacctgcttaacgtcgctatcgcagatctgttgctgatattctgccttcctttccggattatgtaccacataaaccagaataaatggacactaggggttatattgtgtaaggtagttgggactctgttctacatgaacatgtacatctccattattctgctgggattcattagcctggacaggtacataaagattaatagatcaatccagcagcggaaagcaatcacaacaaagcagtctatatacgtgtgctgcatcgtttggatgctcgcccttgggggatttttgacaatgataatcttgacgctgaaaaaaggagggcataattcaaccatgtgctttcactatcgggataaacacaatgctaagggagaggcaatctttaattttatccttgtcgtgatgttctggctgatctttctgttgattattctgagctatattaaaatagggaaaaatttgctgaggataagtaagaggagaagcaagttcccaaatagtggaaagtatgctacaaccgcaaggaattccttcatcgtgcttattatctttacaatctgcttcgtgccctatcacgcgtttcgctttatttacatctcatctcagttgaatgtctcttcctgctactggaaagaaattgttcacaagactaacgagatcatgttagtgctgagcagcttcaacagctgcctggatcccgtcatgtactttttgatgtcctcaaacattagaaaaatcatgtgccagctgctgtttaggcgattccaaggtgaacccagccggtcggagagcacgtctgagttcaagccaggatatagcctgcacgacaccagcgtggcggtgaagattcagtcgagtagcaagagcacctag

SEQ ID NO: 38382 - DNA, 1005 bp, Artificial Sequence
  derived and/or modified sequence
atggacgagaagctgctgagcaccgtgctgaccaccagctacagcgtcatcttcatagtaggcctggtgggtaacatcatcgcactgtacgtttttttaggcatccaccggaagaggaatagtattcaaatctacctgctgaatgtggccatagccgacttactgcttattttctgcctgcctttcagaatcatgtaccacataaatcagaataaatggacattaggtgtgatcctttgcaaggttgtgggcactctattctacatgaatatgtacatttccatcattctgttaggcttcattagtctcgaccgatacatcaagataaaccggtccattcaacagcgcaaggctattacaacgaaacagtccatctatgtgtgttgcattgtgtggatgctggccctgggaggattcctgacaatgattatactcaccctcaaaaaggggggtcataatagcacaatgtgctttcactatagggataagcataacgccaagggagaggccatatttaactttattttagtggtaatgttctggctgatttttttactaatcatattgtcttacataaagattgggaagaacctcctgagaatctcaaagcgaaggagcaagttcccaaacagcggcaaatatgccaccacagcacgcaatagctttatcgttttaataatatttaccatatgtttcgtgccctatcacgcctttaggttcatttacatctccagtcagttgaatgtcagttcatgctactggaaggaaatcgtacacaaaacaaacgaaatcatgctcgttttaagctcatttaatagctgccttgatcccgtgatgtattttcttatgagtagcaatataaggaagattatgtgccagttactgttcaggaggttccaaggggaaccaagccgatcggagtccacatctgaatttaagccaggttacagtctccatgacacctctgtggcagtgaagattcaatcatcttcgaagtctacctag

SEQ ID NO: 38383 - DNA, 1146 bp, Artificial Sequence
  derived and/or modified sequence
atgaggtcacacaccatcactatgactacgaccagtgtcagttcttggccctactcgtctcaccgtatgaggttcattacaaaccattccgaccaaccccctcagaacttcagcgcaacaccaaacgtaacgacttgtcctatggacgagaagctcctctcaaccgtcctgactacatcctactctgtgatctttatcgtcggacttgtggggaacattattgccttgtacgtgtttctgggtattcataggaaacgtaattctatccaaatctatctgctcaatgtcgctattgccgacctgctcctcatcttttgcctgccgtttcggataatgtaccacattaaccaaaataagtggacgttgggcgtcatactgtgtaaagtagtaggtacacttttctacatgaacatgtacattagtatcatcctccttggtttcatctctctagataggtacatcaagatcaaccgctcaatccagcaacggaaagccatcacaacaaagcagtctatatacgtctgctgcatcgtttggatgctcgccctcggcggtttcctgacaatgatcattcttaccctgaagaagggagggcacaattcaaccatgtgctttcactaccgggacaagcataacgccaagggcgaggcaattttcaattttatcctcgttgtaatgttctggctgatctttctgctaataattctatcgtacattaagatcgggaagaacctcctccggatttccaagaggcgctcaaaatttcctaattccgggaaatacgccacaactgctaggaatagtttcatcgtgcttatcattttcactatttgttttgtgccttatcacgcttttcggttcatttacataagcagccagctgaatgtgtcaagctgctattggaaggaaatcgtccacaagacaaatgaaatcatgctggttttaagctccttcaattcctgtttggaccccgttatgtatttcctgatgtcatctaatatcaggaagataatgtgccagcttctcttcaggcgatttcagggcgagccaagcaggagtgagagcactagcgagtttaagccgggatacagcctccatgacactagcgtggccgtgaagattcagtccagctctaagtccacttag

SEQ ID NO: 38384 - DNA, 1146 bp, Artificial Sequence
  derived and/or modified sequence
atgaggagccataccattactatgaccaccacctccgtgagctcctggccttactcttcccatagaatgcgcttcataactaatcactcagatcagccaccccagaatttctctgcgacccctaatgtgacgacctgtcctatggatgaaaagttgttgtcaaccgtgctcactacttcatatagtgtcatttttattgtcggattggtcggaaatataatagccttgtacgtttttctgggtatacaccgaaagaggaactccattcagatttatctgctgaacgtggctatcgctgacctgctgttgatcttttgtctgcccttccgaatcatgtaccatatcaatcaaaacaaatggaccctgggcgtgattctttgtaaagtggtgggcactctgttttacatgaacatgtatatttccatcatcctgctggggtttatcagtcttgacagatacatcaagatcaacagaagtatccagcagcggaaggccatcaccacaaagcaatccatctatgtgtgttgcatcgtttggatgctagccttagggggattcctgaccatgataatattaacactaaaaaaggggggacacaactctacaatgtgctttcactatagagacaaacacaacgctaagggagaagcgatattcaatttcatcctcgtggttatgttttggctgatcttcctgctaattatactgagttacatcaaaattggaaagaatctgctgcgcatctctaaacggagaagcaaatttcccaattctggtaagtatgcaaccacagccaggaactccttcatcgttttaattatttttaccatctgtttcgtcccttatcacgcatttcgatttatttacatcagttcccagctgaacgtgagctcatgctactggaaggagatcgtacataagaccaacgaaataatgctggtgcttagcagctttaattcctgccttgaccccgtgatgtattttctgatgtccagcaacattaggaaaatcatgtgtcagttgttatttcgcaggttccagggagaaccttcaagatccgagagcacctccgagtttaagccgggttactccctgcatgatactagcgtggctgttaagattcaaagctcctccaagtctacttag

SEQ ID NO: 38385 - DNA, 1005 bp, Artificial Sequence
  derived and/or modified sequence
atggatgaaaagctcctgtccacagtgctgacaacgagctatagcgtgatcttcatagttgggctcgtgggcaacatcatcgcgttatatgtattcctcggtattcataggaaacgcaattcaattcagatatacctcctgaatgtggctatcgcagatttgctgttgatcttttgtttaccttttcgaatcatgtatcacatcaaccaaaataagtggaccttgggagtcatcctgtgtaaagttgttggtactcttttctacatgaatatgtacattagcatcattctgctgggcttcatcagcctggacaggtatatcaagatcaaccggtctatacagcagcgtaaggctattaccaccaagcagtccatctacgtttgctgcatcgtgtggatgctcgccctgggcggattcctcactatgatcattctgacccttaagaaggggggtcacaactcaaccatgtgcttccattacagagataagcataacgccaaaggcgaagctattttcaactttatcctggtggttatgttctggttaatctttctgctcatcattctgagctatatcaagatcggaaaaaacctgctccgcatttcaaagagaagaagcaaatttccgaatagcgggaaatacgccactacggctcgaaacagtttcatcgtcctgatcatcttcactatatgttttgtgccttaccacgcgtttagatttatatacatatcttcacaattgaacgtcagctcttgctattggaaagagatagtacacaagacgaatgagatcatgctagtcctttcttcttttaacagttgcctagatccagtaatgtattttctcatgagcagcaatatacgcaaaattatgtgccaactcctctttaggcggttccagggtgaaccatcaagaagtgaatccacatcagaattcaaacctggctactcgctgcacgatacatcggtcgctgtgaaaatacagtcatcaagcaagagcacctag

SEQ ID NO: 38386 - DNA, 1146 bp, Artificial Sequence
  derived and/or modified sequence
atgagaagccacaccatcaccatgaccaccaccagcgtgagcagctggccctacagcagccacagaatgagattcatcaccaaccacagcgaccagcccccccagaacttcagcgccacccccaacgtgaccacctgccccatggacgagaagctgctgagcaccgtgctgaccaccagctacagcgtgatcttcatcgtgggcctggtgggcaacatcatcgccctgtacgtgttcctgggcatccacagaaagagaaacagcatccagatctacctgctgaacgtggccatcgccgacctgctgctgatcttctgcctgcccttcagaatcatgtaccacatcaaccagaacaagtggaccctgggcgtgatcctgtgcaaggtggtgggcaccctgttctacatgaacatgtacatcagcatcatcctgctgggcttcatcagcctggacagatacatcaagatcaacagaagcatccagcagagaaaggccatcaccaccaagcagagcatctacgtgtgctgcatcgtgtggatgctggccctgggcggcttcctgaccatgatcatcctgaccctgaagaagggcggccacaacagcaccatgtgcttccactacagagacaagcacaacgccaagggcgaggccatcttcaacttcatcctggtggtgatgttctggctgatcttcctgctgatcatcctgagctacatcaagatcggcaagaacctgctgagaatcagcaagagaagaagcaagttccccaacagcggcaagtacgccaccaccgccagaaacagcttcatcgtgctgatcatcttcaccatctgcttcgtgccctaccacgccttcagattcatctacatcagcagccagctgaacgtgagcagctgctactggaaggagatcgtgcacaagaccaacgagatcatgctggtgctgagcagcttcaacagctgcctggaccccgtgatgtacttcctgatgagcagcaacatcagaaagatcatgtgccagctgctgttcagaagattccagggcgagcccagcagaagcgagagcaccagcgagttcaagcccggctacagcctgcacgacaccagcgtggccgtgaagatccagagcagcagcaagagcacctag

SEQ ID NO: 38387 - DNA, 1005 bp, Artificial Sequence
  derived and/or modified sequence
atggacgagaagctgctgagcaccgtgctgaccaccagctacagcgtgatcttcatcgtgggcctggtgggcaacatcatcgccctgtacgtgttcctgggcatccacagaaagagaaacagcatccagatctacctgctgaacgtggccatcgccgacctgctgctgatcttctgcctgcccttcagaatcatgtaccacatcaaccagaacaagtggaccctgggcgtgatcctgtgcaaggtggtgggcaccctgttctacatgaacatgtacatcagcatcatcctgctgggcttcatcagcctggacagatacatcaagatcaacagaagcatccagcagagaaaggccatcaccaccaagcagagcatctacgtgtgctgcatcgtgtggatgctggccctgggcggcttcctgaccatgatcatcctgaccctgaagaagggcggccacaacagcaccatgtgcttccactacagagacaagcacaacgccaagggcgaggccatcttcaacttcatcctggtggtgatgttctggctgatcttcctgctgatcatcctgagctacatcaagatcggcaagaacctgctgagaatcagcaagagaagaagcaagttccccaacagcggcaagtacgccaccaccgccagaaacagcttcatcgtgctgatcatcttcaccatctgcttcgtgccctaccacgccttcagattcatctacatcagcagccagctgaacgtgagcagctgctactggaaggagatcgtgcacaagaccaacgagatcatgctggtgctgagcagcttcaacagctgcctggaccccgtgatgtacttcctgatgagcagcaacatcagaaagatcatgtgccagctgctgttcagaagattccagggcgagcccagcagaagcgagagcaccagcgagttcaagcccggctacagcctgcacgacaccagcgtggccgtgaagatccagagcagcagcaagagcacctag

SEQ ID NO: 38388 - protein, 169 aa, Artificial Sequence
  derived and/or modified sequence
MSSYQQKQTFTPPPQLQQQQVKQPSQPPPQEIFVPTTKEPCHSKVPQPGNTKIPEPGCTKVPEPGCTKVPEPGCTKVPEPGCTKVPEPGCTKVPEPGCTKVPEPGYTKVPEPGSIKVPDQGFIKFPEPGAIKVPEQGYTKVPVPGYTKLPEPCPSTVTPGPAQQKTKQK

SEQ ID NO: 38389 - protein, 159 aa, Artificial Sequence [sequence omitted]

SEQ ID NO: 38390 - protein, 161 aa, Artificial Sequence
  derived and/or modified sequence
MSSYQQKQTFTPPPQLQQQQVKQPSQPPPQEIFVPTTKEPCHSKVPQPGNTKIPEPGCTKVPEPGCTKVPEPGCTKVPEPGCTKVPEPGCTKVPEPGYTKVPEPGSIKVPDQGFIKFPEPGAIKVPEQGYTKVPVPGYTKLPEPCPSTVTPGPAQQKTKQK

SEQ ID NO: 38391 - DNA, 510 bp, Artificial Sequence
  derived and/or modified sequence
atgtcgagctatcagcagaaacaaacattcacccctccacctcaattgcagcagcagcaggttaagcagcccagtcagcctccaccacaggaaatctttgtgcccaccacgaaggaaccgtgccactcaaaggtgcctcagcctgggaatacgaaaattcccgaacctgggtgcaccaaggttccagaaccaggctgtacgaaagtgccggagcctggctgtaccaaagtccccgagccaggttgtacaaaggttccagagccgggctgtacaaaggtgcctgaaccaggctgcaccaaagtgcctgagcctgggtacacaaaagtccccgagcccgggtctattaaggtgcctgatcagggttttattaagtttcctgaaccaggtgctataaaagtgcccgagcagggttacaccaaagttcctgttcccggatataccaagttaccagaaccatgccctagtactgtgaccccgggtccggctcagcagaagaccaaacagaaatag

SEQ ID NO: 38392 - DNA, 510 bp, Artificial Sequence
  derived and/or modified sequence
atgagttcataccaacagaaacaaacttttacccctcccccccagcttcagcagcagcaggtgaagcagccctcccagccacccccacaggagatcttcgtcccgacaactaaagagccctgtcattcaaaggtcccccagccaggcaacacaaagatcccagaaccaggttgcacaaaggttcctgaacctggctgtactaaggtcccagagcctggatgcaccaaggtgcctgagccagggtgcactaaagtgccagaaccgggatgcaccaaggtcccggagcccggctgtactaaggtgcctgaaccgggctacacaaaggtgcccgagccaggatccattaaagtacccgatcagggatttatcaaatttccagagccaggagcgatcaaagtccctgaacagggctacacgaaggtccctgtcccagggtataccaaactgccagaaccatgtcctagcaccgtgacacccggcccagcccaacagaagacaaagcagaaatag

SEQ ID NO: 38393 - DNA, 480 bp, Artificial Sequence
  derived and/or modified sequence
atgagtagttaccaacaaaaacagacctttacaccacccccacaactacagcagcagcaagtgaaacagccctcacaacccccaccacaggagatattcgttcccacaacaaaagaaccttgccattctaaggttccacagcccgggaacacaaaaatccccgagcccggatgcacaaaagtgccagaaccaggctgcaccaaggtacccgaacctggctgcaccaaagtgccagagccagggtgcactaaggtccccgaacctggctgcaccaaagtgcccgagccagggtgtactaaagttcccgaacccgggtatactaaagtcccggagcctggctccataaaggtccccgatcagggtttcatcaagtttcccgaacccggagctatcaaagtgccggaacagggctatacaaaagtgcctgtaccaggctacaccaagttacccgagccatgtccctccacagtgaccccctag

SEQ ID NO: 38394 - DNA, 486 bp, Artificial Sequence
  derived and/or modified sequence
atgagctcctatcaacagaagcaaactttcactcctcccccccagctgcagcagcaacaagttaaacagccaagtcagccgccgcctcaggagatattcgtgccgaccactaaggagccatgccacagcaaagtcccgcagcctggaaacacgaaaatacccgagccgggctgcacaaaagtaccggaacctggatgcactaaagtgcctgagccgggctgtaccaaggtgcctgagccgggatgtaccaaggtgcccgagccagggtgcaccaaggtgcccgaacccggctacaccaaggttccggaaccagggagcattaaagtcccggaccaggggttcattaagttccccgagcctggtgcgattaaggtgccagaacagggttacacaaaagttcctgtgccaggctatacaaagttaccagaaccctgtcccagcaccgtgactcccggcccggcccaacaaaagacgaagcagaagtag

SEQ ID NO: 38395 - DNA, 510 bp, Artificial Sequence
  derived and/or modified sequence
atgagcagctaccagcagaagcagaccttcaccccaccaccccagctgcagcagcagcaggtgaagcagcccagccagcccccaccccaggagatctttgtgcccaccaccaaggagccctgccacagcaaggtgccccagcccggcaacaccaagatccctgagcccggctgcaccaaggtgcctgagcccggctgcaccaaggtgcctgagcccggctgcaccaaggtgcctgagcccggctgcaccaaggtgcctgagcccggctgcaccaaggtgcctgagcccggctgcaccaaggtgcctgagcccggctacaccaaggtgcctgagcccggcagcatcaaggtgcctgaccagggcttcatcaagtttcctgagcccggggccatcaaggtgcctgagcagggctacaccaaggtgcctgtgcccggctacaccaagctgcctgagccctgccccagcacagtgaccccaggccctgcccagcagaagaccaagcagaagtag

SEQ ID NO: 38396 - DNA, 480 bp, Artificial Sequence
  derived and/or modified sequence
atgagcagctaccagcagaagcagaccttcaccccaccaccccagctgcagcagcagcaggtgaagcagcccagccagcccccaccccaggagatctttgtgcccaccaccaaggagccctgccacagcaaggtgccccagcccggcaacaccaagatccctgagcccggctgcaccaaggtgcctgagcccggctgcaccaaggtgcctgagcccggctgcaccaaggtgcctgagcccggctgcaccaaggtgcctgagcccggctgcaccaaggtgcctgagcccggctgcaccaaggtgcctgagcccggctacaccaaggtgcctgagcccggcagcatcaaggtgcctgaccagggcttcatcaagtttcctgagcccggggccatcaaggtgcctgagcagggctacaccaaggtgcctgtgcccggctacaccaagctgcctgagccctgccccagcacagtgaccccctag

SEQ ID NO: 38397 - DNA, 486 bp, Artificial Sequence
  derived and/or modified sequence
atgagcagctaccagcagaagcagaccttcaccccaccaccccagctgcagcagcagcaggtgaagcagcccagccagcccccaccccaggagatctttgtgcccaccaccaaggagccctgccacagcaaggtgccccagcccggcaacaccaagatccctgagcccggctgcaccaaggtgcctgagcccggctgcaccaaggtgcctgagcccggctgcaccaaggtgcctgagcccggctgcaccaaggtgcctgagcccggctgcaccaaggtgcctgagcccggctacaccaaggtgcctgagcccggcagcatcaaggtgcctgaccagggcttcatcaagtttcctgagcccggggccatcaaggtgcctgagcagggctacaccaaggtgcctgtgcccggctacaccaagctgcctgagccctgccccagcacagtgaccccaggccctgcccagcagaagaccaagcagaagtag

SEQ ID NO: 38398 - DNA, 510 bp, Artificial Sequence
  derived and/or modified sequence
atgagcagctaccagcagaagcagaccttcaccccccccccccagctgcagcagcagcaagtaaaacagccctctcaacctccgccacaggagattttcgttcctaccaccaaggaaccctgccatagcaaagtccctcagccagggaacacaaaaatcccggagccaggctgtacaaaggtacccgagcctggttgtactaaggtccctgagccaggatgtaccaaggtccctgagcccgggtgtacaaaggtgccggagcctggatgcaccaaagttcccgagcccggctgcacgaaggtgcctgaaccaggctacactaaggtccctgagccagggagcatcaaggtgcccgaccagggcttcattaagttccctgagcccggcgctatcaaggtcccagagcagggctataccaaggtgcctgttcctggctatacgaagctccctgagccttgccctagcaccgtaacccccggccccgcccagcagaagaccaagcagaagtag

SEQ ID NO: 38399 - DNA, 510 bp, Artificial Sequence
  derived and/or modified sequence
atgagcagctaccagcagaagcagaccttcaccccccccccccagctgcagcaacagcaagtgaagcagccctctcaaccaccgccacaggaaatattcgtccctacgactaaggagccatgtcacagcaaagtgccacagccgggaaacactaagatcccggaaccaggctgtaccaaggttccggaacctggttgtactaaagtgcctgagcccggctgtacgaaagtcccagagccagggtgtacaaaggtgccagagcccgggtgcactaaggttccagagcctggctgtacaaaggtaccagagcccggatataccaaagtccctgagccaggctcaataaaggttccagaccaggggtttattaagttcccggagcccggtgcaatcaaggtgccggagcagggctatacaaaggtccccgttcctggatacacgaaactcccggaaccatgtccttcgactgtgacccctgggcccgcccagcagaaaacaaagcagaaatag

SEQ ID NO: 38400 - DNA, 480 bp, Artificial Sequence
  derived and/or modified sequence
atgagcagctaccagcagaagcagaccttcaccccccccccccagctccaacaacagcaggtgaagcaaccctcccagcctccacctcaagaaatatttgtacctaccaccaaggaaccctgccactctaaagtccctcagcccggaaatacaaagatacccgaacccggttgcacgaaggtccctgagcccggctgtactaaagtgccggagcccggatgtactaaagtgcccgaacccggctgcacgaaggtgcccgaaccaggatgtacaaaggtgcctgagccaggatgcacaaaggtcccggagcctggctacaccaaagttcccgaacccggctcaattaaggtgcccgaccagggctttatcaagtttccagaaccgggtgcaataaaagtccccgagcaagggtataccaaagtgcccgtgcccggatataccaaacttccagaaccatgtccttcgacagtgactccctag

SEQ ID NO: 38401 - DNA, 486 bp, Artificial Sequence
  derived and/or modified sequence
atgagcagctaccagcagaagcagaccttcaccccccccccccagctccagcaacagcaggttaagcagccctcccagcctccccctcaggaaattttcgtccccacaacaaaagaaccctgtcactctaaggtgccccagccgggcaacactaaaatcccagaaccaggttgcacgaaagttcccgagccagggtgcaccaaggtccccgaacccgggtgcactaaggtaccagagccaggatgtacgaaagtcccagagcccggctgtacaaaagtacctgagcctggttacaccaaagtgccagagccggggtcaatcaaagtgccagaccagggctttattaagtttcccgaacccggtgctataaaagtcccggagcagggatatacgaaagtccccgttccaggatacaccaagttaccggaaccatgcccgagtaccgtgactcctggcccagcacagcagaaaacgaaacagaaatag

SEQ ID NO: 38402 - DNA, 510 bp, Artificial Sequence
  derived and/or modified sequence
atgagcagctaccagcaaaagcagacattcacccctccaccacagctccagcagcagcaggtgaaacagccaagccagcctccccctcaggaaatcttcgtccccaccaccaaggagccttgtcattccaaagtcccccaacctgggaatacgaagatcccagagcctggttgcactaaagtgcctgaacctggctgcactaaagttcctgagccaggatgcaccaaggttcccgaacccggttgcactaaagtgcctgagcctggctgcacaaaggtccccgagcccggttgcaccaaagttcccgaaccaggctacaccaaagttcccgaaccagggtcaattaaagtgcctgatcaggggttcatcaagttccccgagccgggagccattaaggtgccggagcagggatataccaaggtgccagtccctggatacacgaagctgccggaaccgtgcccttccaccgtgacgcctggcccagcccagcaaaaaacaaaacaaaaatag

SEQ ID NO: 38403 - DNA, 510 bp, Artificial Sequence
  derived and/or modified sequence
atgagctcttaccagcagaagcagacgttcactccgcctcctcagcttcaacagcagcaggttaaacagccttcacaaccccctccccaggaaatattcgtgcctaccactaaggaaccctgccattcgaaagtaccacagcctgggaataccaaaatccccgaaccaggctgcactaaggtacctgagccgggatgtaccaaagtgccggaacctgggtgcacaaaagtgccagagccaggctgcacaaaagtccctgagcccggttgtacaaaagtacccgagccagggtgcaccaaagtacccgagcctggttacaccaaggttcctgaacccggttcgatcaaagtgccagatcaaggttttatcaaattccccgaacccggtgctatcaaggtgccagagcagggctatacgaaggtgccagttcctggttataccaagctgcccgaaccctgccccagcacagtgacaccaggaccagctcagcagaaaacaaaacagaaatag

SEQ ID NO: 38404 - DNA, 480 bp, Artificial Sequence
  derived and/or modified sequence
atgtccagttatcagcaaaagcagactttcactcctcccccacagctacagcagcagcaagtgaagcagccttctcagcccccacctcaagaaattttcgtgcccacgaccaaggaaccgtgtcactcgaaagtccctcagcccggaaacaccaagatccccgaaccaggatgtaccaaggtgccagagcccggatgtaccaaggttcccgagccagggtgcacaaaggtccccgagccaggttgtaccaaagttcccgagccagggtgtacaaaagtgcctgagccgggttgcaccaaagtgcctgaaccaggatacacgaaggttccggagcctggttctatcaaagtgccagaccaggggtttattaagttccccgaacccggagctatcaaggtacctgagcagggctatacaaaggtccccgtgcctggttacaccaagctcccagaaccttgccctagcacagtgactccttag

SEQ ID NO: 38405 - DNA, 486 bp, Artificial Sequence
  derived and/or modified sequence
atgtcatcttaccagcaaaaacagacattcactcccccaccacagctgcagcagcaacaggtgaagcagccatcacagcctccgccacaggaaatctttgtgcccactacaaaggaaccatgccattctaaggtgcctcaacctggcaataccaagatcccagagcctgggtgtactaaggtgccagaacctggatgcaccaaagtgcctgagccaggctgtactaaagtgcctgaacccggatgtaccaaagtacccgaacccggatgtaccaaggtccctgaacccggatataccaaggtacctgagccaggtagcattaaggtcccagaccagggcttcattaagttcccggaacctggggcaatcaaggtccctgagcagggttacactaaggtcccagtacccggatacactaaactgcctgagccttgtccctctaccgtcaccccaggtccggctcaacagaagactaaacaaaagtag

SEQ ID NO: 38406 - DNA, 878 bp, Artificial Sequence
  derived and/or modified sequence
cctcgaccttctctgcacagcaggtccagcatcctttgaagcatgagttcttaccagcagaagcagacctttaccccaccacctcagcttcaacagcagcaggtgaaacaacccagccagcctccacctcaggaaatatttgttcccacaaccaaggagccatgccactcaaaggttccacaacctggaaacacaaagattccagagccaggctgtaccaaggtccctgagccaggctgtaccaaggtccctgagccaggctgtaccaaggtccctgagccaggttgtaccaaggtccctgagccaggctgtaccaaggtccctgagccaggttgtaccaaggtccctgagccaggctacaccaaggtccctgaaccaggcagcatcaaggtccctgaccaaggcttcatcaagtttcctgagccaggtgccatcaaagttcctgagcaaggatacaccaaagttcctgtgccaggctacacaaagctaccagagccatgtccttcaacggtcactccaggcccagctcagcagaagaccaagcagaagtaatttggtgcacagacaagcccttgagaagccaaccaccagatgctggacaccctcttcccatctgtttctgtgtcttaattgtctgtagaccttgtaatcagcacattgtcaccccaagccatagtctctctcttatttgtatcctaaaaatacgtactataaagcttttgttcacacacactctgaagaatcctgtaagcccctgaattaagcagaaagtcttcatggcttttctggtcttcggctgctcagggttcatctgaagattcgaatgaaaagaaatgcatgtttcctgctcttccctcattaaattgcttttaattcca

SEQ ID NO: 38407 - DNA, 985 bp, Artificial Sequence
  derived and/or modified sequence
tcaccagatcccagaggctgaacacctcgaccttctctgcacagcagatgatccctgagcagctgaagaccagaaaagccactaagactttctgcttaattcaggagcttagaggattcttcaaagagtgtgtccagcatcctttgaagcatgagttcttaccagcagaagcagacctttaccccaccacctcagcttcaacagcagcaggtgaaacaacccagccagcctccacctcaggaaatatttgttcccacaaccaaggagccatgccactcaaaggttccacaacctggaaacacaaagattccagagccaggctgtaccaaggtccctgagccaggctgtaccaaggtccctgagccaggctgtaccaaggtccctgagccaggttgtaccaaggtccctgagccaggctgtaccaaggtccctgagccaggttgtaccaaggtccctgagccaggctacaccaaggtccctgaaccaggcagcatcaaggtccctgaccaaggcttcatcaagtttcctgagccaggtgccatcaaagttcctgagcaaggatacaccaaagttcctgtgccaggctacacaaagctaccagagccatgtccttcaacggtcactccaggcccagctcagcagaagaccaagcagaagtaatttggtgcacagacaagcccttgagaagccaaccaccagatgctggacaccctcttcccatctgtttctgtgtcttaattgtctgtagaccttgtaatcagcacattgtcaccccaagccatagtctctctcttatttgtatcctaaaaatacgtactataaagcttttgttcacacacactctgaagaatcctgtaagcccctgaattaagcagaaagtcttcatggcttttctggtcttcggctgctcagggttcatctgaagattcgaatgaaaagaaatgcatgtttcctgctcttccctcattaaattgcttttaattcc

SEQ ID NO: 38408 - DNA, 622 bp, Artificial Sequence
  derived and/or modified sequence
cagatcccagaggctgaacacctcgaccttctctgcacagcagatgatccctgagcagctgaagaccagaaaagccactaagactttctgcttaattcaggagcttagaggattcttcaaagagtgtgtccagcatcctttgaagcatgagttcttaccagcagaagcagacctttaccccaccacctcagcttcaacagcagcaggtgaaacaacccagccagcctccacctcaggaaatatttgttcccacaaccaaggagccatgccactcaaaggttccacaacctggaaacacaaagattccagagccaggctgtaccaaggtccctgagccaggctgtaccaaggtccctgagccaggctgtaccaaggtccctgagccaggttgtaccaaggtccctgagccaggctgtaccaaggtccctgagccaggttgtaccaaggtccctgagccaggctacaccaaggtccctgaaccaggcagcatcaaggtccctgaccaaggcttcatcaagtttcctgagccaggtgccatcaaagttcctgagcaaggatacaccaaagttcctgtgccaggctacacaaagctaccagagccatgtccttcaacggtcactcc

SEQ ID NO: 38409 - DNA, 486 bp, Artificial Sequence
  derived and/or modified sequence
atgagttcttaccagcagaagcagacctttaccccaccacctcagcttcaacagcagcaggtgaaacaacccagccagcctccacctcaggaaatatttgttcccacaaccaaggagccatgccactcaaaggttccacaacctggaaacacaaagattccagagccaggctgtaccaaggtccctgagccaggctgtaccaaggtccctgagccaggctgtaccaaggtccctgagccaggttgtaccaaggtccctgagccaggctgtaccaaggtccctgagccaggctacaccaaggtccctgaaccaggcagcatcaaggtccctgaccaaggcttcatcaagtttcctgagccaggtgccatcaaagttcctgagcaaggatacaccaaagttcctgtgccaggctacacaaagctaccagagccatgtccttcaacggtcactccaggcccagctcagcagaagaccaagcagaagtaa

SEQ ID NO: 38410 - DNA, 510 bp, Artificial Sequence
  derived and/or modified sequence
atgagcagctaccagcagaagcagaccttcaccccccccccccagctgcagcagcagcaggtgaagcagcccagccagccccccccccaggagatcttcgtgcccaccaccaaggagccctgccacagcaaggtgccccagcccggcaacaccaagatccccgagcccggctgcaccaaggtgcccgagcccggctgcaccaaggtgcccgagcccggctgcaccaaggtgcccgagcccggctgcaccaaggtgcccgagcccggctgcaccaaggtgcccgagcccggctgcaccaaggtgcccgagcccggctacaccaaggtgcccgagcccggcagcatcaaggtgcccgaccagggcttcatcaagttccccgagcccggcgccatcaaggtgcccgagcagggctacaccaaggtgcccgtgcccggctacaccaagctgcccgagccctgccccagcaccgtgacccccggccccgcccagcagaagaccaagcagaagtag

SEQ ID NO: 38411 - DNA, 480 bp, Artificial Sequence
  derived and/or modified sequence
atgagcagctaccagcagaagcagaccttcaccccccccccccagctgcagcagcagcaggtgaagcagcccagccagccccccccccaggagatcttcgtgcccaccaccaaggagccctgccacagcaaggtgccccagcccggcaacaccaagatccccgagcccggctgcaccaaggtgcccgagcccggctgcaccaaggtgcccgagcccggctgcaccaaggtgcccgagcccggctgcaccaaggtgcccgagcccggctgcaccaaggtgcccgagcccggctgcaccaaggtgcccgagcccggctacaccaaggtgcccgagcccggcagcatcaaggtgcccgaccagggcttcatcaagttccccgagcccggcgccatcaaggtgcccgagcagggctacaccaaggtgcccgtgcccggctacaccaagctgcccgagccctgccccagcaccgtgaccccctag

SEQ ID NO: 38412 - DNA, 486 bp, Artificial Sequence
  derived and/or modified sequence
atgagcagctaccagcagaagcagaccttcaccccccccccccagctgcagcagcagcaggtgaagcagcccagccagccccccccccaggagatcttcgtgcccaccaccaaggagccctgccacagcaaggtgccccagcccggcaacaccaagatccccgagcccggctgcaccaaggtgcccgagcccggctgcaccaaggtgcccgagcccggctgcaccaaggtgcccgagcccggctgcaccaaggtgcccgagcccggctgcaccaaggtgcccgagcccggctacaccaaggtgcccgagcccggcagcatcaaggtgcccgaccagggcttcatcaagttccccgagcccggcgccatcaaggtgcccgagcagggctacaccaaggtgcccgtgcccggctacaccaagctgcccgagccctgccccagcaccgtgacccccggccccgcccagcagaagaccaagcagaagtag

SEQ ID NO: 38413 - protein, 69 aa, Artificial Sequence
  derived and/or modified sequence
MESPKKKNQQLKVGILHLGSRQKKIRIQLRSQVLGREMRDMEGDLQELHQSNTGDKSGFGFRRQGEDNT

SEQ ID NO: 38414 - DNA, 210 bp, Artificial Sequence
  derived and/or modified sequence
atggagagccccaagaagaagaaccagcagctgaaggtgggcatcctgcacctgggcagcagacagaagaagatcagaatccagctgagaagccaggtgctgggcagagagatgagagacatggagggcgacctgcaggagctgcaccagagcaacaccggcgacaagagcggcttcggcttcagaagacagggcgaggacaacacctag

SEQ ID NO: 38415 - DNA, 210 bp, Artificial Sequence
  derived and/or modified sequence
atggaaagccctaagaaaaaaaaccagcagctcaaggttggaattctgcaccttggaagtagacagaaaaagattcgtatccagctgaggtcacaggtgctcggacgtgagatgagagatatggagggtgatctacaggagcttcatcaatcaaataccggggacaagagcggatttggctttaggaggcagggagaagacaatacctag

SEQ ID NO: 38416 - DNA, 210 bp, Artificial Sequence
  derived and/or modified sequence
atggaaagccccaaaaagaaaaatcagcagctgaaggtcggcattctgcacttgggaagtagacagaaaaaaattcggatacaattgcgcagccaggtgctaggacgcgaaatgagagatatggaaggggatctgcaggagctgcatcagtccaacaccggcgacaagagtggctttgggtttcggcgccagggagaagacaacacctag

SEQ ID NO: 38417 - DNA, 210 bp, Artificial Sequence
  derived and/or modified sequence
atggaatctcccaagaaaaagaaccaacagctgaaggtaggtatcctgcacctgggctcaagacagaaaaagatacgcattcagctgagatcacaggtgttgggcagagagatgcgtgacatggagggcgacctccaggagttacaccagagcaacaccggtgacaaaagcgggtttggctttaggcggcaaggggaagacaatacttag

SEQ ID NO: 38418 - DNA, 210 bp, Artificial Sequence
  derived and/or modified sequence
atggagagccccaagaagaagaaccagcagctgaaggtgggcatcctgcacctgggcagccggcagaagaagatccgcatccagctgcggagccaggtgctgggccgggagatgagggacatggagggggacctgcaggagctgcaccagagcaacacaggagacaagagcggcttcggcttccggcggcagggcgaggacaacacctag

SEQ ID NO: 38419 - DNA, 210 bp, Artificial Sequence
  derived and/or modified sequence
atggagagccccaagaagaagaaccagcagctgaaggtgggcatcctccacctgggctcaaggcagaagaaaattaggatacagcttagaagccaggtgctgggccgagagatgagagatatggaaggagatttgcaggaactgcatcaatcaaatacgggtgataagagcggattcgggttccgccgccagggcgaggacaacacctag

SEQ ID NO: 38420 - DNA, 210 bp, Artificial Sequence
  derived and/or modified sequence
atggagagccccaagaagaagaaccagcagctgaaggtgggcatcctgcatctggggtcaaggcagaagaagatccggattcagctgagaagtcaggtgcttggccgagaaatgagagacatggagggtgacctccaggaactccatcagagtaacactggagataaatccggatttggttttcgacgccagggcgaagataatacatag

SEQ ID NO: 38421 - DNA, 210 bp, Artificial Sequence
  derived and/or modified sequence
atggagagccccaagaagaagaaccagcagctgaaggtgggcatcctgcatctcggaagtcggcagaagaaaatcaggatccagctgcgatcccaggtgctgggtcgggagatgcgcgacatggaaggcgacctgcaggaattgcaccagtcaaacacaggggataaatcgggtttcggtttccgtcgccagggagaggataacacttag

SEQ ID NO: 38422 - DNA, 210 bp, Artificial Sequence
  derived and/or modified sequence
atggagtcccctaagaagaagaatcagcagctcaaggttggcatactgcacttggggtctagacaaaaaaagatacggatccaactcaggtcccaagtgctgggtcgagaaatgcgcgacatggagggagatctccaggagttacatcagagcaacactggggacaagagtggctttggctttaggaggcagggtgaagataacacttag

SEQ ID NO: 38423 - DNA, 210 bp, Artificial Sequence
  derived and/or modified sequence
atggagagccctaaaaaaaagaatcaacagctgaaggtgggcatcctacacctgggatcaagacagaagaagattagaattcaacttcgtagccaggtgttggggagagagatgagggacatggagggggacttgcaagaattacatcagagcaacactggcgataaaagcggatttggttttaggagacagggagaggacaacacgtag

SEQ ID NO: 38424 - DNA, 210 bp, Artificial Sequence
  derived and/or modified sequence
atggaaagccctaagaagaagaaccaacaactgaaggtcgggatcctccatctgggatcaagacagaaaaagatccgcatacagctccgtagtcaggttctcgggagagagatgcgagacatggaaggggatttgcaagagctgcatcagagcaataccggggacaagagtggattcggattcaggcgccaaggggaagacaacacatag

SEQ ID NO: 38425 - DNA, 474 bp, Artificial Sequence
  derived and/or modified sequence
gggaacgcggcggagctgtgagccggcgactcgggtccctgaggtctggattctttctccgctactgagacacggcggacacacacaaacacagaaccacacagccagtcccaggagcccagtaatggagagccccaaaaagaagaaccagcagctgaaagtcgggatcctacacctgggcagcagacagaagaagatcaggatacagctgagatcccaggtgctgggaagggaaatgcgcgacatggaaggtgatctgcaagagctgcatcagtcaaacaccggggataaatctggatttgggttccggcgtcaaggtgaagataatacctaaagaggaacactgtaaaatgccagaagcaggtgaagagcaaccacaagtttaaatgaagacaagctgaaacaacgcaagctggttttatattagatatttgacttaaactatctcaataaagttttgcagctttcaccaaa

SEQ ID NO: 38426 - DNA, 350 bp, Artificial Sequence
  derived and/or modified sequence
atggagagccccaaaaagaagaaccagcagctgaaagtcgggatcctacacctgggcagcagacagaagaagatcaggatacagctgagatcccaggtgctgggaagggaaatgcgcgacatggaaggtgatctgcaagagctgcatcagtcaaacaccggggataaatctggatttgggttccggcgtcaaggtgaagataatacctaaagaggaacactgtaaaatgccagaagcaggtgaagagcaaccacaagtttaaatgaagacaagctgaaacaacgcaagctggttttatattagatatttgacttaaactatctcaataaagttttgcagctttcaccaaa

SEQ ID NO: 38427 - DNA, 210 bp, Artificial Sequence
  derived and/or modified sequence
atggagtctcctaagaaaaaaaatcagcagctcaaagtcggcatattgcacctgggatcccgccaaaaaaagatcaggatccaactgcgttctcaagtgctgggcagggaaatgagagacatggagggggacctccaggagcttcaccagagcaatactggcgataaatctgggtttgggtttcgccgccaaggtgaggataatacatag

SEQ ID NO: 38428 - DNA, 210 bp, Artificial Sequence
  derived and/or modified sequence
atggagagcccaaagaagaaaaatcagcagttaaaagtcgggatcctgcacctgggcagccggcagaagaaaatccggattcagcttaggtctcaagtccttggaagagagatgagggatatggagggcgaccttcaggagctacaccagtcgaacaccggggataaatctggatttggcttccgacggcagggggaagacaatacatag

SEQ ID NO: 38429 - DNA, 210 bp, Artificial Sequence
  derived and/or modified sequence
atggaatccccaaaaaagaagaatcaacaattaaaagttggcatcctgcatctgggctcgagacagaagaaaataagaattcagctgcggtcccaggtgctgggaagagagatgcgagacatggagggagacctccaagagctgcaccagagcaacactggggacaagtctggcttcggttttcggcgtcagggggaagataacacctag

SEQ ID NO: 38430 - DNA, 210 bp, Artificial Sequence
  derived and/or modified sequence
atggaatcccccaagaaaaaaaaccaacagcttaaggtggggatcctgcaccttggttcccggcaaaaaaaaatccgcatccaactacgtagtcaagtgctgggaagggagatgagagacatggaaggggacttacaggagctacatcagagcaacacaggggataaatcaggttttggctttaggagacaaggcgaggacaacacgtag

SEQ ID NO: 38431 - DNA, 210 bp, Artificial Sequence
  derived and/or modified sequence
atggaaagcccaaagaagaaaaaccagcagctgaaagtgggtatcttacacctaggcagcaggcaaaagaaaatcagaatccagctgagatcccaggtcctggggcgcgagatgcgggacatggagggtgacttacaggaactgcaccaatccaacacaggggacaagagtggctttgggtttcgccggcagggagaggataacacgtag

SEQ ID NO: 38432 - DNA, 210 bp, Artificial Sequence
  derived and/or modified sequence
atggagtctccgaagaagaagaaccagcagctgaaagtgggtatcctgcacctggggtcccgtcagaaaaaaattagaattcagttacgcagtcaggtgctcgggcgggaaatgagggatatggagggcgatctccaggagctacaccagtcaaacaccggtgataaaagcggctttggatttcggcggcagggggaagataacacgtag

SEQ ID NO: 38433 - DNA, 210 bp, Artificial Sequence
  derived and/or modified sequence
atggagtccccaaagaaaaagaaccagcagcttaaagtgggcatcctgcatctaggctcccggcagaagaaaatcagaatccagcttagaagccaggtgctgggcagagagatgcgggatatggagggagacctccaagagctccatcagtcaaacaccggggataaaagtggcttcgggtttaggagacagggcgaagataacacttag

SEQ ID NO: 38434 - DNA, 210 bp, Artificial Sequence
  derived and/or modified sequence
atggagagccccaagaagaagaaccagcagctgaaggtgggcatcctacatctgggctctaggcagaagaagatccgcatacagctccgttcccaagtgctgggcagagagatgagggatatggagggggatcttcaggagttgcaccagtcaaacactggggataaaagcggttttggtttcagaagacagggcgaagataacacttag

SEQ ID NO: 38435 - DNA, 210 bp, Artificial Sequence
  derived and/or modified sequence
atggagagccccaagaagaagaaccagcagctgaaggtgggcatcctgcacctgggctctaggcagaagaaaataagaatacaactgagaagccaggtgctcggcagagagatgcgggatatggaaggtgaccttcaggaattgcaccagagcaacacaggagataaatcaggttttgggttcaggcggcaaggagaggataatacatag

SEQ ID NO: 38436 - DNA, 210 bp, Artificial Sequence
  derived and/or modified sequence
atggagagccccaagaagaagaaccagcagctgaaggtgggcatccttcatctcggaagtcgccagaagaagatcaggatccaactgcggtctcaggttcttgggcgcgagatgcgggatatggagggcgatctgcaggagttgcatcaaagtaataccggagacaagagcggtttcggattccgccgccagggtgaggacaatacctag

SEQ ID NO: 38437 - DNA, 210 bp, Artificial Sequence
  derived and/or modified sequence
atggagagccccaagaagaagaaccagcagctgaaggtgggcatcctacaccttggcagccgccagaagaagatcagaattcagctgagatctcaggtcttggggcgagaaatgcgagatatggagggagacttacaggaactgcaccagtcaaacacaggcgacaaatccggcttcggctttagacggcagggcgaagataatacatag

SEQ ID NO: 38438 - DNA, 210 bp, Artificial Sequence
  derived and/or modified sequence
atggagagccccaagaagaagaaccagcagctgaaggtgggcatccttcacttgggatccaggcagaaaaagatccgcatacagctcaggtcccaagttctcggccgggagatgagggatatggagggagatttacaggagttgcatcagagcaacacaggcgacaagtccggttttggatttaggagacaaggcgaagataatacatag

SEQ ID NO: 38439 - DNA, 210 bp, Artificial Sequence
  derived and/or modified sequence
atggagagccccaagaagaagaaccagcagctgaaggtgggcatcctccatctggggtcccgccagaagaagattcggatccagttgaggagccaggtcctgggacgggaaatgcgagacatggaaggggatctgcaggaactgcatcagtccaacactggcgataagtccggttttggcttccgcagacagggggaggacaacacctag

SEQ ID NO: 38440 - DNA, 210 bp, Artificial Sequence
  derived and/or modified sequence
atggagagccccaagaagaagaaccagcagctgaaggtgggcatcttgcacctgggtagtaggcagaaaaaaatcaggattcagctgcgttcccaagtcctgggcagggagatgagggacatggaaggagacctgcaggagctgcaccagtccaataccggggacaagtctgggtttggtttcagacggcaaggtgaagataacacctag

SEQ ID NO: 38441 - DNA, 210 bp, Artificial Sequence
  derived and/or modified sequence
atggagtcccctaaaaaaaagaaccagcagctgaaggtgggcatcttgcatctggggtcaaggcaaaaaaagatccgaatccagctgcgcagtcaggtgctgggacgggaaatgcgggacatggaaggcgatctccaagagttgcaccagagtaatactggggacaaatccggatttgggtttcgacgccagggtgaagataatacctag

SEQ ID NO: 38442 - DNA, 210 bp, Artificial Sequence
  derived and/or modified sequence
atggagagcccgaagaagaagaaccaacagctgaaggtgggcatcctgcatttaggcagtcggcaaaaaaagatccgaattcaattgcgtagccaagtcttaggcagagaaatgcgcgatatggaaggagatctccaagagctgcaccaatccaacaccggggataaatccgggtttgggttcaggcgtcagggagaggacaatacatag

SEQ ID NO: 38443 - DNA, 210 bp, Artificial Sequence
  derived and/or modified sequence
atggagagccccaaaaagaagaaccagcagctcaaagtgggaatcctgcacctgggctcaagacaaaaaaagatccgcattcagcttagaagtcaagtcctcggccgtgagatgcgagacatggaaggcgatctgcaggaactccaccagtcaaatacgggcgacaagagcgggttcggcttcagacgtcagggcgaagataacacttag

SEQ ID NO: 38444 - DNA, 210 bp, Artificial Sequence
  derived and/or modified sequence
atggagagtcccaaaaagaagaatcagcagctgaaggtagggatattacacttggggagccgacagaagaagatccgcattcagctccgctctcaggtcttaggaagagagatgcgggacatggagggcgatctccaggaattgcaccagagcaatacgggagataagagtggtttcgggttccgcaggcaaggcgaggacaatacatag

SEQ ID NO: 38445 - DNA, 210 bp, Artificial Sequence
  derived and/or modified sequence
atggagtcccccaaaaagaagaatcagcagttgaaagttggcattctacacttaggaagtcgccagaaaaagatcaggatccagttaaggagtcaagttcttggacgggaaatgcgcgacatggagggggacttacaagagctccatcagtcaaatacaggggataagagcggcttcgggttccgtcgtcagggggaggataatacatag

SEQ ID NO: 38446 - DNA, 210 bp, Artificial Sequence
  derived and/or modified sequence
atggagtctcctaagaagaaaaatcagcagctgaaagttggcatactccacctaggaagtaggcaaaaaaagattaggattcagctgcgcagtcaggtcctgggcagagaaatgagggacatggaaggagacctgcaggagctgcaccagtcaaacactggggataaaagcgggtttggcttccggcgacaaggtgaagataatacatag

SEQ ID NO: 38447 - DNA, 210 bp, Artificial Sequence
  derived and/or modified sequence
atggaaagccccaaaaagaagaaccaacaacttaaggtggggatcctacatctaggatctcgccagaaaaaaattcgcatccaactgagaagtcaagtactggggcgagaaatgagggatatggagggtgacctacaagagcttcaccaaagtaatacaggcgacaagtcgggtttcggtttccgcagacagggagaggacaatacctag

SEQ ID NO: 38448 - protein, 412 aa, Artificial Sequence
  derived and/or modified sequence
MDTSPSRKYPVKKRVKIHPNTVMVKYTSHYPQPGDDGYEEINEGYGNFMEENPKKGLLSEMKKKGRAFFGTMDTLPPPTEDPMINEIGQFQSFAEKNIFQSRKMWIVLFGSALAHGCVALITRLVSDRSKVPSLELIFIRSVFQVLSVLVVCYYQEAPFGPSGYRLRLFFYGVCNVISITCAYTSFSIVPPSNGTTMWRATTTVFSAILAFLLVDEKMAYVDMATVVCSILGVCLVMIPNIVDEDNSLLNAWKEAFGYTMTVMAGLTTALSMIVYRSIKEKISMWTALFTFGWTGTIWGISTMFILQEPIIPLDGETWSYLIAICVCSTAAFLGVYYALDKFHPALVSTVQHLEIVVAMVLQLLVLHIFPSIYDVFGGVIIMISVFVLAGYKLYWRNLRKQDYQEILDSPIK

SEQ ID NO: 38449 - DNA, 1239 bp, Artificial Sequence
  derived and/or modified sequence
atggacaccagccccagcagaaagtaccccgtgaagaagagagtgaagatccaccccaacaccgtgatggtgaagtacaccagccactacccccagcccggcgacgacggctacgaggagatcaacgagggctacggcaacttcatggaggagaaccccaagaagggcctgctgagcgagatgaagaagaagggcagagccttcttcggcaccatggacaccctgcccccccccaccgaggaccccatgatcaacgagatcggccagttccagagcttcgccgagaagaacatcttccagagcagaaagatgtggatcgtgctgttcggcagcgccctggcccacggctgcgtggccctgatcaccagactggtgagcgacagaagcaaggtgcccagcctggagctgatcttcatcagaagcgtgttccaggtgctgagcgtgctggtggtgtgctactaccaggaggcccccttcggccccagcggctacagactgagactgttcttctacggcgtgtgcaacgtgatcagcatcacctgcgcctacaccagcttcagcatcgtgccccccagcaacggcaccaccatgtggagagccaccaccaccgtgttcagcgccatcctggccttcctgctggtggacgagaagatggcctacgtggacatggccaccgtggtgtgcagcatcctgggcgtgtgcctggtgatgatccccaacatcgtggacgaggacaacagcctgctgaacgcctggaaggaggccttcggctacaccatgaccgtgatggccggcctgaccaccgccctgagcatgatcgtgtacagaagcatcaaggagaagatcagcatgtggaccgccctgttcaccttcggctggaccggcaccatctggggcatcagcaccatgttcatcctgcaggagcccatcatccccctggacggcgagacctggagctacctgatcgccatctgcgtgtgcagcaccgccgccttcctgggcgtgtactacgccctggacaagttccaccccgccctggtgagcaccgtgcagcacctggagatcgtggtggccatggtgctgcagctgctggtgctgcacatcttccccagcatctacgacgtgttcggcggcgtgatcatcatgatcagcgtgttcgtgctggccggctacaagctgtactggagaaacctgagaaagcaggactaccaggagatcctggacagccccatcaagtag

SEQ ID NO: 38450 - DNA, 1239 bp, Artificial Sequence
  derived and/or modified sequence
atggacacaagccctagcagaaaataccccgtcaagaaacgagtcaagatccaccccaacaccgtgatggtgaaatatacaagtcactatccccaaccaggcgacgatggatatgaggaaattaacgaggggtacgggaactttatggaagagaatcccaaaaagggtctgctctctgaaatgaaaaaaaaagggcgtgcctttttcggtacaatggataccctgccgcccccaaccgaagatcccatgattaatgagattggccaattccagagtttcgctgaaaagaatatttttcaaagtagaaagatgtggatcgtcctgtttgggtctgccctcgcccatggatgtgtggccttgatcaccaggctggtgtcagacaggtccaaagttccctcactggaattgatcttcatccggagtgtttttcaagtgctcagtgtcctggtcgtatgttactaccaggaggcaccatttggaccatctgggtataggcttagattatttttttatggtgtttgcaacgtcatcagcatcacatgcgcctatacctccttttcaatcgtaccccctagtaatggtactactatgtggcgcgctacaaccaccgtgttctctgccattcttgctttcctgctggtcgacgagaagatggcctacgtggatatggccaccgtggtgtgtagcatcctaggcgtttgcctggtgatgataccaaacattgttgacgaggacaactccctgctcaacgcctggaaggaagcatttggctatacaatgaccgtaatggctgggctgaccacagctctctctatgatcgtatatcgctccatcaaagagaagatctccatgtggactgccctgtttactttcggatggaccggcacgatttggggcatatctacgatgtttatactccaggagcccatcatcccactagatggtgagacatggagctatcttatcgcgatttgcgtgtgtagtactgctgctttcctgggagtgtattacgccttagacaagttccacccagccctggtcagcaccgtgcagcaccttgaaattgtggttgccatggtgctgcagctgttagttttacatatatttcctagcatatatgatgtatttggaggggtcatcattatgatcagcgttttcgtactcgctgggtacaaactgtactggaggaaccttcgtaagcaggattatcaggagatcctggatagcccaatcaagtag

SEQ ID NO: 38451 - DNA, 1239 bp, Artificial Sequence
  derived and/or modified sequence
atggacacctcaccgagtcgtaagtaccctgtgaaaaagcgagtgaagatccatcccaacacggttatggttaagtatacctcccactatccacaacccggcgacgatggctatgaagaaataaacgaaggctacggcaatttcatggaagaaaatccaaagaaggggctgctgtcggaaatgaagaagaaaggacgtgccttcttcggtactatggacactcttccaccacctactgaagaccctatgatcaacgagattgggcagttccaaagcttcgcagaaaagaatatatttcagtcacggaagatgtggattgtgctattcggctccgctttggcccacgggtgcgttgccctgatcactcggttggtgagtgataggtctaaggtgcccagtctggaactgatttttatccggtctgtattccaggtcctaagcgtcctggtggtgtgttattaccaggaagctccttttgggcccagcggataccgccttcgtctattcttttatggtgtctgtaatgtcatctccatcacatgtgcgtacacaagctttagcattgtgcccccttccaatggcacaaccatgtggagggcaactaccacagtcttcagcgccatcctggcctttctactagtggacgagaagatggcatatgtggacatggctaccgtggtgtgttcgatattgggcgtgtgcctcgtgatgattcccaatatagtcgatgaggacaacagtttgttgaatgcctggaaggaggccttcggctacacgatgacggtgatggccggcctcaccactgcgcttagtatgatagtttaccgctcaattaaagagaaaattagcatgtggacagctctgtttacttttgggtggaccgggactatttggggtattagcacaatgttcattctccaggaacctattattccactcgacggcgagacctggtcttatttaatcgctatctgcgtgtgctcaacagcagcctttctgggcgtttactacgctctcgataagtttcatcccgctctggtatctactgttcagcatctcgagattgtggtagcgatggtcctccagttgttggtgcttcatatttttccgagtatttacgacgtttttggaggagttatcatcatgatctctgtattcgtactcgctggatacaagttgtattggagaaatctgcggaagcaggattaccaagagattttagattcaccgatcaaatag

SEQ ID NO: 38452 - DNA, 1239 bp, Artificial Sequence
  derived and/or modified sequence
atggacaccagccccagcaggaagtaccctgtgaagaagagggtgaagatccaccccaacacagtgatggtgaagtacaccagccactacccccagcctggagatgatggctatgaggagatcaatgaaggctacggcaacttcatggaggagaaccccaagaagggcctgctgtctgagatgaagaagaagggccgggccttcttcggcaccatggacaccctgcccccacccacagaggaccccatgatcaatgaaattggccagttccagagctttgctgagaagaacatcttccagagcaggaagatgtggatcgtgctgtttggaagtgccctggcccacggctgtgtggccctgatcacccggctggtgtctgacaggagcaaggtgcccagcctggagctgatcttcatccgctctgtgttccaggtgctgtctgtgctggtggtgtgctactaccaggaggcccccttcggccccagcggctaccgcctgcggctcttcttctatggagtgtgcaacgtcatcagcatcacctgtgcctacaccagcttcagcatcgtgccccccagcaatggcaccaccatgtggagggccaccaccaccgtcttcagcgccatcctggccttcctgctggtggatgagaagatggcctacgtggacatggccaccgtggtgtgcagcatcctgggcgtgtgcctggtgatgatccccaacatcgtggatgaggacaacagcctgctgaatgcctggaaggaggccttcggctacaccatgacagtgatggccggcctgaccacagccctgtccatgattgtgtaccgcagcatcaaggagaagatctccatgtggacagccctcttcaccttcggctggacaggcaccatctggggcatcagcaccatgttcatcctgcaggagcccatcatccccctggatggagagacctggagctacctgattgccatctgtgtgtgcagcacagctgccttcctgggcgtgtactatgccctggacaagttccacccagccctggtgtccacagtgcagcacctggagatcgtggtggccatggtgctgcagctgctggtgctgcacatcttccccagcatctatgatgtgtttggaggagtcatcatcatgatctctgtgtttgtgctggccggctacaagctgtactggaggaacctgaggaagcaggactaccaggagatcctggacagccccatcaagtag

SEQ ID NO: 38453 - DNA, 1239 bp, Artificial Sequence
  derived and/or modified sequence
atggacaccagccccagccggaagtaccccgtgaagaagcgggtgaagatccacccaaataccgttatggtgaaatatacctcacactatccacaacccggtgacgacggatacgaggaaattaatgaggggtacggcaacttcatggaagagaatcccaagaagggactcctgagtgaaatgaagaagaaagggagagcgtttttcggaactatggacacacttcctccacccacagaagaccctatgataaatgaaattggccagttccagtctttcgccgaaaagaacatatttcaatccagaaagatgtggattgtcctgtttggctctgctcttgcccatggctgtgtcgcccttataacacgactcgtgtctgaccgtagcaaagtgccatctctggagttaatttttattagatctgtgtttcaggtgctctccgtcctagtggtgtgctactatcaagaggctccttttggcccatctggttataggcttaggcttttcttctatggtgtctgcaacgtgatctcaattacctgtgcctacacctctttttctatagtgccgccgagcaacggaacaaccatgtggagggccacaacaaccgtattcagcgcgatccttgccttccttttagtcgacgagaagatggcttatgtggatatggctacggtggtctgttctatcttgggcgtatgtttggtgatgatccccaatatcgtcgatgaagataattcattgcttaacgcctggaaggaggcctttggatacacaatgactgtaatggctgggcttacaaccgcactgagcatgatcgtgtacaggtctataaaagagaagattagtatgtggaccgcgctcttcacttttgggtggacaggaaccatctggggcatcagcacaatgttcatcctccaggagcccatcattccacttgatggagagacctggtcgtacctcattgctatctgcgtgtgctcgactgctgcttttctcggtgtgtactatgccctggacaaattccatccggctctcgtgtccactgtccagcacttggagatagtggtggctatggttttgcagttgctagtgctgcatatctttccgtctatttacgatgtttttgggggagtgattattatgatttcagtgtttgtgttggctggttacaagctgtactggagaaacctgagaaagcaggattaccaggagatcctcgattccccgatcaaatag

SEQ ID NO: 38454 - DNA, 1239 bp, Artificial Sequence
  derived and/or modified sequence
atggacaccagccccagccggaagtaccccgtgaagaagcgggtgaaaattcaccccaataccgttatggtcaagtataccagccattaccctcagcctggagacgatggctacgaggagattaacgaaggttatggcaatttcatggaggagaaccccaagaaaggccttctgagtgaaatgaaaaaaaaggggagggccttttttggaacgatggatactcttccaccgcctaccgaggatccgatgattaacgagataggacaatttcaatccttcgccgagaagaacattttccagtctaggaagatgtggatcgtcctttttggatctgctctagcccatgggtgtgttgccctgattacgagactcgtatccgataggtctaaagttcccagccttgaactgatttttattcggtccgtgtttcaggtgctcagtgtgctcgtggtgtgctattaccaggaggcccccttcggacccagtggctataggctgagattattcttttacggagtgtgtaatgtgatcagcattacttgcgcttacacctctttttcaatcgtgccccccagtaatggcacaaccatgtggcgcgctacaaccacagtgttcagcgctatcctggccttcctcctggttgatgaaaagatggcatacgtggatatggccacagttgtctgtagtatcctgggcgtttgtctggtaatgattcccaatatcgttgacgaagacaacagcctcctcaatgcttggaaggaagctttcggctatactatgactgtgatggctggtctgactactgccctgtccatgattgtttaccggagtattaaagaaaagatctccatgtggaccgcactttttacctttggctggacaggcacaatttgggggattagtactatgttcatcctccaggagcctattatccccttggacggtgagacgtggtcatacctgatagcaatctgtgtgtgcagcaccgccgccttcctgggcgtgtactacgccctagacaagtttcacccagccctcgtctcgaccgtgcaacatctggaaatagtggtcgccatggtcctacagttgctggttctgcatattttcccatccatctatgacgtcttcggcggcgtgataataatgattagcgtgtttgtgttggccggttataagctgtactggcggaacctgaggaagcaggactaccaggagatactcgacagtcccatcaagtag

SEQ ID NO: 38455 - DNA, 1239 bp, Artificial Sequence
  derived and/or modified sequence
atggatacctcaccctcacgaaagtaccccgtcaagaagagagtcaagatccaccccaatacagtgatggtgaaatatacatcccattacccgcagcctggagacgacggctacgaagaaatcaacgagggctacggtaatttcatggaggagaaccctaagaaaggtttgctgagcgagatgaaaaagaaagggagggctttcttcgggaccatggacactctaccacctcctacagaggacccaatgatcaatgaaatcgggcagttccagtcttttgccgaaaagaatattttccagtcgagaaaaatgtggatcgtgctcttcggcagcgcattggcccacgggtgtgtcgccctcattacaaggcttgtttcagacagatccaaggttccttccctggagctcatatttatccgttctgtattccaagtcctgtctgtgcttgtcgtttgctactatcaggaagccccattcggaccatcaggttacagactccgattgtttttttacggggtgtgcaacgtgatctctatcacttgtgcctataccagctttagtatcgtgcccccaagtaatggcactaccatgtggcgggctaccacaacagtattttctgctatccttgcatttttgcttgtggacgagaagatggcgtacgtggatatggccacagtagtgtgtagcattctcggagtctgcctggtgatgattcctaacatcgtcgatgaggacaatagcctcctaaatgcctggaaggaggccttcggctataccatgaccgtgatggcaggactcaccactgctttgtctatgatagtttaccgtagcatcaaggagaaaatctccatgtggacggccttgttcactttcggatggaccggaacgatctggggtatatctaccatgtttatcttgcaggaacccattattcctttagatggcgagacctggtcctaccttatcgcgatttgcgtctgtagcactgctgcctttttgggcgtgtactatgcactcgacaagtttcacccagctcttgtgtctactgtccagcatctggagatagttgtggcaatggtgctgcagctcttggtgctgcacatattcccgagcatatacgatgtgttcgggggagtgatcattatgatctctgtgtttgtccttgcaggctataagctgtattggaggaacctccggaaacaggactatcaagagatcctcgatagtccgatcaagtag

SEQ ID NO: 38456 - DNA, 1239 bp, Artificial Sequence
  derived and/or modified sequence
atggacactagcccttcccgaaagtatcccgtcaagaagagagtcaaaatccatcccaacacagtcatggtcaagtatacgtcacattacccacagccaggggatgatggctacgaagaaatcaacgaggggtacgggaactttatggaggagaatcctaagaagggtctcctgtcagaaatgaagaagaaagggcgtgctttcttcggcaccatggataccctcccgccacccacggaagaccccatgatcaatgagattggacagtttcagtcttttgcagaaaaaaacatcttccagtcaaggaaaatgtggatagtcctgtttggaagtgccctggcccacggctgtgttgcactgattactcgccttgtatcagacaggagcaaggtgccttctctcgaactaatattcatccgtagtgtgtttcaggtgctgtcagtgcttgttgtgtgttactatcaggaagctcctttcgggccttctggctaccgccttcggctttttttttatggggtctgtaacgtcatatccatcacttgcgcctatacaagtttttccatagtgcccccatcaaacggcactaccatgtggcgggcaaccaccacagtgtttagcgccatcttagcgttcttgcttgtcgacgagaaaatggcctatgtcgatatggcaacagtggtgtgttccatcttgggggtctgcttggtaatgattcccaatatagtcgatgaggacaatagcctcctcaacgcttggaaagaggccttcggttacacaatgaccgtgatggctgggctgacgacagctctcagcatgatagtgtaccgctctattaaggaaaagatcagcatgtggacggcactgttcacattcggttggactgggaccatctggggaatctccacaatgtttattctgcaggagccgattattcctctcgacggagaaacttggagctatctgatagcaatttgcgtctgcagcactgccgcttttctgggagtgtattacgcactggacaagtttcaccctgcgttggttagcacagtccaacacttggaaatcgtcgttgctatggtcttgcagctgctggtgctccacattttcccaagcatttacgatgtgttcgggggtgttatcatcatgatctcagtttttgtgttagcagggtacaaattatactggagaaatctgcggaagcaagattatcaggagatattagattctcctataaaatag

SEQ ID NO: 38457 - DNA, 1577 bp, Artificial Sequence
  derived and/or modified sequence
aggcgcagagtccgcgcggcggcgcccctctccctccgcagtactccgggcagcgcccgcctcgattttcccaggcgagggcacgcccgcgtcagtcgcctccggggcaccttcctcgccacgacacgcagaattgattatctgaagaaatggatacttctccctccagaaaatatccagttaaaaaacgggtgaaaatacatcccaacacagtgatggtgaaatatacttctcattatccccagcctggcgatgatggatatgaagaaatcaatgaaggctatggaaattttatggaggaaaatccaaagaaaggtctgctgagtgaaatgaaaaaaaaagggagagctttctttggaaccatggataccctacctccaccaacagaagacccaatgatcaatgagattggacaattccagagctttgcagaaaaaaacatttttcaatcccgaaaaatgtggatagtgctgtttggatctgctttggctcatggatgtgtagctcttatcactaggcttgtttctgatcggtctaaagttccatctctagaactgatttttatccgttctgtttttcaggtcttatctgtgttagttgtgtgttactatcaggaggccccctttggacccagtggatacagattacgactcttcttttatggtgtatgcaatgtcatttctatcacttgtgcttatacatcattttcaatagttcctcccagcaatgggaccactatgtggagagccacaactacagtcttcagtgccattttggcttttttactcgtagatgagaaaatggcttatgttgacatggctacagttgtttgcagcatcttaggtgtttgtcttgtcatgatcccaaacattgttgatgaagacaattctttgttaaatgcctggaaagaagcctttgggtacaccatgactgtgatggctggactgaccactgctctctcaatgatagtatacagatccatcaaggagaagatcagcatgtggactgcactgtttacttttggttggactgggacaatttggggaatatctactatgtttattcttcaagaacccatcatcccattagatggagaaacctggagttatctcattgctatatgtgtctgttctactgcagcattcttaggagtttattatgccttggacaaattccatccagctttggttagcacagtacaacatttggagattgtggtagctatggtcttgcagcttctcgtgctgcacatatttcctagcatctatgatgtttttggaggggtaatcattatgattagtgtttttgtccttgctggctataaactttactggaggaatttaagaaagcaggactaccaggaaatactagactctcccattaaatgaatacctgattattattgtctcattaatgttcagttattatgtatactgccattttaatgtttacctatgaatgtcttttgtgttatataactgacagagtgctataaaatatataatatatacaaatgcagaaaatttattctagtctaatatattcaaatacaaatattaaatatatgaaatacgtta

SEQ ID NO: 38458 - DNA, 2060 bp, Artificial Sequence
  derived and/or modified sequence
cccgcagtctccaactccggcgccagtcaggttgtggggtgggggcggcggagggcggagagcgcaggcgcagagtccgcgcggcggcgcccctctccctccgcagtactccgggcagcgcccgcctcgattttcccaggcgagggcacgcccgcgtcagtcgcctccggggcaccttcctcgccacgacacgcaggtaaccgggccccgggagccggtcggcggcggcggactgggaccttgatcctgcctgcccggccgcccgacaagggaatgagagcggaccccgaactccacacacccgcgtttagccgccacacctaaggggcacaacagtctttttgggtaagggccgggctgggggcgacgcgccccgcccgctttgcagacttcggggtgctctgcacgacgcctgaaaggccgcggggcccgcatttctctgtgctgccctcctggagaaccgggacacggggacgggagggccagcatcggctacggcccggtttcccgtttctttccgctgtcgcgtgtctgggccctcctgcagcgtccatgatgaaggccaggggctgttgctttcctctcgcccagtagccaacccaagcaagggaattgattatctgaagaaatggatacttctccctccagaaaatatccagttaaaaaacgggtgaaaatacatcccaacacagtgatggtgaaatatacttctcattatccccagcctggcgatgatggatatgaagaaatcaatgaaggctatggaaattttatggaggaaaatccaaagaaaggtctgctgagtgaaatgaaaaaaaaagggagagctttctttggaaccatggataccctacctccaccaacagaagacccaatgatcaatgagattggacaattccagagctttgcagaaaaaaacatttttcaatcccgaaaaatgtggatagtgctgtttggatctgctttggctcatggatgtgtagctcttatcactaggcttgtttctgatcggtctaaagttccatctctagaactgatttttatccgttctgtttttcaggtcttatctgtgttagttgtgtgttactatcaggaggccccctttggacccagtggatacagattacgactcttcttttatggtgtatgcaatgtcatttctatcacttgtgcttatacatcattttcaatagttcctcccagcaatgggaccactatgtggagagccacaactacagtcttcagtgccattttggcttttttactcgtagatgagaaaatggcttatgttgacatggctacagttgtttgcagcatcttaggtgtttgtcttgtcatgatcccaaacattgttgatgaagacaattctttgttaaatgcctggaaagaagcctttgggtacaccatgactgtgatggctggactgaccactgctctctcaatgatagtatacagatccatcaaggagaagatcagcatgtggactgcactgtttacttttggttggactgggacaatttggggaatatctactatgtttattcttcaagaacccatcatcccattagatggagaaacctggagttatctcattgctatatgtgtctgttctactgcagcattcttaggagtttattatgccttggacaaattccatccagctttggttagcacagtacaacatttggagattgtggtagctatggtcttgcagcttctcgtgctgcacatatttcctagcatctatgatgtttttggaggggtaatcattatgattagtgtttttgtccttgctggctataaactttactggaggaatttaagaaagcaggactaccaggaaatactagactctcccattaaatgaatacctgattattattgtctcattaatgttcagttattatgtatactgccattttaatgtttacctatgaatgtcttttgtgttatataactgacagagtgctataaaatatataatatatacaaatgcagaaaatttattctagtctaatatattcaaatacaaatattaaatatatgaaatacgttatgaa

SEQ ID NO: 38459 - protein, 146 aa, Artificial Sequence
  derived and/or modified sequence
MLLWCPPQCACSLGVFPSAPSPVWGTRRSCEPATRVPEVWILSPLLRHGGHTQTQNHTASPRSPVMESPKKKNQQLKVGILHLGSRQKKIRIQLRSQCATWKVICKSCISQTPGINLDLGSGVKVKIIPKEEHCKMPEAGEEQPQV

SEQ ID NO: 38460 - protein, 81 aa, Artificial Sequence
  derived and/or modified sequence
MESPKKKNQQLKVGILHLGSRQKKIRIQLRSQCATWKVICKSCISQTPGINLDLGSGVKVKIIPKEEHCKMPEAGEEQPQV

SEQ ID NO: 38461 - DNA, 441 bp, Artificial Sequence
  derived and/or modified sequence
atgctgctgtggtgccccccccagtgcgcctgcagcctgggcgtgttccccagcgcccccagccccgtgtggggcaccagaagaagctgcgagcccgccaccagagtgcccgaggtgtggatcctgagccccctgctgagacacggcggccacacccagacccagaaccacaccgccagccccagaagccccgtgatggagagccccaagaagaagaaccagcagctgaaggtgggcatcctgcacctgggcagcagacagaagaagatcagaatccagctgagaagccagtgcgccacctggaaggtgatctgcaagagctgcatcagccagacccccggcatcaacctggacctgggcagcggcgtgaaggtgaagatcatccccaaggaggagcactgcaagatgcccgaggccggcgaggagcagccccaggtgtag

SEQ ID NO: 38462 - DNA, 246 bp, Artificial Sequence
  derived and/or modified sequence
atggagagccccaagaagaagaaccagcagctgaaggtgggcatcctgcacctgggcagcagacagaagaagatcagaatccagctgagaagccagtgcgccacctggaaggtgatctgcaagagctgcatcagccagacccccggcatcaacctggacctgggcagcggcgtgaaggtgaagatcatccccaaggaggagcactgcaagatgcccgaggccggcgaggagcagccccaggtgtag

SEQ ID NO: 38463 - DNA, 441 bp, Artificial Sequence
  derived and/or modified sequence
atgctgctgtggtgtccacctcagtgcgcctgtagtttgggcgtattccctagcgcaccctcgccggtttggggaaccagacggtcttgcgagccggcgactcgcgtccccgaagtgtggattttgtccccactactgcggcacggcggccatacgcagacccagaatcatactgcttctccccgcagccctgtgatggagtccccaaagaagaagaaccagcagttaaaagtggggatactgcatctggggtctaggcagaagaagatccgcatacaacttagatcccagtgtgccacatggaaggtgatttgcaagagttgcatcagtcaaaccccaggaatcaacctcgatttggggtctggcgtgaaagtaaaaattattccaaaagaagagcattgtaagatgcccgaagctggagaggaacagccgcaggtgtag

SEQ ID NO: 38464 - DNA, 441 bp, Artificial Sequence
  derived and/or modified sequence
atgctgctgtggtgcccaccacaatgcgcttgcagcctcggggtgttcccttctgcccctagccccgtgtggggtactcgccgctcctgcgagcccgcaacccgcgtgcccgaggtgtggattctgagtcctctccttagacacggcggtcacacgcagactcagaaccacacagcgtcccctcggagcccggtgatggaaagcccaaaaaagaaaaatcagcaactgaaagtggggatcctgcatctgggaagtcggcagaaaaaaatccggatccaactgcgctcacagtgtgcaacttggaaggtgatctgcaaatcctgtatcagtcagacccccggaatcaatctggacctgggctcaggggtcaaggtgaagatcatacccaaagaggagcattgcaagatgccagaggccggggaggagcagcctcaggtgtag

SEQ ID NO: 38465 - DNA, 246 bp, Artificial Sequence
  derived and/or modified sequence
atggaatccccaaagaaaaaaaaccagcaattgaaggtgggaatattgcacctgggcagtcggcagaaaaagataaggatccagctgcgttctcaatgcgctacgtggaaagtcatctgcaagtcctgcatcagccaaaccccagggatcaatctggacttaggctcaggcgttaaagtgaagatcatccctaaagaggaacattgcaaaatgcctgaggctggagaagaacaacctcaggtgtag

SEQ ID NO: 38466 - DNA, 441 bp, Artificial Sequence
  derived and/or modified sequence
atgctcttgtggtgcccaccacagtgtgcttgctctttgggagtattccccagcgcaccatcgcccgtgtgggggacaagacggtcctgtgagccagcgaccagagttcctgaggtctggattcttagcccgctactacgccatggagggcatacccagacacagaatcatacggcctcccctcggagccctgtgatggagtctcccaagaagaagaatcagcaacttaaggtgggcatcctacacctggggtctcgccagaaaaagatccgcatccagctgagaagtcagtgtgcgacctggaaggttatttgtaaatcatgtatctcccaaacaccagggattaaccttgacctcggcagtggtgtgaaggtcaagatcatccccaaggaggagcactgtaagatgcccgaagctggggaagagcagccccaggtttag

SEQ ID NO: 38467 - DNA, 441 bp, Artificial Sequence
  derived and/or modified sequence
atgctgctgtggtgccccccccagtgtgcctgcagcctgggcgtcttccccagcgcccccagccctgtgtggggcaccaggaggagctgtgagcccgccaccagggtgcctgaggtgtggatcctgagccccctgctgcggcacggcggccacacccagacccagaaccacacagccagccccaggagccctgtgatggagagccccaagaagaagaaccagcagctgaaggtgggcatcctgcacctgggcagccggcagaagaagatccgcatccagctgcggagccagtgtgccacctggaaggtgatctgcaagagctgcatcagccagaccccaggcatcaacctggacctgggcagcggcgtgaaggtgaagatcatccccaaggaggagcactgcaagatgcctgaggccggggaggagcagccccaggtgtag

SEQ ID NO: 38468 - DNA, 246 bp, Artificial Sequence
  derived and/or modified sequence
atggagagccccaagaagaagaaccagcagctgaaggtgggcatcctgcacctgggcagccggcagaagaagatccgcatccagctgcggagccagtgtgccacctggaaggtgatctgcaagagctgcatcagccagaccccaggcatcaacctggacctgggcagcggcgtgaaggtgaagatcatccccaaggaggagcactgcaagatgcctgaggccggggaggagcagccccaggtgtag

SEQ ID NO: 38469 - DNA, 441 bp, Artificial Sequence
  derived and/or modified sequence
atgctgctgtggtgccccccccagtgcgcctgcagcctgggcgtgtttcccagcgccccatcccctgtctgggggactcgcaggagttgtgaacccgccaccagagtgccggaagtgtggattctgtcacccctgctaagacacggggggcacacccaaacacagaaccataccgcttcgcccaggtcaccggttatggaatcacctaagaaaaaaaatcagcagctgaaggtcgggattctgcaccttggtagtcgacagaagaaaatcagaatccaactgcggtcccagtgtgcgacgtggaaggttatctgtaaaagctgcatctctcagacgccaggtataaacctcgatcttgggagtggagtgaaagtgaaaataatcccaaaagaagagcactgtaaaatgcccgaggccggtgaggaacaacctcaggtgtag

SEQ ID NO: 38470 - DNA, 441 bp, Artificial Sequence
  derived and/or modified sequence
atgctgctgtggtgccccccccagtgcgcctgcagcctgggcgtgtttccttctgccccatctcccgtttgggggactcggcgctcctgcgaacctgccacgcgcgttcctgaggtctggatcctaagccctctcctccgccacggtggtcacacccagactcagaaccataccgcctcgccacgcagtccagtgatggaatcgcccaagaaaaagaatcaacaattaaaggtgggcattcttcatttaggctctcgccagaaaaagattcgcatccaactgcgtagccagtgcgccacatggaaggtgatatgtaagagctgtatttcacagacaccgggcatcaacctggaccttggctccggggtgaaagtcaaaattatcccaaaagaggagcattgtaaaatgcccgaagcaggtgaagaacagccgcaggtctag

SEQ ID NO: 38471 - DNA, 246 bp, Artificial Sequence
  derived and/or modified sequence
atggagagccccaagaagaagaaccagcagctgaaggtgggcatcttgcacctcggtagtagacagaaaaaaattagaatccagcttagatctcagtgcgcaacttggaaggtaatttgtaagtcttgcatcagtcaaacccccggtattaatcttgacctggggagcggggtcaaagttaagataattcccaaggaagaacattgcaagatgcccgaggccggtgaagagcaaccacaggtgtag

SEQ ID NO: 38472 - DNA, 441 bp, Artificial Sequence
  derived and/or modified sequence
atgctgctgtggtgccccccccagtgcgcctgcagcctgggcgtgttcccatccgcacccagcccggtatggggcaccaggcgatcctgcgaacccgccacccgagtgcccgaggtgtggatattatctccactgctcaggcatggcgggcacacccagacccagaatcataccgcctccccccggagccctgtgatggagagccccaagaaaaaaaatcagcagctcaaggtggggatcttacatctcggctcaagacagaaaaaaattaggattcaattgagatctcagtgtgctacttggaaggtgatatgtaaatcctgcatctcgcagaccccaggaataaatttggatcttggttctggcgttaaagtgaagattatccctaaggaagagcactgtaagatgcctgaagcgggggaggagcaaccccaggtctag

SEQ ID NO: 38473 - DNA, 441 bp, Artificial Sequence
  derived and/or modified sequence
atgctgctatggtgcccaccccagtgcgcctgctctcttggtgtttttccaagcgctcccagccccgtctggggaacaagacggtcatgcgaaccagctacccgcgtgcctgaggtgtggatcctgtccccgctactccggcacggcggacacacccagactcagaaccacacagcatcccctagatctcctgtcatggagtctcctaagaaaaaaaatcaacagttgaaggtcggcatccttcaccttggctcacgccaaaagaagatccgcatccaactgcgctcacagtgtgctacctggaaggtaatttgcaaaagttgtatttcgcagaccccaggcatcaatttggatctcgggtctggggtcaaggtcaagatcattccgaaggaagaacattgtaagatgcccgaggccggtgaagaacagccccaggtatag

SEQ ID NO: 38474 - DNA, 441 bp, Artificial Sequence
  derived and/or modified sequence
atgctgctgtggtgtcctccccaatgcgcttgctccctaggggtttttccctcagctccatcccctgtgtggggaacaagaaggtcctgcgagccagcaacacgcgttccagaagtctggattctctcgcccctgctgagacatggcggacatacgcagacccagaatcataccgccagcccacggagccccgtgatggaatccccgaagaaaaagaatcagcagctgaaggtcgggatcttgcatctcggtagcagacagaagaaaataagaatccagctgaggtcacaatgcgccacctggaaggtaatttgcaagagctgcattagtcagacacccggaattaatctggatctgggttctggggtcaaggtcaaaataatcccgaaagaagagcattgcaaaatgcctgaagctggtgaggagcagccacaggtctag

SEQ ID NO: 38475 - DNA, 246 bp, Artificial Sequence
  derived and/or modified sequence
atggaatctcccaagaaaaaaaatcagcagcttaaagttggtattctccatctcggaagccggcaaaagaaaattcggattcagctaagatctcagtgcgccacctggaaggtaatctgcaaatcctgcatcagccagacacctgggataaatttggacctgggatcaggagtgaaggttaaaatcattcccaaagaagagcattgtaaaatgccagaggctggtgaagagcagccccaagtttag

SEQ ID NO: 38476 - DNA, 441 bp, Artificial Sequence
  derived and/or modified sequence
atgttgctttggtgtcccccacagtgtgcatgctctctaggcgtttttccctctgcccctagccccgtttgggggacacggagaagctgcgagcctgcgacgagagtcccagaggtgtggatacttagtcccctcctccgtcacggcggacacactcagactcagaaccacaccgcgagtcccagatcccctgtgatggaaagcccaaaaaagaaaaaccagcaactgaaggtaggcatactgcacttggggagtaggcaaaagaagatcaggattcagcttcgttcacagtgcgccacttggaaggttatatgtaaatcctgcataagccaaaccccgggaatcaacctggacttgggctccggcgttaaggtcaagattattcctaaagaggagcattgcaaaatgccggaagccggtgaggaacagccccaggtgtag

SEQ ID NO: 38477 - DNA, 622 bp, Artificial Sequence
  derived and/or modified sequence
gttaatggggacctgggaaggagcataggacagggcaaggcgggataaggaggggcaccacagcccttaaggcacgagggaacctcactgcgcatgctcctttggtgcccacctcagtgcgcatgttcactgggcgtcttcccatcggccccttcgccagtgtggggaacgcggcggagctgtgagccggcgactcgggtccctgaggtctggattctttctccgctactgagacacggcggacacacacaaacacagaaccacacagccagtcccaggagcccagtaatggagagccccaaaaagaagaaccagcagctgaaagtcgggatcctacacctgggcagcagacagaagaagatcaggatacagctgagatcccagtgcgcgacatggaaggtgatctgcaagagctgcatcagtcaaacaccggggataaatctggatttgggttccggcgtcaaggtgaagataatacctaaagaggaacactgtaaaatgccagaagcaggtgaagagcaaccacaagtttaaatgaagacaagctgaaacaacgcaagctggttttatattagatatttgacttaaactatctcaataaagttttgcagctttcaccaaa

SEQ ID NO: 38478 - DNA, 614 bp, Artificial Sequence
  derived and/or modified sequence
ggacctgggaaggagcataggacagggcaaggcgggataaggaggggcaccacagcccttaaggcacgagggaacctcactgcgcatgctcctttggtgcccacctcagtgcgcatgttcactgggcgtcttcccatcggccccttcgccagtgtggggaacgcggcggagctgtgagccggcgactcgggtccctgaggtctggattctttctccgctactgagacacggcggacacacacaaacacagaaccacacagccagtcccaggagcccagtaatggagagccccaaaaagaagaaccagcagctgaaagtcgggatcctacacctgggcagcagacagaagaagatcaggatacagctgagatcccagtgcgcgacatggaaggtgatctgcaagagctgcatcagtcaaacaccggggataaatctggatttgggttccggcgtcaaggtgaagataatacctaaagaggaacactgtaaaatgccagaagcaggtgaagagcaaccacaagtttaaatgaagacaagctgaaacaacgcaagctggttttatattagatatttgacttaaactatctcaataaagttttgcagctttcaccaaa

SEQ ID NO: 38479 - DNA, 246 bp, Artificial Sequence
  derived and/or modified sequence
atggagtcgcctaaaaagaagaaccagcagctcaaggtgggaatcttacacctggggtctagacagaagaagattcgcatccagctccgtagtcagtgtgccacgtggaaggtcatttgcaagagttgcatttcgcaaactcctggtattaatctggacctgggcagtggagtcaaggtgaaaatcatacccaaagaagagcactgcaagatgccagaggcgggtgaagagcagccgcaggtctag

SEQ ID NO: 38480 - DNA, 441 bp, Artificial Sequence
  derived and/or modified sequence
atgctgttgtggtgcccacctcaatgtgcctgctcccttggcgtgtttccatccgcaccatcaccagtctgggggacaaggaggagctgtgaaccggctactagggtgcctgaggtatggatcttatcgccactcctgcgtcacggcggccacacccaaacccagaaccacacagcttccccccggtcccctgttatggagtctccaaagaagaagaaccagcagctaaaggtcggcattttgcaccttggctccaggcaaaaaaaaatcagaattcagctgagaagtcagtgtgcgacctggaaagtaatttgcaaatcttgcatctcacaaacacctgggatcaatctggatctgggctccggagtaaaggtgaagattattcctaaagaggagcactgcaagatgcccgaggccggcgaagaacagcctcaggtatag

SEQ ID NO: 38481 - DNA, 246 bp, Artificial Sequence
  derived and/or modified sequence
atggaatctcccaagaagaagaaccagcagcttaaagtgggtattctgcatctggggtctcggcaaaaaaaaatcagaattcagcttcgtagtcagtgcgccacttggaaagttatttgtaagtcctgtatttctcagactccagggataaacctcgatcttggcagcggcgtcaaggtgaaaattataccaaaagaggaacactgtaagatgccagaggccggggaggaacagcctcaggtgtag

SEQ ID NO: 38482 - DNA, 441 bp, Artificial Sequence
  derived and/or modified sequence
atgctgctgtggtgcccacctcagtgcgcatgctcgttaggggtttttccaagtgctccaagcccggtttggggcactcggcgttcttgcgaacccgccacaagggtgcctgaggtttggatcctgtcccccctactcagacatggtggacatactcagacacagaatcacaccgcctcacctagaagcccggtaatggagtctcctaagaaaaagaaccagcaactgaaggttggaatcctgcacttggggtctagacagaaaaagatcagaatccagttgagatctcagtgtgcgacttggaaggtcatatgtaaatcatgcatctctcagacaccaggcataaatctcgacctcgggtcaggggtcaaagtgaaaataataccaaaggaagagcattgcaagatgccagaggccggagaagagcagccccaggtgtag

SEQ ID NO: 38483 - DNA, 246 bp, Artificial Sequence
  derived and/or modified sequence
atggagtcgccaaagaaaaagaaccaacagctgaaagtgggcatcctgcacctgggcagccggcaaaaaaagatccgaatacagttgcggtcacagtgcgcaacttggaaagtcatttgcaagtcttgtatctcgcagacccccggtatcaatctcgatttaggttctggagtaaaagttaagatcatcccaaaggaggaacactgcaaaatgccagaagcaggagaggaacaaccccaggtgtag

SEQ ID NO: 38484 - DNA, 246 bp, Artificial Sequence
  derived and/or modified sequence
atggaaagtccaaaaaaaaagaaccagcagttaaaggtgggaatccttcatctcggatctagacagaagaagatcagaattcagttaagatcccaatgtgccacatggaaggtgatctgtaagtcctgcatttcccagacaccaggcattaacctcgatcttggatccggagtcaaagtcaagattatccctaaagaagagcactgtaagatgcctgaagcaggcgaggagcagccacaggtttag

SEQ ID NO: 38485 - DNA, 441 bp, Artificial Sequence
  derived and/or modified sequence
atgttactctggtgtccccctcaatgtgcctgctctctgggcgtcttcccttctgcgccatccccagtctggggtacgcgaagaagctgtgagccagccacacgagtgcctgaggtctggatcttgtcacctcttttgagacacggcggacacacacaaacacaaaaccataccgcatcaccacgttcacccgttatggagtctccgaagaagaaaaaccagcagctgaaggtggggatcttgcacctgggctccaggcagaaaaagatccgtattcagcttcggtcccagtgcgccacatggaaggtaatctgcaaaagctgtatcagccagacacccggaattaacctcgacctggggagcggcgtgaaggtgaaaattattcccaaagaggagcattgcaaaatgccagaagccggcgaggaacaaccacaggtgtag

SEQ ID NO: 38486 - DNA, 246 bp, Artificial Sequence
  derived and/or modified sequence
atggagtcccctaagaagaagaaccaacagctgaaggttggcattctgcacctcggcagtagacagaagaagatccgcatccagctgcggagtcagtgcgcgacgtggaaggtcatctgcaagtcgtgtataagccaaacacccggtattaacctcgacctgggatctggagttaaagttaaaataatacccaaagaggagcactgtaaaatgcctgaagccggcgaggaacagccccaggtttag

SEQ ID NO: 38487 - DNA, 441 bp, Artificial Sequence
  derived and/or modified sequence
atgctactgtggtgtccaccacagtgcgcgtgttctcttggtgtcttcccatccgctccatcacccgtgtggggtacccggagaagttgtgagcccgcaactcgcgtcccggaggtatggatcctttcccccctgcttagacacgggggacatactcagactcagaatcacaccgcctcccccagaagtcccgtgatggaatcacccaagaaaaaaaatcagcagctcaaggtcggcatcctgcatctcggctcccgacagaagaagatccggatccagttgagatcacaatgcgcgacctggaaggtaatctgtaagtcttgcatctctcaaacaccaggcatcaacctggacttgggtagcggggtcaaggtaaagatcattcccaaagaggaacactgcaaaatgcctgaggctggtgaggaacagcctcaggtgtag

SEQ ID NO: 38488 - DNA, 246 bp, Artificial Sequence
  derived and/or modified sequence
atggagagccccaagaagaagaaccagcagctgaaggtgggcatcctgcacctcggatcacggcagaaaaagatacgtattcaacttaggtcgcagtgcgctacgtggaaggtgatttgtaagtcctgtatcagccagactccagggatcaacctcgacttggggtccggagttaaggtgaaaatcatcccgaaggaggagcattgcaaaatgcccgaggcaggagaagaacagccccaggtgtag

SEQ ID NO: 38489 - DNA, 441 bp, Artificial Sequence
  derived and/or modified sequence
atgctgctgtggtgccccccccagtgcgcctgcagcctgggcgtgttcccttctgcaccttcacctgtctgggggacaagacggtcctgtgaacctgccactagggtgcccgaggtgtggatactgtcacccctcttaaggcacggggggcatacacagacccaaaaccacaccgcaagtccccggtcgcccgtgatggagagtcccaagaagaagaatcaacagcttaaagtcggtatactccacctggggtctaggcagaagaaaattcgaattcaacttaggtcccaatgcgccacgtggaaagtgatctgcaaatcctgcatatctcaaactcctggaattaacttggacctgggttccggcgttaaagtgaagattatccctaaagaggagcattgcaagatgcctgaagccggagaagaacaaccccaagtgtag

SEQ ID NO: 38490 - DNA, 246 bp, Artificial Sequence
  derived and/or modified sequence
atggagagccccaagaagaagaaccagcagctgaaggtgggcatcctgcatctgggcagcaggcagaaaaaaatcaggatccaattgaggtctcaatgtgccacctggaaggtaatttgcaagagctgcataagccaaactcctggaattaacctggaccttggaagcggggtgaaggtcaagattatccctaaagaggaacactgcaaaatgccggaagctggggaggagcagccgcaagtttag

SEQ ID NO: 38491 - DNA, 441 bp, Artificial Sequence
  derived and/or modified sequence
atgctgctgtggtgccccccccagtgcgcctgcagcctgggcgtgtttccttctgcaccctcacctgtgtgggggacaagacgaagttgcgagcccgctactcgggttccagaggtctggatcctgtcacctctgctgcgacacggaggacacacccagacccagaaccatacggcaagtccccgctcacccgttatggagtcccccaaaaaaaaaaaccagcagctgaaagtcggcatcctgcatttagggtccaggcagaagaagattcgcatacaactgcggtcgcagtgcgccacatggaaagttatctgcaaatcttgcatttcacagaccccagggattaacttggatctcggcagtggagtgaaggttaaaatcattccgaaggaagagcactgcaagatgccagaggcgggagaggagcagccccaggtgtag

SEQ ID NO: 38492 - DNA, 246 bp, Artificial Sequence
  derived and/or modified sequence
atggagagccccaagaagaagaaccagcagctgaaggtgggcatcttacacctcggatcccgtcagaagaagattaggattcagttaagaagtcagtgtgctacctggaaagtgatttgcaagtcctgtatatcgcagactccgggcattaacctcgacttaggttccggcgtgaaggtgaagataatccccaaagaggagcactgtaaaatgcccgaggctggcgaggaacagccacaggtatag

SEQ ID NO: 38493 - DNA, 246 bp, Artificial Sequence
  derived and/or modified sequence
atggagagccccaagaagaagaaccagcagctgaaggtgggcatcctgcacctggggtctcggcagaaaaaaatccgaattcaattgcgctctcagtgcgccacctggaaagtcatctgtaagtcatgcatttcacagacccccgggattaatctcgacctaggatctggtgtgaaagtgaagatcatccctaaagaggaacactgtaagatgccagaagctggcgaagagcagcctcaagtgtag

SEQ ID NO: 38494 - DNA, 441 bp, Artificial Sequence
  derived and/or modified sequence
atgctgctgtggtgccccccccagtgcgcctgcagcctgggcgtgttcccttcggccccaagtcctgtgtggggaactcgacgttcttgcgagcccgcgactagggtgcccgaggtatggatcctcagtcctctgttgcggcatggcgggcatactcagacacagaaccatacggcctctcccaggagccccgtcatggagagccctaagaagaagaaccagcagctaaaagtcgggattcttcatctcggttcacgtcagaaaaagattaggatccaattgcgcagccagtgcgccacctggaaggtgatttgcaaatcttgcatatctcagacgcccggaatcaatttagaccttggcagcggtgtgaaagttaagatcattcctaaagaagagcactgcaaaatgcccgaagctggcgaggaacagccgcaggtatag

SEQ ID NO: 38495 - DNA, 246 bp, Artificial Sequence
  derived and/or modified sequence
atggagagccccaagaagaagaaccagcagctgaaggtgggcatcctccacctggggtcgagacagaaaaagatacgcatacagcttcgctcccagtgtgccacctggaaagtgatctgtaagtcttgcatatctcaaacacccggaatcaaccttgatctgggctccggcgtgaaggtcaagattatccctaaagaagagcattgcaagatgccggaggccggcgaagagcagcctcaagtgtag

SEQ ID NO: 38496 - DNA, 441 bp, Artificial Sequence
  derived and/or modified sequence
atgctgctgtggtgccccccccagtgcgcctgcagcctgggcgtgttcccctcagcaccatccccagtttggggtacaagaagatcatgcgaaccagccaccagagttccagaagtatggatccttagccctctgctgagacatggaggacatactcaaacacagaatcataccgcctcgccaagaagtcccgtcatggaatccccaaagaagaaaaaccaacagctgaaggttggaattctccaccttggttcacggcagaaaaagatccggatccagctgcgctcacagtgcgccacctggaaggtgatttgcaagtcctgtataagtcagacccctggaattaacttggatttaggctccggcgtgaaggtaaaaattatacccaaagaggaacactgcaaaatgcccgaagctggagaggagcagcctcaggtgtag

SEQ ID NO: 38497 - DNA, 246 bp, Artificial Sequence
  derived and/or modified sequence
atggagtctcctaagaagaaaaaccagcagctgaaagtcgggatcttgcacttaggttcccgtcagaagaaaatccggatccagttgagaagtcagtgcgccacttggaaggtcatttgtaagagctgtattagccagacgccgggaattaatttggatttgggcagcggagtaaaggtcaagatcattccgaaagaagagcactgcaaaatgccggaggctggggaagaacagcctcaggtgtag

SEQ ID NO: 38498 - DNA, 441 bp, Artificial Sequence
  derived and/or modified sequence
atgttactatggtgtccaccgcagtgtgcctgctcccttggcgtttttcctagtgcccctagtccagtttggggaacccgcagaagttgtgagcctgccaccagggtgcctgaggtgtggattctgtccccactgcttaggcacgggggacacacccagacccagaaccacacggccagtcctagatcccctgtcatggagagcccaaagaaaaaaaaccagcagctcaaagtgggcattctacatctggggtcacgacagaaaaagatccgcatccagctaaggagccagtgtgcgacttggaaagtgatctgcaagtcatgcatctctcagaccccaggcatcaacctggatctgggttcaggcgtcaaagtgaagatcataccaaaggaggagcattgcaagatgccagaagcgggagaagagcaaccccaagtctag

SEQ ID NO: 38499 - DNA, 246 bp, Artificial Sequence
  derived and/or modified sequence
atggagtcaccaaagaagaagaatcagcagctcaaggtgggcatcttgcatctgggatcccggcaaaagaagattagaattcagttgcgcagtcaatgcgcgacctggaaggtgatatgtaaaagttgtatcagtcagacccctggcattaatctggatcttggatccggggtgaaggttaaaattatcccaaaagaagaacattgcaaaatgccagaagcgggtgaagaacaaccccaggtgtag

SEQ ID NO: 38500 - DNA, 441 bp, Artificial Sequence
  derived and/or modified sequence
atgctgctgtggtgccctcctcagtgcgcctgcagcttgggtgttttcccatcagcgccaagcccagtgtggggcactcggaggtcatgcgagcccgcaaccagagtgccggaggtctggattctctcccccctgctccgacatggtggccatacccaaactcagaatcacacagcgtctccaagatccccagtcatggaaagccccaaaaagaaaaatcagcagctgaaagtgggcatcttgcatctcgggagcagacagaaaaagattcgcattcagttaagaagccagtgcgcaacatggaaagtgatatgtaagagctgcatttcccagacacctggaatcaatttggacctcggtagtggggtgaaagtgaaaataattccaaaggaagaacattgcaagatgccggaagcaggagaagagcaaccgcaggtgtag

SEQ ID NO: 38501 - DNA, 246 bp, Artificial Sequence
  derived and/or modified sequence
atggaatctcccaaaaaaaagaaccagcagctgaaggtcggcattcttcacctcggcagtaggcagaagaaaattagaatccaacttagaagtcaatgtgctacctggaaagtcatatgcaaatcctgcatcagtcagacacccggaattaatcttgatctggggagcggcgtcaaagtcaagattataccaaaagaggaacactgcaagatgcctgaagcaggtgaggagcagccacaggtttag

SEQ ID NO: 38502 - DNA, 246 bp, Artificial Sequence
  derived and/or modified sequence
atggaaagccccaagaagaagaatcagcagttgaaggtcggcatattgcacctcggctcgcggcagaagaaaatacggatacagctgcggagtcagtgcgctacatggaaggtcatctgtaaatcgtgtatctctcagactcctggaatcaatctggacttgggatcaggtgtcaaggttaaaatcatacctaaagaagaacattgcaaaatgccggaagccggagaggagcaacctcaggtctag

SEQ ID NO: 38503 - DNA, 441 bp, Artificial Sequence
  derived and/or modified sequence
atgctgctgtggtgccccccacaatgtgcctgcagcttgggcgtattccccagtgcacctagccccgtatggggcactcggaggagctgtgaacccgctacacgcgttcccgaggtgtggatcctaagtccccttttgcggcatgggggacacacacagacgcaaaatcataccgcgagcccaaggagtccagtgatggaatcaccaaagaagaagaaccagcagctaaaggtggggatcctgcatctgggctctcgtcagaaaaagataagaattcagctgagaagtcagtgtgcaacttggaaggtgatttgcaagtcctgtatttcccaaacaccgggaatcaatctggacctgggttctggagtgaaagtcaagattattccaaaagaggagcactgcaaaatgccagaggcaggagaagaacagcctcaagtctag

SEQ ID NO: 38504 - DNA, 246 bp, Artificial Sequence
  derived and/or modified sequence
atggaatccccgaaaaagaaaaatcagcagctcaaggtgggtatacttcaccttggcagcagacaaaagaagattcgaatccagttgcggagccagtgcgctacctggaaggtgatctgtaagtcctgcatctctcaaacccctggcattaatctagacctcggctcaggtgttaaagtgaaaatcatccccaaagaagaacattgtaaaatgcctgaggccggtgaggagcagccacaggtctag

SEQ ID NO: 38505 - DNA, 441 bp, Artificial Sequence
  derived and/or modified sequence
atgctgctctggtgtccacctcagtgcgcttgctctctgggggtgtttcccagcgccccatcccccgtgtggggaacccggcgaagttgtgagcctgctacacgggtgccagaagtgtggatactgtcccccctgttacgacacggcggacacacacagacgcaaaaccatacagcctctccaaggagcccagtgatggagtccccaaagaagaaaaatcaacaactgaaggtcgggatactgcacttgggtagccggcagaagaaaattcgcatccagttgagatctcagtgtgcaacgtggaaagtcatctgtaagtcctgcatttctcaaacccctggcatcaacctcgatcttggttctggggtcaaagtgaaaattatcccgaaggaggagcactgcaaaatgccggaggccggtgaagagcagcctcaggtgtag

SEQ ID NO: 38506 - DNA, 472 bp, Artificial Sequence
  derived and/or modified sequence
cctagactaaccagtttgtgttggtcctccgctgagctgttaatccagggaagagttgcccttctgaagaatatgtggatttaatggagaccaagacacacacaaacacagaaccacacagccagtcccaggagcccagtaatggagagccccaaaaagaagaaccagcagctgaaagtcgggatcctacacctgggcagcagacagaagaagatcaggatacagctgagatcccagtgcgcgacatggaaggtgatctgcaagagctgcatcagtcaaacaccggggataaatctggatttgggttccggcgtcaaggtgaagataatacctaaagaggaacactgtaaaatgccagaagcaggtgaagagcaaccacaagtttaaatgaagacaagctgaaacaacgcaagctggttttatattagatatttgacttaaactatctcaataaagttttgcagctttcacc

SEQ ID NO: 38507 - protein, 343 aa, Artificial Sequence
  derived and/or modified sequence
MLVVQMPFSFPMAHFILFVFTVSTIFHVQQRLAKIQAMWELPVQIPVLASTSKALGPSQLRGMWTINAIGRLGNQMGEYATLYALAKMNGRPAFIPAQMHSTLAPIFRITLPVLHSATASRIPWQNYHLNDWMEEEYRHIPGEYVRFTGYPCSWTFYHHLRQEILQEFTLHDHVREEAQKFLRGLQVNGSRPGTFVGVHVRRGDYVHVMPKVWKGVVADRRYLQQALDWFRARYSSLIFVVTSNGMAWCRENIDTSHGDVVFAGDGIEGSPAKDFALLTQCNHTIMTIGTFGIWAAYLTGGDTIYLANYTLPDSPFLKIFKPEAAFLPEWTGIAADLSPLLKH

SEQ ID NO: 38508 - protein, 220 aa, Artificial Sequence
  derived and/or modified sequence
MLVVQMPFSFPMAHFILFVFTVSTIFHVQQRLAKIQAMWELPVQIPVLASTSKALGPSQLRGMWTINAIGRLGNQMGEYATLYALAKMNGRPAFIPAQMHSTLAPIFRITLPVLHSATASRIPWQNYHLNDWMEEEYRHIPGEYVRFTGYPCSWTFYHHLRQEILQEFTLHDHVREEAQKFLRGLQVNGSRPGTFVGVHVRRGDYVHVMPKVWKGVVADR

SEQ ID NO: 38509 - DNA, 1468 bp, Artificial Sequence
  derived and/or modified sequence
accgatgctggaagggtttctttggccctgagtgaagagagacccagagggaacactgaggtgcctgcccaaccactctgtcccggtttccttcagcaggaccagccatgctggtcgttcagatgcctttctcctttcccatggcccacttcatcctctttgtctttacggtttccactatatttcacgttcagcagcggctagcgaagattcaagccatgtgggagttaccggtgcagataccagtgctagcctcaacatcaaaggcactgggacccagccagctcagggggatgtggacgatcaatgcaataggccgcctggggaaccagatgggcgagtacgccacactgtacgccctggccaagatgaacgggcggcccgccttcatcccggcccagatgcacagcaccctggcccccatcttcagaatcaccctgccggtgctgcacagcgccacggccagcaggatcccctggcagaactaccacctgaacgactggatggaggaggaataccgccacatcccgggggagtacgtccgcttcaccggctacccctgctcctggaccttctaccaccacctccgccaggagatcctccaggagttcaccctgcacgaccacgtgcgggaggaggcccagaagttcctgcggggcctgcaggtgaacgggagccggccgggcacctttgtaggggtccatgttcgccgaggggactatgtccatgtcatgccaaaagtgtggaagggggtggtggccgaccggcgatacctacagcaggccctggactggttccgagctcgctacagctccctcatcttcgtggtcaccagtaatggcatggcctggtgtcgggagaacattgacacctcccacggtgatgtggtgtttgctggcgatggcattgagggctcacctgccaaagattttgctctactcacacagtgtaaccacaccatcatgaccattgggacgttcgggatctgggccgcatacctcacgggcggagacaccatctacctggccaattacaccctccccgactcccctttcctcaaaatctttaagccagaggcagccttcctgccggagtggacagggattgccgcagacctgtcccccttactcaagcactaatgctggcccattctttgagaccttttctccttctctgcctccctcaaggtgctgggattacaggtgttagccactgcgcccggccctagagctcactgttttctagttagtccatctggaagtggagcctttttccagtttgcacaaatgtgccatattggcttgtagctggcatgcatccaagtccataggtcctgcctcttcaatcctggctttctagggcctgggatgatcattgctagaactgagagaccagcctggctcagtgaacttcagggcgttccgttcattctttcagtaaatgtttgcagcacatgtgttacatgtca

SEQ ID NO: 38510 - DNA, 3111 bp, Artificial Sequence
  derived and/or modified sequence
accgatgctggaagggtttctttggccctgagtgaagagagacccagagggaacactgaggtgcctgcccaaccactctgtcccggtttccttcagcaggaccaggtgagagaagccatgctggtcgttcagatgcctttctcctttcccatggcccacttcatcctctttgtctttacggtttccactatatttcacgttcagcagcggctagcgaagattcaagccatgtgggagttaccggtgcagataccagtgctagcctcaacatcaaaggcactgggacccagccagctcagggggatgtggacgatcaatgcaataggccgcctggggaaccagatgggcgagtacgccacactgtacgccctggccaagatgaacgggcggcccgccttcatcccggcccagatgcacagcaccctggcccccatcttcagaatcaccctgccggtgctgcacagcgccacggccagcaggatcccctggcagaactaccacctgaacgactggatggaggaggaataccgccacatcccgggggagtacgtccgcttcaccggctacccctgctcctggaccttctaccaccacctccgccaggagatcctccaggagttcaccctgcacgaccacgtgcgggaggaggcccagaagttcctgcggggcctgcaggtgaacgggagccggccgggcacctttgtaggggtccatgttcgccgaggggactatgtccatgtcatgccaaaagtgtggaagggggtggtggccgaccggcgatacctacagcaggccctggactggttccgagctcgctacagctccctcatcttcgtggtcaccagtaatggcatggcctggtgtcgggagaacattgacacctcccacggtgatgtggtgtttgctggcgatggcattgagggctcacctgccaaagattttgctctactcacacagtgtaaccacaccatcatgaccattgggacgttcgggatctgggccgcatacctcacgggcggagacaccatctacctggccaattacaccctccccgactcccctttcctcaaaatctttaagccagaggcagccttcctgccggagtggacagggattgccgcagacctgtcccccttactcaagcactaatgctggcccattctttgagaccttttctccttctctgcctccctcaagatgagtgcccgggcatgagaagcacatggttccatgagcaggacccatctctcttctgtgaagatgcgttgggctgcaagtaacagaaatctcagtgaacagtggcctggcgtggtggctcatgcctgtaatgctcgcactttgtgaggccagggtgggtggatcacttgaggtcaggagttcaagactagcctggccaacatggtgaaaccccatctcgactaaaaatacaaaaattagccaggcgtggtggtgcacacctgtaatcccagctactcgggaggctgaggcaagagaatcacttgaacccaggaggcggaggttgcagtgagccaagatggtgccgctgcactccagtctgggtgacacagcaagactccatctcaaaaaaaaaaaaaaaaaaaagaaaagaaaaagaaatgaatgggttcaaagaccataatcatgcatatcacataagaccagaagtggcccaggtccagggtcagttaatttagcggctccacaaagtcatcagtcacctgagctccatccatcttcacatgctgtgctaccatttcttagctgtatcatcccatggtcccaaaagggctgctacacatccagccatcacatgcagataattcctttcaaaaacagcagaaagaggctcgttcttgtcttggtcccttttgaagaatgaatgaaaccttcctaagccttccagcaatttccccccaactccgatgggtaggaattgtcacatacccatgtgacccgataggaggcaaaagaaatgagacttctgggattagtttagcctcagattctgcagctgagaagttgatcagccacctctgaaggacatgcagcttgcagaaaattagggtggtgttaccaaggtgaaaaggggaaatggctttagagtagacaacagagatgccctgaggggttgtgtaggttgttcactgcaggaagtcccctggttaagaaggcaagtggggtttaaacagacccacagtctactcatcaaaccaggtgtccttggcattgtgtccacccagagagctcactgttttcttttctttttcttttctttttttttttttttttgagatggagtcttgctgcatcccccaggctggagtgcagtggcatgatcttggctcactgcagcctccgcctcccaggttcaagcgattctcctgcctcagcctcccgagtagctaggattacaggtgcgtgccaccacgcccagctaatttttatatgtttagtggaaatggagtttcaccatgttggtcaggctggtctcaaactcctgacctcatgatccgccttcctcggcctcccaaagtgctgggattacaggtgttagccactgcgcccggccctagagctcactgttttctagttagtccatctggaagtggagcctttttccagtttgcacaaatgtgccatattggcttgtagctggcatgcatccaagtccataggtcctgcctcttcaatcctggctttctagggcctgggatgatcattgctagaactgagagaccagcctggctcagtgaacttcagggcgttccgttcattctttcagtaaatgtttgcagcacatgtgttacatgtcaggcagtgaaaccccccacagcagccttccctctcagaggatacatttgtaaccattacacagtcatcaaaggaataattttttttaatcaccagtgtgcatacagtcatggagttgggtattcccagctaccagggaggctgaggtgggaggattgcttgatgccaggagttagggaatatagtgcaccgtgattggacttgcgaatagccactgcactgcggcctggacgacgtagtgataccctgactcttataaataaataaatgaataaacacaattatgactttgcggatggg

SEQ ID NO: 38511 - DNA, 771 bp, Artificial Sequence
  derived and/or modified sequence
agtcaccgatgctggaagggtttctttggccctgagtgaagagagacccagagggaacactgaggtgcctgcccaaccactctgtcccggtttccttcagcaggaccagccatgctggtcgttcagatgcctttctcctttcccatggcccacttcatcctctttgtctttacggtttccactatatttcacgttcagcagcggctagcgaagattcaagccatgtgggagttaccggtgcagataccagtgctagcctcaacatcaaaggcactgggacccagccagctcagggggatgtggacgatcaatgcaataggccgcctggggaaccagatgggcgagtacgccacactgtacgccctggccaagatgaacgggcggcccgccttcatcccggcccagatgcacagcaccctggcccccatcttcagaatcaccctgccggtgctgcacagcgccacggccagcaggatcccctggcagaactaccacctgaacgactggatggaggaggaataccgccacatcccgggggagtacgtccgcttcaccggctacccctgctcctggaccttctaccaccacctccgccaggagatcctccaggagttcaccctgcacgaccacgtgcgggaggaggcccagaagttcctgcggggcctgcaggtgaacgggagccggccgggcacctttgtaggggtccatgttcgccgaggggactatgtccatgtcatgccaaaagtgtggaagggggtggtggccgaccgg

SEQ ID NO: 38512 - DNA, 1032 bp, Artificial Sequence
  derived and/or modified sequence
atgttggtcgttcaaatgcccttctcttttccaatggcccacttcatcctgttcgtcttcaccgtgtccacaattttccatgtccagcagagattagccaaaatccaggcaatgtgggaactgccagttcagattcctgttctcgcttcaacttcgaaggcactgggcccgagtcagttaagggggatgtggacgataaatgcaattgggagactcggaaaccaaatgggggagtacgcaacactctacgcgctcgccaaaatgaacggaagaccagcgttcattccagctcagatgcatagcacattagcccctatttttcgcatcacgttaccagtgttgcactcagctaccgcatcaagaataccgtggcaaaactaccatctcaacgactggatggaagaggagtacaggcacattcctggcgagtatgtgagattcacagggtacccctgtagctggacattctatcaccaccttaggcaggagattttacaggagttcacactgcacgaccacgttcgagaagaggcgcaaaagtttctccggggactccaggtgaacggtagtaggcctggaaccttcgtgggtgtacacgtcagaaggggagactacgttcacgtgatgcccaaggtgtggaagggagtggtggccgatagaaggtatctgcaacaggccctggattggtttcgcgctaggtattcttccttaatattcgtggtgacttccaacggcatggcctggtgccgcgaaaatatcgacactagccatggcgacgtcgtgttcgccggtgatggcatcgaggggtcaccggccaaggattttgccctgctgacccagtgcaaccatacgataatgaccattgggacgttcggcatctgggcggcctatctcactgggggggacacgatctacctggccaattatacacttccagattcaccattcttaaaaatctttaaacctgaagccgcctttctgccggagtggaccggcattgccgccgatctttctccgctgcttaaacactag

SEQ ID NO: 38513 - DNA, 1032 bp, Artificial Sequence
  derived and/or modified sequence
atgctggttgtccagatgccattcagcttccccatggcccactttatcctgttcgtcttcaccgtcagtacaatattccatgtccagcagcggctggctaagatacaggccatgtgggagctgcccgtacagatccctgtgttagcatctacctccaaggccttgggcccatctcagcttcgcggcatgtggacaattaatgcaattggccgcctggggaatcagatgggagaatatgcaactctgtacgccctggccaaaatgaatgggagaccagccttcattcccgcccaaatgcactccactctcgccccaatcttccggattacattaccggtcctccattccgccacagcaagtcgaatcccatggcagaattaccacctgaacgactggatggaggaagagtataggcatatcccaggagagtacgtccgttttactggctatccgtgcagttggacattctaccatcacttgaggcaggagatcctgcaagagtttaccctgcacgaccacgtccgcgaggaagcacagaagttcctccggggattgcaggttaacggttctcggcccggcaccttcgtcggagttcatgtgaggaggggagactacgtgcacgtgatgcctaaagtgtggaaaggcgttgtcgctgaccggcggtatttacaacaggccctcgactggttcagggctcgatatagctcccttatttttgtggtcacatctaatggcatggcttggtgtcgagaaaacattgatacttcccacggtgatgtcgtgttcgctggggatggtattgaaggatcaccagccaaggatttcgccctcctaacccagtgtaatcataccattatgactatcggcacatttggtatctgggctgcctatctgactgggggcgacacgatctacctggccaattataccctgcctgattccccgttcctgaaaatttttaaacctgaggccgcttttttgcctgaatggacgggcattgcggctgacctgtcacctctccttaaacattag

SEQ ID NO: 38514 - DNA, 663 bp, Artificial Sequence
  derived and/or modified sequence
atgttggtggtgcagatgcccttctccttcccaatggctcacttcattctgttcgtgttcaccgtgtccaccatttttcacgtacaacagcgcctcgccaaaatccaggccatgtgggaactgcccgtgcagataccagtgttggcctcaacgagcaaggccttaggaccatcccagctgagagggatgtggactattaatgcaataggccggctggggaaccagatgggcgagtatgctacattgtatgccctcgctaagatgaacggtcgacccgcctttatacccgctcaaatgcactccacactggcgcccatattccggatcaccctgccggtgttgcactcagccacagcttcacgtataccatggcaaaactaccatctcaacgactggatggaggaggagtacagacacataccaggggaatacgtacgtttcacgggatatccatgttcctggaccttttaccatcacctaaggcaggaaatcctccaggagttcacgctgcatgatcacgtcagggaagaggcacagaagtttctgagagggctccaggtgaatgggtcaaggcccggaacattcgttggtgttcacgtcaggcgtggagattatgtccacgttatgcccaaagtgtggaagggggtagtggccgatcggtag

SEQ ID NO: 38515 - DNA, 1032 bp, Artificial Sequence
  derived and/or modified sequence
atgctggtggtgcagatgcccttctccttccccatggcccacttcatcctgtttgtgttcaccgtgtccaccatcttccacgtgcagcagaggctggccaagatccaggccatgtgggagctgcctgtgcagatccctgtgctggccagcaccagcaaggccctgggccccagccagctgcggggcatgtggaccatcaatgccatcggccgcctgggcaaccagatgggagaatatgccaccctgtatgccctggccaagatgaatggccggcctgccttcatcccagcccagatgcacagcaccctggcccccatcttccgcatcaccctgcctgtgctgcacagcgccacagccagccgcatcccctggcagaactaccacctgaatgactggatggaggaggagtaccgccacatccctggagaatatgtgcgcttcaccggctacccctgctcctggaccttctaccaccacctgcggcaggagatcctgcaggagttcaccctgcatgaccacgtgcgggaggaggcccagaagttcctgcggggcctgcaggtgaatggcagccggcccggcacctttgtgggcgtgcacgtgagaagaggagactatgtgcacgtgatgcccaaggtgtggaagggcgtggtggccgaccggcgctacctgcagcaggccctggactggttccgggcccgctacagcagcctcatctttgtggtgaccagcaatggcatggcctggtgcagagaaaatattgacaccagccatggagatgtggtgtttgctggagatggcatcgagggcagccctgccaaggactttgccctgctgacccagtgcaaccacaccatcatgaccatcggcaccttcggcatctgggccgcctacctgactggaggagacaccatctacctggccaactacaccctgcctgacagccccttcctgaagatcttcaagccagaggccgccttcctgcctgagtggacaggaattgctgctgacctgagccccctgctgaagcactag

SEQ ID NO: 38516 - DNA, 663 bp, Artificial Sequence
  derived and/or modified sequence
atgctggtggtgcagatgcccttctccttccccatggcccacttcatcctgtttgtgttcaccgtgtccaccatcttccacgtgcagcagaggctggccaagatccaggccatgtgggagctgcctgtgcagatccctgtgctggccagcaccagcaaggccctgggccccagccagctgcggggcatgtggaccatcaatgccatcggccgcctgggcaaccagatgggagaatatgccaccctgtatgccctggccaagatgaatggccggcctgccttcatcccagcccagatgcacagcaccctggcccccatcttccgcatcaccctgcctgtgctgcacagcgccacagccagccgcatcccctggcagaactaccacctgaatgactggatggaggaggagtaccgccacatccctggagaatatgtgcgcttcaccggctacccctgctcctggaccttctaccaccacctgcggcaggagatcctgcaggagttcaccctgcatgaccacgtgcgggaggaggcccagaagttcctgcggggcctgcaggtgaatggcagccggcccggcacctttgtgggcgtgcacgtgagaagaggagactatgtgcacgtgatgcccaaggtgtggaagggcgtggtggccgacagatag

SEQ ID NO: 38517 - DNA, 1032 bp, Artificial Sequence
  derived and/or modified sequence
atgctggtggtgcagatgcccttcagcttccccatggcccacttcattcttttcgtattcacagtgtctacaatttttcatgtccagcagcggttggcaaaaatacaagccatgtgggagttgccggtgcagattcccgtgcttgcctctaccagcaaagccttgggcccctcacaactcagaggcatgtggacaatcaacgcgatcggaaggctcggaaaccaaatgggagaatacgcgacactgtacgccttagccaaaatgaacggaagacccgcattcataccggcacagatgcactctacgctggctccaatttttagaattactctcccagtccttcatagcgccacggcctcacgaatcccatggcagaactatcacttgaacgactggatggaagaggaatatcgacatatacccggagaatacgtccgctttacagggtatccctgctcttggactttttaccatcacctgagacaggaaattctgcaggagttcactctgcacgatcatgtgcgcgaagaggcacagaagttcctccgtggcctccaagttaacggctcaagaccaggcacttttgttggagtacatgtgcgccggggcgactacgtccacgttatgcctaaagtgtggaaaggagtcgtggccgaccggagataccttcagcaggcactagactggtttagagctcgctatagctcgctgatctttgtggttacatctaatggcatggcctggtgtcgcgagaacattgacacaagtcatggggatgtcgtctttgctggggacgggatcgagggctcccctgcaaaagatttcgctctgctcactcaatgcaaccataccattatgacgatagggacctttgggatttgggccgcatatctgactggaggggacacaatctatctagctaactacacattgcctgactcccccttcctcaaaattttcaaaccagaagccgcctttctgcccgagtggacggggatcgcagcagatctgtccccacttctcaagcactag

SEQ ID NO: 38518 - DNA, 1032 bp, Artificial Sequence
  derived and/or modified sequence
atgctggtggtgcagatgcccttcagcttccccatggcccacttcattctgtttgtttttacagtctctaccatattccatgtccagcagcgtttagccaaaatacaggccatgtgggaactgcccgtccagatccctgttttggcatcaacctccaaggcgctgggtcccagccagttaagaggaatgtggacaattaacgccataggacggctcgggaaccaaatgggcgagtacgcaaccctatacgcattggctaagatgaatggaagaccagcctttatcccggcccagatgcatagtacgctggcccctatattccgcatcacccttcctgtgctgcattccgcgaccgcgagcaggataccttggcagaactaccaccttaatgattggatggaggaggagtatcggcacataccaggggaatacgtccgatttacaggttatccatgcagctggaccttctatcaccatcttcgccaggagattttgcaggaattcactcttcacgaccacgtacgagaggaggcacagaagtttttaagggggctgcaggtgaatggttccagaccgggcaccttcgtgggcgtgcacgttcgacgaggggattacgttcatgtcatgcctaaggtatggaaaggagtggtcgccgatcggagatatctccaacaggctctggactggtttcgtgcacgctattccagtctgatattcgtggttacgtctaatggcatggcctggtgcagggaaaacattgatacttcgcatggggacgttgtcttcgcaggcgatggaatcgagggtagccccgcaaaagacttcgctctgttgacacaatgtaatcatacaatcatgacgattggaacttttggaatctgggccgcttatcttaccggcggcgataccatatacctggccaactacacactgcctgactcacccttcctgaaaatatttaagcctgaagcagccttcttgccagagtggacggggatcgctgccgacctgtcacccttactgaaacactag

SEQ ID NO: 38519 - DNA, 663 bp, Artificial Sequence
  derived and/or modified sequence
atgctggtggtgcagatgcccttcagcttccccatggcccacttcattctcttcgtgtttaccgtgtcaacgatcttccacgtgcagcagcgcctggccaagattcaggccatgtgggaactgcctgtgcagatccctgtgctggcttccacctcaaaggctttaggtccttcccagttaaggggcatgtggacaatcaatgcaattgggcgtctaggaaaccagatgggggaatatgccacgctgtatgccctggcgaaaatgaatggaaggcctgcattcattcccgcccaaatgcatagcacactggcccctatatttcgcattaccctgccagtgctacacagcgctacagcaagccggatcccctggcagaactatcatctgaacgattggatggaagaggagtatagacacattcctggcgaatatgtaaggtttaccggctacccatgcagctggactttttatcaccatttgagacaggaaatcctccaggaatttactctgcacgatcatgttcgggaggaggctcagaagttcttaagaggcctgcaggtgaacgggagccggcccggcacatttgtcggggtgcacgtgaggcggggggattatgtgcatgttatgcctaaggtctggaagggggtcgttgctgacaggtag

SEQ ID NO: 38520 - DNA, 1032 bp, Artificial Sequence
  derived and/or modified sequence
atgctcgtagtgcagatgccttttagctttcccatggctcactttattctttttgtttttaccgtgagcacgatttttcacgttcagcaacgcttggcaaaaattcaggccatgtgggagctccctgtgcagattccagtcctggcctccacctcaaaagcactgggcccttcccagctgcgtgggatgtggacgatcaatgccatcgggcgactgggcaaccagatgggcgagtacgcaactttgtatgcactggccaagatgaacggccgaccagcctttatacctgcccagatgcattccactttagcccctatatttcggatcactctgccagtactacacagcgctaccgcgagccgtattccttggcaaaattaccacttgaacgactggatggaggaagagtacaggcacattccaggtgaatatgtcaggttcaccgggtatccctgtagctggactttttaccaccacctgcgtcaggagattctgcaggaattcaccctgcatgaccacgtgagagaggaggctcagaaattcttgcggggtttgcaggtaaacggctccaggccaggcaccttcgttggagtgcacgtccgcaggggcgactacgtgcacgttatgcctaaggtgtggaagggggtggttgccgatagaaggtacctccagcaggccctggactggttccgcgctagatactcttctctgatcttcgtcgtcacatccaatggaatggcgtggtgtcgcgagaacatagacactagccatggggatgttgtcttcgcgggagacggtatagagggcagtcccgctaaggattttgccctcctcacccagtgcaaccacacaatcatgactataggaactttcggcatttgggcagcatacttaacgggaggcgatacgatctacctggccaactatactctcccggactcccctttcctcaaaatcttcaagcctgaggctgcgttccttcccgagtggaccggtattgccgcagatttgtctccacttctaaaacactag

SEQ ID NO: 38521 - DNA, 1032 bp, Artificial Sequence
  derived and/or modified sequence
atgcttgtggtacaaatgcctttctcattccctatggcacactttatcctgtttgtgtttaccgtatccacaatatttcacgtgcagcagcggttggccaagatacaggccatgtgggagctgcccgtacaaattcctgtgctggcgagtacctcaaaagctctgggtccctcccagctccgaggcatgtggacaatcaatgcaataggtcgcctgggaaatcagatgggtgaatacgcgacactctacgctttagccaaaatgaacggaaggcctgcctttattccagctcagatgcattcaaccctggccccaattttcagaatcaccttaccagtgcttcattctgctactgcctcccgaatcccatggcagaactaccatctgaatgactggatggaggaggaatacagacacattccaggcgaatacgtgcggttcactgggtacccttgttcatggacattttaccatcacctcagacaagagatactgcaggaatttactctgcacgaccatgtgcgggaggaagcccagaagttcctcagaggacttcaggtcaatggatcaaggcccggtacattcgtgggtgttcacgtcaggcggggagactatgtgcacgtaatgccgaaagtttggaagggtgttgtggcggatcgtcgatatttgcagcaagcattggattggtttagggctcgatactcatcactgattttcgtagtaacatctaacggtatggcttggtgccgcgagaatatagacaccagtcacggcgacgttgtgtttgccggtgatggcatagaaggatcccctgccaaggatttcgccctcctgactcagtgcaatcataccataatgaccatcggaacttttgggatatgggccgcataccttactggaggcgatactatctaccttgcgaattacaccttgcctgatagccccttcctgaaaatattcaagcctgaggctgcatttctgcctgaatggactggaatcgctgcggatctgtctccgctcttgaagcactag

SEQ ID NO: 38522 - DNA, 663 bp, Artificial Sequence
  derived and/or modified sequence
atgttggtcgtgcagatgcccttctcttttccgatggcccactttatccttttcgtattcactgtgtccaccatttttcacgttcagcagcgccttgcgaagattcaggccatgtgggaattgccagttcagatccctgttcttgccagcacctctaaggcactgggaccatcacaactgaggggaatgtggactatcaatgcaattggaagactggggaaccagatgggtgagtacgcaactctttatgcattagcaaagatgaatggcaggcctgcttttatacctgcacaaatgcactctaccctggcacccatcttccggattaccctcccagtcctgcacagcgccacggcgtcgagaattccatggcagaactaccacctcaatgactggatggaggaggagtatagacatattccaggcgagtacgtgagatttactgggtatccatgtagctggactttctatcatcatctcagacaggaaatactccaagagttcaccctgcatgatcatgttcgtgaagaggcccagaagttccttagagggcttcaggtcaatggaagcagaccgggaacatttgtgggcgtgcacgtgcggagaggcgactatgtgcacgtgatgcccaaggtttggaaaggcgtggtggcagaccggtag

SEQ ID NO: 38523 - DNA, 1032 bp, Artificial Sequence
  derived and/or modified sequence
atgctggtggtgcagatgcccttcagcttccccatggcccacttcatcctgttcgtgttcaccgtgagcaccatcttccacgtgcagcagagactggccaagatccaggccatgtgggagctgcccgtgcagatccccgtgctggccagcaccagcaaggccctgggccccagccagctgagaggcatgtggaccatcaacgccatcggcagactgggcaaccagatgggcgagtacgccaccctgtacgccctggccaagatgaacggcagacccgccttcatccccgcccagatgcacagcaccctggcccccatcttcagaatcaccctgcccgtgctgcacagcgccaccgccagcagaatcccctggcagaactaccacctgaacgactggatggaggaggagtacagacacatccccggcgagtacgtgagattcaccggctacccctgcagctggaccttctaccaccacctgagacaggagatcctgcaggagttcaccctgcacgaccacgtgagagaggaggcccagaagttcctgagaggcctgcaggtgaacggcagcagacccggcaccttcgtgggcgtgcacgtgagaagaggcgactacgtgcacgtgatgcccaaggtgtggaagggcgtggtggccgacagaagatacctgcagcaggccctggactggttcagagccagatacagcagcctgatcttcgtggtgaccagcaacggcatggcctggtgcagagagaacatcgacaccagccacggcgacgtggtgttcgccggcgacggcatcgagggcagccccgccaaggacttcgccctgctgacccagtgcaaccacaccatcatgaccatcggcaccttcggcatctgggccgcctacctgaccggcggcgacaccatctacctggccaactacaccctgcccgacagccccttcctgaagatcttcaagcccgaggccgccttcctgcccgagtggaccggcatcgccgccgacctgagccccctgctgaagcactag

SEQ ID NO: 38524 - DNA, 663 bp, Artificial Sequence
  derived and/or modified sequence
atgctggtggtgcagatgcccttcagcttccccatggcccacttcatcctgttcgtgttcaccgtgagcaccatcttccacgtgcagcagagactggccaagatccaggccatgtgggagctgcccgtgcagatccccgtgctggccagcaccagcaaggccctgggccccagccagctgagaggcatgtggaccatcaacgccatcggcagactgggcaaccagatgggcgagtacgccaccctgtacgccctggccaagatgaacggcagacccgccttcatccccgcccagatgcacagcaccctggcccccatcttcagaatcaccctgcccgtgctgcacagcgccaccgccagcagaatcccctggcagaactaccacctgaacgactggatggaggaggagtacagacacatccccggcgagtacgtgagattcaccggctacccctgcagctggaccttctaccaccacctgagacaggagatcctgcaggagttcaccctgcacgaccacgtgagagaggaggcccagaagttcctgagaggcctgcaggtgaacggcagcagacccggcaccttcgtgggcgtgcacgtgagaagaggcgactacgtgcacgtgatgcccaaggtgtggaagggcgtggtggccgacagatag

SEQ ID NO: 38525 - protein, 233 aa, Artificial Sequence
  derived and/or modified sequence
MNLNFTSPLHPASSQRPTSFFIEDILLHKPKPLREVAPDHFASSLASRVPLLDYGYPLMPTPTLLAPHAHHPLHKGDHHHPYFLTTSGMPVPALFPHPQHAELPGKHCRRRKARTVFSDSQLSGLEKRFEIQRYLSTPERVELATALSLSETQVKTWFQNRRMKHKKQLRKSQDEPKAPDGPESPEGSPRGSEAATAAEARLSLPAGPFVLTEPEDEVDIGDEGELGSGPHVL

SEQ ID NO: 38526 - DNA, 702 bp, Artificial Sequence
  derived and/or modified sequence
atgaacctgaacttcaccagccccctgcaccccgccagcagccagagacccaccagcttcttcatcgaggacatcctgctgcacaagcccaagcccctgagagaggtggcccccgaccacttcgccagcagcctggccagcagagtgcccctgctggactacggctaccccctgatgcccacccccaccctgctggccccccacgcccaccaccccctgcacaagggcgaccaccaccacccctacttcctgaccaccagcggcatgcccgtgcccgccctgttcccccacccccagcacgccgagctgcccggcaagcactgcagaagaagaaaggccagaaccgtgttcagcgacagccagctgagcggcctggagaagagattcgagatccagagatacctgagcacccccgagagagtggagctggccaccgccctgagcctgagcgagacccaggtgaagacctggttccagaacagaagaatgaagcacaagaagcagctgagaaagagccaggacgagcccaaggcccccgacggccccgagagccccgagggcagccccagaggcagcgaggccgccaccgccgccgaggccagactgagcctgcccgccggccccttcgtgctgaccgagcccgaggacgaggtggacatcggcgacgagggcgagctgggcagcggcccccacgtgctgtag

SEQ ID NO: 38527 - DNA, 830 bp, Artificial Sequence
  derived and/or modified sequence
tcctccacttcgtcccggcccttgtcctgtggcaggtgctccgctcaagatgaatctcaacttcacctctcctctacacccggcgtcttctcagaggcccacatccttcttcatcgaggacatcctgctgcacaagcccaagccgctgagagaggtggccccagaccatttcgccagctctctggcctctcgggtgcctctgctagactatggctaccccctcatgcccacacccaccctcttggctcctcacgcccatcaccctctgcataagggagaccaccatcatccttatttcctcaccacctcggggatgccagtcccagcgctgttcccgcacccgcagcacgcggagctgccggggaagcactgccgccgccgcaaagcccgcacggttttctctgactcgcagctctcgggcttggagaagaggttcgagatccagcgctacctgtccacgccagaacgagtggagctggccacggccctcagcctgtccgagacgcaggtgaaaacgtggttccagaaccggcggatgaagcataaaaagcaactgcggaaaagccaagacgaacccaaagcaccagacgggccagaaagccccgagggcagcccccgcggttcagaggccgccaccgccgccgaggctcggctgagcctgcccgccggtcccttcgtgctgaccgagccagaggacgaggtggacattggagacgagggggagctgggctcagggccgcacgtgctctgagccgccaggctggggagggtagtaggcaggggaggagactgcggggccgagcgcggttccctcctggaccggaagactc

SEQ ID NO: 38528 - DNA, 702 bp, Artificial Sequence
  derived and/or modified sequence
atgaatttaaatttcacttcacctctgcaccccgcttcctctcagcgccctacaagcttcttcatcgaagatatcctgttacacaagccaaagcccttgcgggaggtcgctccagatcatttcgcctcctccctcgcatccagggtgcccttacttgattacggatatcctttgatgcccacccccacacttttggctcctcatgcccatcaccctctccataaaggagaccatcaccacccttattttttgactacgagcggaatgccagtgcctgctctgtttccccatcctcagcacgccgagttgcctggcaagcactgtaggcgtcgaaaagctaggactgtgttctccgactcacagctaagtgggctggagaagcggtttgagatccaaagatacctgtctactcctgagagagtcgagctggctactgcactgtccctgagcgagacacaggtgaaaacgtggttccagaataggcgcatgaaacataagaagcaactccgtaagtcccaggatgaacccaaggcaccagatggccccgagagtcccgaaggcagtcctaggggctcagaagccgccactgccgctgaggcaagactgtccctaccagcgggtccctttgttttgacagagcctgaagatgaggtggacatcggagacgagggggagctgggatccggtccacatgttttatag

SEQ ID NO: 38529 - DNA, 702 bp, Artificial Sequence
  derived and/or modified sequence
atgaacctgaacttcaccagccccctgcacccagccagcagccagaggcccaccagcttcttcatcgaggacatcctgctgcacaagcccaagcccctgcgggaggtggccccagaccactttgccagcagcctggccagccgggtgcccctgctggactatggctaccccctgatgcccacccccaccctgctggccccccacgcccaccaccccctgcacaagggggaccaccaccacccctacttcctgaccaccagcggcatgcctgtgcctgccctcttcccccacccccagcacgccgagctgcccgggaagcactgcagaagaaggaaggccaggacagtgttcagtgacagccagctgagcggcctggagaagagatttgagatccagcgctacctgagcaccccagagcgggtggagctggccacagccctgagcctgtctgagacccaggtgaagacctggttccagaacagaaggatgaagcacaagaagcagctgaggaagagccaggatgagcccaaggccccagatggccctgagagccctgagggcagcccccggggcagcgaggccgccacagctgctgaggcccggctgagcctgcctgctggcccctttgtgctgacagagccagaagatgaggtggacattggagatgaaggagagctgggcagcggcccccacgtgctgtag

SEQ ID NO: 38530 - DNA, 702 bp, Artificial Sequence
  derived and/or modified sequence
atgaacctgaacttcaccagccccctgcaccccgccagcagccagagacccacatccttttttattgaagacattctgttgcacaagcccaaaccactcagggaagtagctcctgaccacttcgcctcctccctggcttcacgcgtgccccttcttgattatggctaccctcttatgcccactccgaccctcctggcaccccacgctcatcaccccctccataagggtgatcatcatcacccatatttcctgaccacctcggggatgccggtccccgcgctattcccacaccctcaacacgctgaactcccaggcaagcattgcaggaggcgcaaggcacggaccgtcttcagcgactcccaactgtctggtctcgaaaagaggtttgagatccagcgctacctgagcaccccagaacgggtcgaactggccaccgcactgtctctatccgaaactcaagtgaaaacatggtttcagaatcgccggatgaagcacaaaaagcagctcaggaagagtcaggatgagccaaaggcgccagacgggcctgagagtcccgagggcagtcctcgaggcagcgaggctgctacagcagcagaggcaaggctgtcattgcccgcaggacctttcgtactgaccgagcccgaggatgaagtagacatcggagacgaaggagagcttggttctggtcctcatgtgctgtag

SEQ ID NO: 38531 - DNA, 702 bp, Artificial Sequence
  derived and/or modified sequence
atgaacttgaacttcacctccccccttcaccctgcctcctcacagcgtccaacctctttcttcattgaagatatactgctgcataaacccaaaccacttcgtgaagtcgccccagaccatttcgcttcaagtctggcttccagagtccctctgctggactatggctatcctcttatgcccactcccacattactggcacctcacgcacaccaccctctgcacaagggagaccaccaccacccttactttctgactactagtggaatgcccgtgccggctctcttcccccatccccagcacgccgaacttcctggcaaacattgtcggagaaggaaggcaaggactgtgttctccgacagccagttaagtgggctggaaaagagattcgagatacagcgctacctttctactccggagcgggtggagctggctaccgcactgtccttgagcgaaacccaggtgaagacgtggtttcagaaccgcaggatgaagcataaaaagcagctgcgcaaatcgcaagatgaaccgaaggcccctgacggccctgagtcaccggagggatctccacgtggttcggaggcggctacagccgcagaggccagactgtcgctcccggcaggccctttcgtattaaccgagcccgaggatgaagtggacatcggtgatgaaggcgagctggggtcagggcctcacgtgctgtag

SEQ ID NO: 38532 - protein, 492 aa, Artificial Sequence
  derived and/or modified sequence
MSPERSQEESPEGDTERTERKPMVKDAFKDISIYFTKEEWAEMGDWEKTRYRNVKMNYNALITVGLRATRPAFMCHRRQAIKLQVDDTEDSDEEWTPRQQVKPPWMAFRGEQSKHQKGMPKASFNNESSLRELSGTPNLLNTSDSEQAQKPVSPPGEASTSGQHSRLKLELRRKETEGKMYSLRERKGHAYKEISEPQDDDYLYCEMCQNFFIDSCAAHGPPTFVKDSAVDKGHPNRSALSLPPGLRIGPSGIPQAGLGVWNEASDLPLGLHFGPYEGRITEDEEAANSGYSWLITKGRNCYEYVDGKDKSSANWMRYVNCARDDEEQNLVAFQYHRQIFYRTCRVIRPGCELLVWSGDEYGQELGIRSSIEPAESLGQAVNCWSGMGMSMARNWASSGAASGRKSSWQGENQSQRSIHVPHAVWPFQVKNFSVNMWNAITPLRTSQDHLQENFSNQRIPAQGIRIRSGNILIHAAVMTKPKVKRSKKGPNS

SEQ ID NO: 38533 - DNA, 1479 bp, Artificial Sequence
  derived and/or modified sequence
atgagcccggaaagatcccaggaggagagcccggagggggatacagagcgtactgagagaaagcctatggtcaaggacgcctttaaagatatttctatttatttcactaaggaagagtgggcagaaatgggtgattgggagaaaaccaggtatcgtaatgtaaaaatgaactataacgcccttatcactgtaggcctgcgcgcgactaggcctgcttttatgtgccacagaagacaagctatcaagcttcaggttgacgacactgaggatagtgacgaagagtggacacctcgccaacaggtcaagcccccatggatggcattcagaggcgaacagagcaaacaccagaagggaatgcccaaggcgagcttcaataatgaatctagcctccgcgaacttagcggcactccgaatctcctgaacactagcgactccgagcaggcccagaagccagtcagccccccaggcgaagcttccaccagcggacagcattcccggctaaagctcgaactgcggaggaaagagacagaaggcaaaatgtactctctgcgtgagagaaaggggcacgcttataaggagatatctgaacctcaagacgacgattacctctactgtgagatgtgtcagaactttttcattgactcttgtgccgctcacgggccccccacatttgttaaggattcagctgtggataaaggccatccaaatcgatcagccctgagccttccacctggcctgcgcatcggccccagcggaatcccacaagctgggctcggagtgtggaacgaggcctctgatcttcccttgggactgcacttcggcccctacgaaggaagaataactgaggacgaggaggcagctaatagcggctactcgtggcttatcacaaaaggaaggaactgctacgagtacgtggacgggaaggacaaaagttccgctaactggatgcggtatgtgaactgtgcgcgcgacgatgaagagcagaacttagtcgccttccaataccacaggcagatcttctacagaacgtgcagagtcatcagacctgggtgcgaactgttggtatggagcggtgatgaatatggccaggagctgggcatcagaagcagtattgagcctgccgaatccttgggacaggcggtcaattgctggtcgggtatggggatgtccatggctagaaattgggcttctagcggcgcagcttccggccgcaaaagttcgtggcagggagagaaccagtcgcaaaggtccatccacgtaccccacgccgtatggcctttccaggtgaagaatttctccgtgaacatgtggaacgcgattacaccattgagaacctcccaggaccatctgcaggaaaatttcagtaaccagcggatccccgcacagggcatccgcataaggtctggaaacatcctgatccacgccgccgtaatgacgaaaccaaaagtgaaacgcagcaagaaaggccccaacagctag

SEQ ID NO: 38534 - DNA, 1479 bp, Artificial Sequence
  derived and/or modified sequence
atgagccctgagaggagccaggaggagagccctgagggggacacagagaggacagagaggaagcccatggtgaaggatgccttcaaggacatcagcatctacttcaccaaggaggagtgggccgagatgggagactgggagaagacccgctacagaaatgtgaagatgaactacaatgccctgatcaccgtgggcctgcgggccaccaggcctgccttcatgtgccaccggcggcaggccatcaagctgcaggtggatgacacagaagattctgatgaggagtggaccccccggcagcaggtgaagccaccctggatggccttccggggggagcagagcaagcaccagaagggcatgcccaaggccagcttcaacaatgaaagcagcctgcgggagctgagcggcacccccaacctgctgaacaccagtgacagcgagcaggcccagaagcctgtgagccccccaggagaggccagcaccagcggccagcacagccggctgaagctggagctgcggaggaaggagacagagggcaagatgtacagcctgcgggagaggaaaggacatgcctacaaggagatcagcgagccccaggatgatgactacctgtactgtgagatgtgccagaacttcttcatcgacagctgtgccgcccacggcccccccacctttgtgaaggacagcgctgtggacaagggccaccccaacagaagtgccctgagcctgcccccaggcctgcgcatcggccccagcggcatcccccaggccggcctgggcgtgtggaatgaggccagtgacctgcccctgggcctgcacttcggcccctatgagggccgcatcacagaagatgaggaggccgccaacagcggctacagctggctgatcaccaagggcaggaactgctatgaatatgtggatggcaaggacaagagcagcgccaactggatgagatatgtgaactgtgccagagatgatgaggagcagaacctggtggccttccagtaccaccggcagatcttctaccgcacctgcagggtcatccggcccggctgtgagctgctggtgtggagcggagatgaatatggccaggagctgggcatccgcagcagcattgagcctgctgagagcctgggccaggccgtgaactgctggagcggcatgggcatgtccatggccaggaactgggccagcagcggggccgccagcggcaggaagagctcctggcagggcgagaaccagagccagaggagcatccacgtgccccatgctgtgtggcccttccaggtgaagaacttctctgtgaacatgtggaatgccatcacccccctgcggaccagccaggaccacctgcaggagaacttcagcaaccagaggatcccagcccagggcatccgcatccgcagcggcaacatcctgattcatgctgctgtgatgaccaagcccaaggtgaagaggagcaagaagggccccaacagctag

SEQ ID NO: 38535 - DNA, 3220 bp, Artificial Sequence
  derived and/or modified sequence
ttctagacagtcccagcaccatgagccctgaaaggtcccaagaggagagcccagaaggagacacagagagaacagagcggaagcccatggtcaaagatgccttcaaagacatttccatatacttcaccaaggaagaatgggcagaaatgggagactgggagaaaactcgctataggaatgtgaaaatgaactataatgcactgattactgtaggtctcagagccactcgaccagctttcatgtgtcaccgaaggcaggccatcaaactccaggtggatgacacagaagattccgatgaagaatggacacctaggcagcaagtcaaacctccttggatggccttcagaggagaacagagtaaacaccagaagggaatgcccaaggcgtcattcaataatgaatctagtttgagagaattgtcaggaacgccaaatttactgaatacaagtgactcagagcaggctcagaaaccagtgtcccctcctggagaagcaagtacctctggacagcactctagactaaaactggaactcaggaggaaggagactgaaggaaagatgtatagcctgcgagaaagaaagggtcatgcatacaaagagatcagcgagccacaggatgatgactacctctattgtgagatgtgtcagaacttcttcattgacagctgtgctgctcatgggccccctacatttgtaaaggacagtgcagtggacaaggggcatcccaaccgttcagccctcagtctgcccccggggctgagaattgggccatcaggcatccctcaggctgggcttggagtatggaacgaggcatctgatctgccactgggtctgcactttggcccctatgagggccgaattacagaagacgaagaggcagccaacagtggatattcctggctaatcaccaaggggagaaactgctatgagtatgtggatggaaaagataaatcctcggccaactggatgaggtatgtgaactgtgcccgggatgatgaagagcagaacctggtggccttccagtaccacaggcagatcttctatagaacctgccgagtcattaggccaggctgtgaactgctggtctggtctggggatgagtatggccaggaactgggcatcagatcttctatagaacctgccgagtcattaggccaggctgtgaactgctggtctggtatggggatgagtatggccaggaactgggcatcaagtggggcagcaagtggaagaaagagctcatggcagggagagaaccaaagccagagatccatccatgtccctcatgctgtctggccttttcaagtcaaaaatttctcagtcaacatgtggaacgcaatcactcctctcagaacttcccaggaccatctgcaagaaaacttctccaaccagagaatccctgcccaggggatcagaatcaggagcggcaatattctgatccacgctgctgtaatgacaaaaccaaaggtcaagagatcaaagaaaggtccaaactcttgaataaaaggacatggcagagggagatttcaagggccttttctagcccacccaaaggacaaatggggagctctagagtgggagaaagaatgatggaagaagagtccagaacaggccagaaagtgaatccagggaacacaggcaaattatttgtgggggtaggaatctcaagaattgcgaaagtcaaatatggagagtgtgggcaaggtttcagtgataagtcagatgttattacacaccaaaggacacacacaggggggaagccctacgtctgcagagagtgtgggagggctttagccggaagtcagacctcctcagtcaccagaggacacacacaggggagaagccttatgtctgcagagagtgtgagcggggctttagccggaagtcagtcctcctcattcaccagaggacacacaggggagacgccccagtctgcaggaaggatgagtaagtcattagtaataaaaccttatctcaatagccacaagaagacaaacgtgatcaccacacacttgcacaccccagctctgaggtggcttcagcgaaagtctgctaaccccttacattccccgagagtgtaaagagatcggaaataactaattaaacaaatccgccactttcatgactagagttgaggaagaacaggggatagttctgtaagtgttcgggggacgtcaacatgtgtggttgtttcccgcactgatcccctccattttttgtgttttgcctcctgttctaattaattttgtctccatacatatctgaaccccaagtgtgtacctcattcttcccttatcactgaaggaaggaagagtccagaagggccacagagaactcaaacgttcagttcaagtctccacaggaattcaaccccagaaagacataaacttggagtccatctggtttaattattggagaatcgattcccaagtccaggaagagaaatgtagggttttacagagtcgcagcaggaaagagagctccctggtctcctgggaagtgtgacctcttctaatggacccctctcctctgctgccatactcccccttggctccccctgtctcctctcctgatttcctccaatctctgtagccccagaagtgaacgccagacaggaacacgcatgtgtgtatatatgtgttcacgtgtgctatgtgtgttaagcctgcatgcatgggtgtgggggtatgtgccctctgtgtacgtatctgtgtgagtgtgggggtttcaagggtgtattaggaataacgctcaaaatcctaaggaaattgaatactctgagagaagagagacagaccctctcatactgttttatattgttttatactcagaaaaggaaaaagaagcaaaactaaaggcaggtagcctggcgcctaggaaccagacctgaaaccaaggaaccagacccgaaaccaggcctgggccggcctgacctaagcctggtagttaaaattcgacccctgacctagcaactgatgttatctatagattatagaaagacattgtgaaacttcccggtctgttctgttccactctgaccatcggtgcatgcagcccctgtcacctaccccctgcttgctcaatcgatcacgaccctctcacgtggacccccttagagttgtgagcccttaaaagggacaggaattgctcactcggggagctcggctcttgagacagcagtcttgctgatgctcctggccgaataaaccgcttccttcttt

SEQ ID NO: 38536 - DNA, 1479 bp, Artificial Sequence
  derived and/or modified sequence
atgagccccgagcggagccaggaggagagccccgagggcgacaccgagcggacggagagaaagcccatggtgaaagatgccttcaaagacatttctatctattttaccaaagaagaatgggccgaaatgggagattgggagaagactcgctaccgtaacgtgaagatgaactataatgccttaatcactgtgggtctcagggccacgagaccagcttttatgtgccacagaaggcaggcaatcaagcttcaggtagacgatacggaggacagcgatgaagagtggacacctcgccagcaagtcaagcccccctggatggcgtttagaggcgaacagtccaagcaccaaaaaggtatgcccaaagcctctttcaataatgagagtagcctccgagagttgtctgggacccctaatctcctgaacacctctgattccgaacaagcccagaagcctgtgagtcctcccggtgaggctagcacatcaggccagcactccaggctcaaactggaactgaggaggaaagaaacggaggggaagatgtattcactccgggaaagaaagggccacgcttacaaagagattagcgagcctcaggacgacgattacttatactgtgagatgtgtcagaattttttcatagatagctgcgctgcccatgggccccctacgttcgtgaaagattctgccgtggataaggggcaccctaatcgctccgcactttccttgcctccagggctccgaatcggcccctctggcattccacaggcaggactcggggtctggaacgaggcctctgacttacctttggggcttcacttcggaccttatgagggacggataactgaggatgaagaggcagccaattccggatacagttggctcattactaagggtcggaactgttacgagtatgtggatggaaaagacaagtccagtgccaattggatgagatacgttaactgcgcccgcgacgatgaggagcagaatctcgtggcgttccaatatcaccggcaaattttctatagaacctgtagagtgattcgtcccggctgtgagctgcttgtgtggagcggcgacgaatatggccaggagttgggcatccggtcatctatcgagccagccgaaagtctcggccaagctgtaaactgctggtccggaatgggcatgtctatggctcgaaactgggctagttcaggagccgcatccggacgcaaatcttcttggcagggagaaaaccaatcacagagatctattcatgtcccacatgccgtgtggcctttccaagtaaaaaatttctctgttaatatgtggaacgctatcacgcctttgcggactagccaggaccatttacaagaaaatttttccaaccagagaatcccagcccagggtatacgaataagaagtggaaatatattaatccacgccgctgtgatgacaaagccaaaggtgaaacggagcaagaagggccctaattcttag

SEQ ID NO: 38537 - DNA, 1479 bp, Artificial Sequence
  derived and/or modified sequence
atgagtcccgaacgatcccaagaagaatcaccagaaggtgacactgaacgcacagaacggaagcccatggtaaaggacgcatttaaagacatttcgatttatttcacaaaggaagagtgggcagaaatgggcgattgggaaaagacacggtataggaatgtcaagatgaactataatgccttgattactgtcgggctgagagctacgcgcccagcatttatgtgccacaggcgtcaagcaattaaactgcaggtggacgatacagaagactccgacgaggagtggactcccagacaacaggtgaagcccccatggatggcttttagaggagagcagagcaaacaccagaagggcatgcctaaggcctctttcaataatgaatcctccctgcgcgaattgtctggaactccgaatctccttaatacttccgattcggagcaggcacagaagccggtatcccccccaggagaagcctccacctctggtcagcacagtaggcttaagctggaactcagacgtaaagagacagaaggcaagatgtactcacttcgagagcgcaaaggccatgcctataaggagatttccgagccacaggacgacgactacctatactgtgagatgtgtcagaacttcttcatagatagttgtgcagcccacggtccccctactttcgtgaaggactccgccgtggacaaaggccaccctaatcggagtgcgctgtccctgccaccgggactgaggattggtccctccggtattcctcaagcgggactaggcgtgtggaacgaggcatccgaccttcctcttgggctccactttggcccttatgagggtagaatcactgaagacgaagaggccgctaattccggttacagttggctgattacaaaaggtcgaaattgctatgagtacgtcgacggcaaagataagagctctgccaattggatgcggtatgtgaactgtgcacgagacgacgaggagcagaatcttgtagcttttcagtaccacagacagattttttatcgcacatgtagagtgattaggcctggatgtgagcttctggtttggagcggggacgagtacggccaggaattgggaatccggtcaagtatcgaacctgcagagtcattgggacaagccgtgaattgttggagcggaatgggcatgtcaatggcacgtaactgggcatcttctggggcagcatctggcaggaagtcttcctggcaaggagaaaaccagtcacagagatccatccacgttcctcacgctgtgtggccatttcaagtcaaaaatttttccgttaacatgtggaacgcaattacgccgctcaggaccagccaggatcacctccaggaaaatttcagcaaccagagaatccctgcgcaggggataagaatcagatcagggaatatccttatccacgctgccgtgatgactaagccgaaggtgaagagaagcaagaagggtcccaactcttag

SEQ ID NO: 38538 - DNA, 1479 bp, Artificial Sequence
  derived and/or modified sequence
atgagccccgagagaagccaggaggagagccccgagggcgacaccgagagaaccgagagaaagcccatggtgaaggacgccttcaaggacatcagcatctacttcaccaaggaggagtgggccgagatgggcgactgggagaagaccagatacagaaacgtgaagatgaactacaacgccctgatcaccgtgggcctgagagccaccagacccgccttcatgtgccacagaagacaggccatcaagctgcaggtggacgacaccgaggacagcgacgaggagtggacccccagacagcaggtgaagcccccctggatggccttcagaggcgagcagagcaagcaccagaagggcatgcccaaggccagcttcaacaacgagagcagcctgagagagctgagcggcacccccaacctgctgaacaccagcgacagcgagcaggcccagaagcccgtgagcccccccggcgaggccagcaccagcggccagcacagcagactgaagctggagctgagaagaaaggagaccgagggcaagatgtacagcctgagagagagaaagggccacgcctacaaggagatcagcgagccccaggacgacgactacctgtactgcgagatgtgccagaacttcttcatcgacagctgcgccgcccacggcccccccaccttcgtgaaggacagcgccgtggacaagggccaccccaacagaagcgccctgagcctgccccccggcctgagaatcggccccagcggcatcccccaggccggcctgggcgtgtggaacgaggccagcgacctgcccctgggcctgcacttcggcccctacgagggcagaatcaccgaggacgaggaggccgccaacagcggctacagctggctgatcaccaagggcagaaactgctacgagtacgtggacggcaaggacaagagcagcgccaactggatgagatacgtgaactgcgccagagacgacgaggagcagaacctggtggccttccagtaccacagacagatcttctacagaacctgcagagtgatcagacccggctgcgagctgctggtgtggagcggcgacgagtacggccaggagctgggcatcagaagcagcatcgagcccgccgagagcctgggccaggccgtgaactgctggagcggcatgggcatgagcatggccagaaactgggccagcagcggcgccgccagcggcagaaagagcagctggcagggcgagaaccagagccagagaagcatccacgtgccccacgccgtgtggcccttccaggtgaagaacttcagcgtgaacatgtggaacgccatcacccccctgagaaccagccaggaccacctgcaggagaacttcagcaaccagagaatccccgcccagggcatcagaatcagaagcggcaacatcctgatccacgccgccgtgatgaccaagcccaaggtgaagagaagcaagaagggccccaacagctag

SEQ ID NO: 38539 - protein, 372 aa, Artificial Sequence
  derived and/or modified sequence
MESEELADRVLDVVERSLSNYPFDFQGARIITGQEEGAYGWITINYLLGKFSQKTRWFSIVPYETNNQETFGALDLGGASTQVTFVPQNQTIESPDNALQFRLYGKDYNVYTHSFLCYGKDQALWQKLAKDIQVASNEILRDPCFHPGYKKVVNVSDLYKTPCTKRFEMTLPFQQFEIQGIGNYQQCHQSILELFNTSYCPYSQCAFNGIFLPPLQGDFGAFSAFYFVMKFLNLTSEKVSQEKVTEMMKKFCAQPWEEIKTSYAGVKEKYLSEYCFSGTYILSLLLQGYHFTADSWEHIHFIGKIQGSDAGWTLGYMLNLTNMIPAEQPLSTPLSHSTYVFLMVLFSLVLFTVAIIGLLIFHKPSYFWKDMV

SEQ ID NO: 38540 - protein, 306 aa, Artificial Sequence
  derived and/or modified sequence
MKGTKDLTSQQKESNVKTFCSKNILAILGFSSIIAVIALLAVGLTQNKALPENVKYGIVLDAGSSHTSLYIYKWPAEKENDTGVVHQVEECRVKGPGISKFVQKVNEIGIYLTDCMERAREVIPRSQHQETPVYLGATAGMRLLRMESEELADRVLDVVERSLSNYPFDFQGARIITGQEEGAYGWITINYLLGKFSQKTRWFSIVPYETNNQETFGALDLGGASTQVTFVPQNQTIESPDNALQFRLYGKDYNVYTHSFLCYGKDQALWQKLAKDIQASITQSRPAPFTSAPPAPTSCCFLFQIQ

SEQ ID NO: 38541 - protein, 517 aa, Artificial Sequence
  derived and/or modified sequence
MKGTKDLTSQQKESNVKTFCSKNILAILGFSSIIAVIALLAVGLTQNKALPENVKYGIVLDAGSSHTSLYIYKWPAEKENDTGVVHQVEECRVKGPGISKFVQKVNEIGIYLTDCMERAREVIPRSQHQETPVYLGATAGMRLLRMESEELADRVLDVVERSLSNYPFDFQGARIITGQEEGAYGWITINYLLGKFSQKTRWFSIVPYETNNQETFGALDLGGASTQVTFVPQNQTIESPDNALQFRLYGKDYNVYTHSFLCYGKDQALWQKLAKDIQVASNEILRDPCFHPGYKKVVNVSDLYKTPCTKRFEMTLPFQQFEIQGIGNYQQCHQSILELFNTSYCPYSQCAFNGIFLPPLQGDFGAFSAFYFVMKFLNLTSEKVSQEKVTEMMKKFCAQPWEEIKTSYAGVKEKYLSEYCFSGTYILSLLLQGYHFTADSWEHIHFIGKIQGSDAGWTLGYMLNLTNMIPAEQPLSTPLSHSTYVFLMVLFSLVLFTVAIIGLLIFHKPSYFWKDMV

SEQ ID NO: 38542 - protein, 402 aa, Artificial Sequence
  derived and/or modified sequence
MERAREVIPRSQHQETPVYLGATAGMRLLRMESEELADRVLDVVERSLSNYPFDFQGARIITGQEEGAYGWITINYLLGKFSQKTRWFSIVPYETNNQETFGALDLGGASTQVTFVPQNQTIESPDNALQFRLYGKDYNVYTHSFLCYGKDQALWQKLAKDIQVASNEILRDPCFHPGYKKVVNVSDLYKTPCTKRFEMTLPFQQFEIQGIGNYQQCHQSILELFNTSYCPYSQCAFNGIFLPPLQGDFGAFSAFYFVMKFLNLTSEKVSQEKVTEMMKKFCAQPWEEIKTSYAGVKEKYLSEYCFSGTYILSLLLQGYHFTADSWEHIHFIGKIQGSDAGWTLGYMLNLTNMIPAEQPLSTPLSHSTYVFLMVLFSLVLFTVAIIGLLIFHKPSYFWKDMV

SEQ ID NO: 38543 - DNA, 921 bp, Artificial Sequence
  derived and/or modified sequence
atgaaggggactaaggatcttacttcccaacagaaggagtccaatgtcaagactttttgcagcaaaaacatactggccatcctggggtttagttcaataatcgcggtcattgctctgttggccgtcggactcacacagaacaaagccctgccggagaatgtgaaatacggcatagtcctggacgcaggaagcagccacaccagcttgtacatctacaagtggcctgccgagaaagagaatgacactggcgtggtgcatcaggtagaggagtgtagggtgaaaggacccggcattagtaagtttgtgcaaaaggtgaatgaaataggtatctacttgacagactgtatggagcgagctagggaggtcattccacggtcccagcaccaagagacgcctgtgtatctgggcgcaacggcaggtatgcgattgctcaggatggagtccgaggagctggcggatcgcgtcctcgacgttgttgagcggtctctctcgaattatccatttgatttccagggcgctcggatcatcaccggacaagaggagggcgcctacggatggatcacaattaactatttactgggcaaatttagccaaaagacccgttggtttagtatagtgccatacgagaccaacaatcaggaaacttttggtgcacttgacctcggcggcgctagcacccaggtgacgttcgttcctcagaaccagactatagagtcacctgacaatgcactgcagtttagattatatggtaaggattacaacgtgtacacacactctttcctgtgctacggaaaagatcaggcattatggcagaagttagccaaagacatacaggccagcataacccagtccaggccggctccctttacaagtgcccccccagcccccaccagctgttgctttctgttccagattcagtag

SEQ ID NO: 38544 - DNA, 1554 bp, Artificial Sequence
  derived and/or modified sequence
atgaaggggactaaggatctgacaagccaacagaaggagtccaatgttaagacattctgttcgaaaaacattctggcaattcttggcttctcgagcattattgcggtgatcgcattactcgcagtagggttgacccagaataaagcccttccagaaaacgtcaagtacggcatcgttctggatgccggtagttctcatacatcactatacatttataagtggccggccgagaaagagaatgacaccggcgtggtccaccaggtagaagagtgtcgcgtcaagggccccggaattagcaagttcgtgcaaaaagtgaacgaaattgggatatacttgacagattgcatggagagggccagagaagtcataccacgctcccagcaccaagaaacgcccgtttacctgggggctaccgctggaatgcggctgctgcggatggagtccgaagagctggccgacagagtcctcgacgtggtggagcgaagcctgtccaactatccttttgattttcagggcgcccgcatcatcaccggccaggaagagggtgcgtatggatggattacaatcaactacctcctcggtaaattctctcagaagactcgttggttcagtattgtgccttacgagactaataatcaagagacatttggcgcactagacctgggcggggcgtccacccaggtaacattcgttccgcagaaccagaccatcgaaagccccgataacgctttgcagttccgcctctacgggaaggactacaatgtctacacgcacagcttcctgtgttatggaaaagatcaagccctgtggcaaaaactggctaaagacatccaggtagccagtaatgagatcctacgtgatccttgtttccatccaggctataaaaaggtagttaacgtgagtgatctgtataaaacaccctgcacaaaaaggttcgagatgacattaccattccagcaattcgagatccaggggatcggaaactaccagcagtgtcaccaaagcatcttagagctctttaatacatcatattgcccctactcccaatgcgctttcaatggaatatttctccccccgctgcagggggatttcggggcgttctctgctttctattttgttatgaagtttctgaatctgaccagcgagaaggtgagccaggaaaaagtcacagagatgatgaaaaagttctgtgcgcagccttgggaggagataaaaacatcctatgcaggcgtcaaggaaaagtacctgtcagagtactgcttcagcgggacatacatcctttccctgttacttcaagggtaccattttaccgccgacagttgggaacacatccattttattggaaaaattcagggaagtgacgccggctggactctggggtatatgctcaacctgacgaacatgatccccgccgaacagccactgtccactcccctttcccattctacatatgtcttcctcatggttctgttctcactagttctgttcaccgtggccattattggcctgctcattttccataaaccgtcttacttctggaaagatatggtgtag

SEQ ID NO: 38545 - DNA, 921 bp, Artificial Sequence
  derived and/or modified sequence
atgaagggcaccaaggacctgaccagccagcagaaggagagcaatgtgaagaccttctgcagcaagaacatcctggccatcctgggcttcagcagcatcatcgctgtgattgccctgctggccgtgggcctgacccagaacaaggccctgcctgaaaatgtgaagtatggcatcgtgctggatgctggcagcagccacaccagcctgtacatctacaagtggccagctgagaaggaaaatgacaccggggtggtgcaccaggtggaggagtgccgggtgaagggccctggcatcagcaagtttgtgcagaaggtgaatgagatcggcatctacctgacagactgcatggagcgggcccgggaggtgatccccaggagccagcaccaggagacccctgtgtacctgggcgccacagctggcatgaggctgctgaggatggagagcgaggagctggccgacagagtgctggatgtggtggagaggagcctgagcaactacccctttgacttccagggcgcccgcatcatcaccggccaggaggagggcgcctacggctggatcaccatcaactacctgctgggcaagttcagccagaagacccgctggttcagcatcgtgccctatgagaccaacaaccaggagaccttcggggccctggacctgggcggggccagcacccaggtgacctttgtgccccagaaccagaccatcgagagcccagacaatgccctgcagttccggctgtatggcaaggactacaacgtgtacacccacagcttcctgtgctacggcaaggaccaggccctgtggcagaagctggccaaggacatccaggccagcatcacccagagcaggcctgcccccttcaccagcgcccccccagcccccaccagctgctgcttcctgttccagatccagtag

SEQ ID NO: 38546 - DNA, 1554 bp, Artificial Sequence
  derived and/or modified sequence
atgaagggcaccaaggacctgaccagccagcagaaggagagcaatgtgaagaccttctgcagcaagaacatcctggccatcctgggcttcagcagcatcatcgctgtgattgccctgctggccgtgggcctgacccagaacaaggccctgcctgaaaatgtgaagtatggcatcgtgctggatgctggcagcagccacaccagcctgtacatctacaagtggccagctgagaaggaaaatgacaccggggtggtgcaccaggtggaggagtgccgggtgaagggccctggcatcagcaagtttgtgcagaaggtgaatgagatcggcatctacctgacagactgcatggagcgggcccgggaggtgatccccaggagccagcaccaggagacccctgtgtacctgggcgccacagctggcatgaggctgctgaggatggagagcgaggagctggccgacagagtgctggatgtggtggagaggagcctgagcaactacccctttgacttccagggcgcccgcatcatcaccggccaggaggagggcgcctacggctggatcaccatcaactacctgctgggcaagttcagccagaagacccgctggttcagcatcgtgccctatgagaccaacaaccaggagaccttcggggccctggacctgggcggggccagcacccaggtgacctttgtgccccagaaccagaccatcgagagcccagacaatgccctgcagttccggctgtatggcaaggactacaacgtgtacacccacagcttcctgtgctacggcaaggaccaggccctgtggcagaagctggccaaggacatccaggtggccagcaatgagatcctgcgggacccctgcttccaccctggctacaagaaggtggtgaatgtgtctgacctgtacaagaccccctgcaccaagagatttgagatgaccctgcccttccagcagtttgagatccagggcatcggcaactaccagcagtgccaccagagcatcctggagctgttcaacaccagctactgcccctacagccagtgtgccttcaacggcatcttcctgccccccctgcagggcgactttggagccttcagcgccttctactttgtgatgaagttcctgaacctgaccagcgagaaggtgtcccaggagaaggtgacagagatgatgaagaagttctgtgcccagccctgggaggagatcaagaccagctatgccggcgtgaaggagaagtacctgtctgagtactgcttcagcggcacctacatcctgagcctgctgctgcagggctaccacttcaccgctgacagctgggagcacatccacttcatcggcaagatccagggcagtgatgctggctggaccctgggctacatgctgaacctgaccaacatgatcccagctgagcagcccctgagcacccccctgagccacagcacctacgtgttcctgatggtgctcttcagcctggtgctcttcaccgtggccatcatcggcctgctgatcttccacaagcccagctacttctggaaggacatggtgtag

SEQ ID NO: 38547 - DNA, 921 bp, Artificial Sequence
  derived and/or modified sequence
atgaagggcaccaaggacctgaccagccagcagaaggagagcaacgtgaaaactttctgttccaaaaatatcttagccattctaggcttctcaagcattattgctgtcatagctttattggcagttggcttgacccagaacaaggcactgccggagaacgtcaaatacggcatcgtcctggatgccgggagctcgcacacctcactgtacatttataagtggcccgcagagaaggagaatgacaccggcgtcgtgcatcaggtggaggagtgtagagttaagggaccgggcatctctaagttcgtgcagaaagtgaacgaaatcggtatatacctgaccgactgtatggaacgggcaagagaggtgatacctcgttcccaacaccaggagactcctgtgtacctcggagcaacggccggcatgcgattgctgagaatggaaagtgaggaactggcagatcgggtcctcgacgtggtggagagatccctgtcgaattatccctttgattttcagggagcccgcataattaccggacaggaggagggtgcctacggatggatcacaatcaattacctactagggaaattcagccagaagacgaggtggttcagtattgtcccctatgagacaaacaatcaggagacattcggggctttggatctcggaggagccagcacccaagtgacttttgtaccgcagaatcagacaattgagtctcctgataatgccttacagttccgtttgtatggtaaagactataacgtctatacccactcattcctgtgttatggcaaggaccaagctctctggcaaaagctggccaaggacattcaggcttctatcactcagtctcgtccagccccctttacaagcgccccccccgcgcctacaagctgttgcttcctgttccaaattcagtag

SEQ ID NO: 38548 - DNA, 1554 bp, Artificial Sequence
  derived and/or modified sequence
atgaagggcaccaaggacctgaccagccagcagaaggagagcaacgttaaaacattctgttcaaagaacattttagctattctgggtttttcctcaataattgcagtcatcgccctgctcgccgtcggcctgacgcaaaacaaggccctgcctgaaaacgtcaagtacggcatcgtgttggacgccggctcgtcacatacatcactctacatatataagtggcccgcagagaaggagaacgacactggggtcgtacaccaggtcgaagagtgtagggtcaagggacccgggatatccaagttcgtgcaaaaggtaaacgagataggcatttatctgaccgactgtatggaacgggcccgcgaggttataccccggagccaacaccaagaaactcctgtttacctgggcgccaccgccggcatgaggctcctcagaatggagtcggaagagctggctgatagggtcctcgacgttgttgagagatctctctcaaactatccctttgacttccagggggccagaattatcactggacaagaggagggtgcctacggctggattactatcaactacctgctcggaaagttttcacaaaaaacccgttggttttctatagtcccgtatgaaaccaataatcaggagacctttggcgcgctggacctcgggggagcctcaacacaggtgacgttcgtgccgcaaaaccaaaccattgaatcccccgataatgctcttcagtttaggctttacggcaaggattataatgtgtatacacacagcttcttgtgttacggcaaggaccaggccttgtggcagaagctggcgaaagatatccaggtggcatccaatgagattctgcgcgatccttgtttccaccccgggtacaagaaagtcgtgaatgtatcagatctctataagacgccctgcactaagcgatttgaaatgactttaccttttcagcagtttgagattcagggcattggtaattaccagcagtgtcatcaaagcattctggagctgttcaatacatcttattgcccttactcacagtgtgccttcaacgggatctttttgccccccctacagggagactttggagcattttccgcgttctacttcgttatgaagttcttgaatctcaccagtgagaaggttagtcaggagaaggtgacggaaatgatgaaaaagttttgcgcacagccctgggaagaaataaagacctcctatgctggcgttaaagagaagtaccttagcgagtattgtttttccggtacttatatacttagcctgctgctgcagggataccattttaccgctgattcctgggagcacattcactttattgggaagatccagggctcagatgcaggatggaccctcggatacatgctgaatttgacgaacatgattccggcagaacaaccactgagtacccctttgtcccatagcacttatgtctttctgatggtgcttttcagccttgtcctgttcaccgtggccattattggactgctaatttttcacaagccttcgtacttctggaaagacatggtgtag

SEQ ID NO: 38549 - DNA, 921 bp, Artificial Sequence
  derived and/or modified sequence
atgaaggggaccaaggatctaactagtcagcagaaggaatcaaatgtgaaaactttctgctcaaaaaacattttggctatcctggggttcagttcaattatagccgttatcgccctgctggctgtgggtctgacgcagaacaaggccctccccgagaatgtgaagtatggcatcgtgttggacgctggaagctcacatacctctctttacatttacaagtggcccgctgaaaaggaaaacgataccggagtcgttcaccaggtggaggagtgtcgagttaaaggtccaggaatcagcaaattcgtgcagaaggtgaacgaaattggcatctatctgaccgattgcatggaaagggcgagagaggtcatccctcgatctcagcaccaagagacgccagtctatctcggggctactgctggaatgcggttactcaggatggagtccgaagaactggccgacagggttctagatgtggtcgaacggtctcttagtaattacccgttcgactttcaaggagccagaattattaccggacaagaggaaggggcatacggctggattacgataaactacctgttgggcaaatttagtcagaagacacgatggtttagtatcgtgccatacgagacaaataaccaggagacttttggggcattggacctgggcggagccagcacacaggtcacattcgtgcctcagaaccagacgatcgagtccccggataatgccctgcaatttcgcctgtacggaaaagactataatgtgtacacacactcgttcctgtgttacggcaaggatcaggccctctggcaaaagctcgccaaggacatccaggcgtccatcacacagtcccgcccagcaccattcacatctgcgcctcctgcacccacatcttgttgcttccttttccagatccagtag

SEQ ID NO: 38550 - DNA, 1554 bp, Artificial Sequence
  derived and/or modified sequence
atgaagggcacaaaagaccttacaagtcaacagaaagagtccaacgtgaagaccttttgctctaagaacatactggccattctggggttctctagtatcatcgctgtgatcgcactgttggccgtgggactcactcaaaacaaagcactgcctgaaaatgtgaaatacgggatagtcctggacgctggatcttcacacacgagcttgtacatctacaaatggccagccgagaaggagaatgacactggcgttgtgcatcaggtcgaggagtgccgggtcaaaggacccggtatctcgaagttcgtgcaaaaggtcaacgagattggtatttacctgactgactgcatggaacgagcccgagaagttattccacgaagccagcaccaggaaactccggtatacctgggcgcaactgccggaatgcgcctcctgcggatggaatctgaagaactcgctgacagggtgctggatgtggtggagagaagtctgagtaactaccccttcgattttcagggcgctcgtattattacagggcaggaggagggtgcgtatggctggattacaattaattatctactggggaagttctctcagaaaactaggtggttctctattgtgccctacgaaactaataaccaggaaacgtttggggctctggaccttggcggagctagcacccaggtgacctttgtccctcaaaaccagacgatagaatccccagacaacgctctgcagtttaggttatatggcaaggattataacgtgtatacccacagtttcctatgttatggaaaagaccaggccctctggcagaaactcgctaaagatatccaggtggcctctaatgagattctgagagatccttgtttccaccccggatacaagaaagtggtgaatgtctctgatctctataaaactccatgtaccaaaaggttcgagatgaccctcccttttcaacagttcgaaatccaaggaattggcaattatcagcagtgccaccaaagcatattggagctgtttaacacatcctattgtccctatagccagtgcgcttttaatgggattttcctccctcctttgcagggcgattttggcgctttcagtgcgttctacttcgtgatgaagtttctcaatcttacctcagagaaagtaagccaggaaaaagtgactgaaatgatgaagaaattctgcgcccaaccatgggaggagatcaagacctcttatgctggggtcaaagagaaatacctcagtgagtattgcttcagcggaacatatatcctgagtctgctcctacaggggtaccactttacagccgattcctgggagcacatccacttcatcggaaaaatccaggggagcgatgcaggctggactctgggatacatgctgaacctcaccaatatgattcccgcagaacaaccactatcgacgccactctctcacagtacatacgtgtttctgatggtcctgttcagcctggtcctgtttaccgtagccattataggccttctgatatttcacaagccctcttacttttggaaggatatggtgtag

SEQ ID NO: 38551 - DNA, 921 bp, Artificial Sequence
  derived and/or modified sequence
atgaagggcaccaaggacctgaccagccagcagaaggagagcaacgtgaagaccttctgcagcaagaacatcctggccatcctgggcttcagcagcatcatcgccgtgatcgccctgctggccgtgggcctgacccagaacaaggccctgcccgagaacgtgaagtacggcatcgtgctggacgccggcagcagccacaccagcctgtacatctacaagtggcccgccgagaaggagaacgacaccggcgtggtgcaccaggtggaggagtgcagagtgaagggccccggcatcagcaagttcgtgcagaaggtgaacgagatcggcatctacctgaccgactgcatggagagagccagagaggtgatccccagaagccagcaccaggagacccccgtgtacctgggcgccaccgccggcatgagactgctgagaatggagagcgaggagctggccgacagagtgctggacgtggtggagagaagcctgagcaactaccccttcgacttccagggcgccagaatcatcaccggccaggaggagggcgcctacggctggatcaccatcaactacctgctgggcaagttcagccagaagaccagatggttcagcatcgtgccctacgagaccaacaaccaggagaccttcggcgccctggacctgggcggcgccagcacccaggtgaccttcgtgccccagaaccagaccatcgagagccccgacaacgccctgcagttcagactgtacggcaaggactacaacgtgtacacccacagcttcctgtgctacggcaaggaccaggccctgtggcagaagctggccaaggacatccaggccagcatcacccagagcagacccgcccccttcaccagcgccccccccgcccccaccagctgctgcttcctgttccagatccagtag

SEQ ID NO: 38552 - DNA, 1554 bp, Artificial Sequence
  derived and/or modified sequence
atgaagggcaccaaggacctgaccagccagcagaaggagagcaacgtgaagaccttctgcagcaagaacatcctggccatcctgggcttcagcagcatcatcgccgtgatcgccctgctggccgtgggcctgacccagaacaaggccctgcccgagaacgtgaagtacggcatcgtgctggacgccggcagcagccacaccagcctgtacatctacaagtggcccgccgagaaggagaacgacaccggcgtggtgcaccaggtggaggagtgcagagtgaagggccccggcatcagcaagttcgtgcagaaggtgaacgagatcggcatctacctgaccgactgcatggagagagccagagaggtgatccccagaagccagcaccaggagacccccgtgtacctgggcgccaccgccggcatgagactgctgagaatggagagcgaggagctggccgacagagtgctggacgtggtggagagaagcctgagcaactaccccttcgacttccagggcgccagaatcatcaccggccaggaggagggcgcctacggctggatcaccatcaactacctgctgggcaagttcagccagaagaccagatggttcagcatcgtgccctacgagaccaacaaccaggagaccttcggcgccctggacctgggcggcgccagcacccaggtgaccttcgtgccccagaaccagaccatcgagagccccgacaacgccctgcagttcagactgtacggcaaggactacaacgtgtacacccacagcttcctgtgctacggcaaggaccaggccctgtggcagaagctggccaaggacatccaggtggccagcaacgagatcctgagagacccctgcttccaccccggctacaagaaggtggtgaacgtgagcgacctgtacaagaccccctgcaccaagagattcgagatgaccctgcccttccagcagttcgagatccagggcatcggcaactaccagcagtgccaccagagcatcctggagctgttcaacaccagctactgcccctacagccagtgcgccttcaacggcatcttcctgccccccctgcagggcgacttcggcgccttcagcgccttctacttcgtgatgaagttcctgaacctgaccagcgagaaggtgagccaggagaaggtgaccgagatgatgaagaagttctgcgcccagccctgggaggagatcaagaccagctacgccggcgtgaaggagaagtacctgagcgagtactgcttcagcggcacctacatcctgagcctgctgctgcagggctaccacttcaccgccgacagctgggagcacatccacttcatcggcaagatccagggcagcgacgccggctggaccctgggctacatgctgaacctgaccaacatgatccccgccgagcagcccctgagcacccccctgagccacagcacctacgtgttcctgatggtgctgttcagcctggtgctgttcaccgtggccatcatcggcctgctgatcttccacaagcccagctacttctggaaggacatggtgtag

SEQ ID NO: 38553 - DNA, 1452 bp, Artificial Sequence
  derived and/or modified sequence
gtgtacgtgtaaaattatgatcaaataaatttgtatgccttttctcctattaacctgccttttttgtcagcgattgtcagtgaaacttcagagggcaaaggggaagttttccttggcccctccagttttggtgctgtgaacaggataccaaagctgctctgttcttctggaagctgcaatgaagggaaccaaggacctgacaagccagcagaaggagtctaacgtgaagacattttgctccaagaatatcctagccatccttggcttctcctctatcatagctgtgatagctttgcttgctgtggggttgacccagaacaaagcattgccagaaaacgttaagtatgggattgtgctggatgcgggttcttctcacacaagtttatacatctataagtggccagcagaaaaggagaatgacacaggcgtggtgcatcaagtagaagaatgcagggttaaaggtcctggaatctcaaaatttgttcagaaagtaaatgaaataggcatttacctgactgattgcatggaaagagctagggaagtgattccaaggtcccagcaccaagagacacccgtttacctgggagccacggcaggcatgcggttgctcaggatggaaagtgaagagttggcagacagggttctggatgtggtggagaggagcctcagcaactacccctttgacttccagggtgccaggatcattactggccaagaggaaggtgcctatggctggattactatcaactatctgctgggcaaattcagtcagaaaacaaggtggttcagcatagtcccatatgaaaccaataatcaggaaacctttggagctttggaccttgggggagcctctacacaagtcacttttgtaccccaaaaccagactatcgagtccccagataatgctctgcaatttcgcctctatggcaaggactacaatgtctacacacatagcttcttgtgctatgggaaggatcaggcactctggcagaaactggccaaggacattcaggcaagtataactcaatccagacctgcccccttcacatctgcacctccagcccccacatcctgttgttttctgtttcaaattcagtagtttgtctgaacttggttattgtactttccaaacctttttaggcaggatattgaactacatctggttgacccctataaattgtttcagtcagacatcccctcccatgtttgtttactgcgttatctccacagacacaactgagatcttctctcaggaaataatttctccccctcgtggggttgataatgaaaattatgtggtagaatattgtttgttggagggggaattgcaatttataagctcttttagaccactttttaaagctccctttcctacaaactacaaaaaaacagagttgttagaaatgacctggagaggagaaggaaaaaaaaaaaaacacttcaggagaaaca

SEQ ID NO: 38554 - DNA, 5044 bp, Artificial Sequence
  derived and/or modified sequence
gtgtacgtgtaaaattatgatcaaataaatttgtatgccttttctcctattaacctgccttttttgtcagcgattgtcagtgaaacttcagagggcaaaggggaagttttccttggcccctccagttttggtgctgtgaacaggataccaaagctgctctgttcttctggaagctgcaatgaagggaaccaaggacctgacaagccagcagaaggagtctaacgtgaagacattttgctccaagaatatcctagccatccttggcttctcctctatcatagctgtgatagctttgcttgctgtggggttgacccagaacaaagcattgccagaaaacgttaagtatgggattgtgctggatgcgggttcttctcacacaagtttatacatctataagtggccagcagaaaaggagaatgacacaggcgtggtgcatcaagtagaagaatgcagggttaaaggtcctggaatctcaaaatttgttcagaaagtaaatgaaataggcatttacctgactgattgcatggaaagagctagggaagtgattccaaggtcccagcaccaagagacacccgtttacctgggagccacggcaggcatgcggttgctcaggatggaaagtgaagagttggcagacagggttctggatgtggtggagaggagcctcagcaactacccctttgacttccagggtgccaggatcattactggccaagaggaaggtgcctatggctggattactatcaactatctgctgggcaaattcagtcagaaaacaaggtggttcagcatagtcccatatgaaaccaataatcaggaaacctttggagctttggaccttgggggagcctctacacaagtcacttttgtaccccaaaaccagactatcgagtccccagataatgctctgcaatttcgcctctatggcaaggactacaatgtctacacacatagcttcttgtgctatgggaaggatcaggcactctggcagaaactggccaaggacattcaggttgcaagtaatgaaattctcagggacccatgctttcatcctggatataagaaggtagtgaacgtaagtgacctttacaagaccccctgcaccaagagatttgagatgactcttccattccagcagtttgaaatccagggtattggaaactatcaacaatgccatcaaagcatcctggagctcttcaacaccagttactgcccttactcccagtgtgccttcaatgggattttcttgccaccactccagggggattttggggcattttcagctttttactttgtgatgaagtttttaaacttgacatcagagaaagtctctcaggaaaaggtgactgagatgatgaaaaagttctgtgctcagccttgggaggagataaaaacatcttacgctggagtaaaggagaagtacctgagtgaatactgcttttctggtacctacattctctccctccttctgcaaggctatcatttcacagctgattcctgggagcacatccatttcattggcaagatccagggcagcgacgccggctggactttgggctacatgctgaacctgaccaacatgatcccagctgagcaaccattgtccacacctctctcccactccacctatgtcttcctcatggttctattctccctggtccttttcacagtggccatcataggcttgcttatctttcacaagccttcatatttctggaaagatatggtatagcaaaagcagctgaaatatgctggctggagtgaggaaaaaaatcgtccagggagcattttcctccatcgcagtgttcaaggccatccttccctgtctgccagggccagtcttgacgagtgtgaagcttccttggcttttactgaagcctttcttttggaggtattcaatatcctttgcctcaaggacttcggcagatactgtctctttcatgagtttttcccagctacacctttctcctttgtactttgtgcttgtataggttttaaagacctgacacctttcataatctttgctttataaaagaacaatattgactttgtctagaagaactgagagtcttgagtcctgtgataggaggctgagctggctgaaagaagaatctcaggaactggttcagttgtactctttaagaacccctttctctctcctgtttgccatccattaagaaagccatatgatgcctttggagaaggcagacacacattccattcccagcctgctctgtgggtaggagaattttctacagtaggcaaatatgtgctaaagccaaagagttttataaggaaatatatgtgctcatgcagtcaatacagttctcaatcccacccaaagcaggtatgtcaataaatcacatattcctaggtgatacccaaatgctacagagtggaacactcagacctgagatttgcaaaaagcagatgtaaatatatgcattcaaacatcagggcttactatgaggtaggtggtatatacatgtcacaaataaaaatacagttacaactcagggtcacaaaaaatgcatcttccaatgcatatttttattatggtaaaatatacataaatataattcaccattttaacatttaattcatattaaatacgtacaaatcagtgacatttagtacattcacagtgttgtgccaccatcaccactatttagttccagaacatttgcatcatcaatacattgtctagagacaagactatcctgggtaggcagaaaccatagatcttttgtgtttacagctatggaaaccaactgtaccataaagatagttcactgagttttaaagccaagccacatcttatttttccaaggtttaatttagtgagagggcagcattagtgtggagtggcatgcttttgccctatcgtggaatttacacatcagaatgtgcaggatccaagtctgaaagtgttgccacccgtcacacaacatgggctttgtttgcttattccatgaagcagcagctatagaccttaccatggaaacatgaagagaccctgcacccctttccttaaggattgctgcaagagttacctgttgagcaggattgactggtgatgtttcattctgaccttgtcccaagctctccatctctagatctggggactgactgttgagctgatggggaaagaaaagctctcacacaaaccggaagccaaatgtcccctatctcttgaatgatcaagtcacttttgacaacatccaggtgaatataaaaacttaataaagctgtggaaaggaactcttaatcttcttttctgctacttaggttaaattcactagatcttgattaggaatcaaaattcgaattgggacatgttcaaattctttcttgtggtagttgcctatactgtcatcgctgctgttggttgagcatttgtggtgtaccacgctgtgtgctcaagggtattacattcatcttctcatttaatcctcacaacaatctgaagaaggtaggtattacaattcccacttcatagaaacagaaactgaggttcagagaggttaagtcatttgcccaaatggctgagccaaagcctaccatgtacctaacctttattttctttcccgaacataccaggctgtctcctcataacttccaagcatgcacttaaaactccacatgaatacaaggttcatgggacttggtattcatagaaagggaggcagaaagctggtctgttcctgataggcttgtaatttaatatcattctgttcatgtgctttggatggaagcacatctggcatatgatgctaatcagtggttcccatacccctggcttcctaattttaatgtttgctcacagcatagtagattgacatcaaatagtggccgatgatgatgaaaataaaggtcaaataagttgagccaataacagccgcttttttccttctgtctgcgtatacaaagcactgtcatgcacacaatctattctgaccctcacaacaacccataagggtgtaaatagtatttccattttacaaatgaggatcacacaaactactacatggcagagcagatactccaactcatgtcttctggttgaagcctattgctttttcttttctaaacactttccctcagcaagttggaattagacttcacaagtctccttcagagaacacaaatcttttcttattccattcctgtttggttgcctacgtccaatctccccctccccagagatgccaaaaaaaaaatcctttaaggtatttgggagccaaactcaacttgttaaaatctcaaattatggagacaatcagcagacacaacctaaccccaattattttggcaggaaggttggtttagaggcagatccagcaatctgctttgggccactctgggtggggtaggtgaaataagattggtcactgttaactaattttaatattggattggccattggttatcactgattaccattctcccctggattttcacccaggactcaaaacttggttctgctaaccctgttcctttatgaggaaccttttaaagattcctttataaggtgggagttttttttctatgaacctataggggagaaaaaagatcagcagaagtcattacttttttttttttttttttttttttttgagagagagtctcactccattgcccaggctggagtgcagtggtgctatctcggctcactgcaacctccgcctcctgggttcaagcaattctcctgcctcagcctcccgagtagctgggattgcaggtgcccaccaccacacccggctaatttttgtatttttagtaaagacagggtttcaccatgttggccaggctggtctccaactcccaatctcaggtgatcctattgcctcgggctcccaaagtgctgggattacaggagtgagccaccatgcctggccagaagtggttacttctgtagacaaaagaataatgctacttaatcaggctttctgtgtgacaagaaagagaaagaaaataaagaagtttcaattcatccaattcttaataagaaatatgtaaataaaattttttaaaattacacttc

SEQ ID NO: 38555 - protein, 355 aa, Artificial Sequence
  derived and/or modified sequence
MEDLEETLFEEFENYSYDLDYYSLESDLEEKVQLGVVHWVSLVLYCLAFVLGIPGNAIVIWFTGFKWKKTVTTLWFLNLAIADFIFLLFLPLYISYVAMNFHWPFGIWLCKANSFTAQLNMFASVFFLTVISLDHYIHLIHPVLSHRHRTLKNSLIVIIFIWLLASLIGGPALYFRDTVEFNNHTLCYNNFQKHDPDLTLIRHHVLTWVKFIIGYLFPLLTMSICYLCLIFKVKKRSILISSRHFWTILVVVVAFVVCWTPYHLFSIWELTIHHNSYSHHVMQAGIPLSTGLAFLNSCLNPILYVLISKKFQARFRSSVAEILKYTLWEVSCSGTVSEQLRNSETKNLCLLETAQ

SEQ ID NO: 38556 - protein, 74 aa, Artificial Sequence
  derived and/or modified sequence
MEDLEETLFEEFENYSYDLDYYSLESDLEEKVQLGVVHWVSLVLYCLAFVLGIPGNAIVIWFTGFKWKKTVTTL

SEQ ID NO: 38557 - protein, 82 aa, Artificial Sequence
  derived and/or modified sequence
MEDLEETLFEEFENYSYDLDYYSLESDLEEKVQLGVVHWVSLVLYCLAFVLGIPGNAIVIWFTGFKWKKTVTTLWFLNLAIA

SEQ ID NO: 38558 - protein, 227 aa, Artificial Sequence
  derived and/or modified sequence
MEDLEETLFEEFENYSYDLDYYSLESDLEEKVQLGVVHWVSLVLYCLAFVLGIPGNAIVIWFTGFKWKKTVTTLWFLNLAIADFIFLLFLPLYISYVAMNFHWPFGIWLCKANSFTAQLNMFASVFFLTVISLDHYIHLIHPVLSHRHRTLKNSLIVIIFIWLLASLIGGPALYFRDTVEFNNHTLCYNNFQKHDPDLTLIRHHVLTWVKFIIGYLFPLLTMSICYL

SEQ ID NO: 38559 - protein, 137 aa, Artificial Sequence
  derived and/or modified sequence
MEDLEETLFEEFENYSYDLDYYSLESDLEEKVQLGVVHWVSLVLYCLAFVLGIPGNAIVIWFTGFKWKKTVTTLWFLNLAIADFIFLLFLPLYISYVAMNFHWPFGIWLCKANSFTAQLNMFASVFFLTVISLDHYI

SEQ ID NO: 38560 - protein, 178 aa, Artificial Sequence
  derived and/or modified sequence
MEDLEETLFEEFENYSYDLDYYSLESDLEEKVQLGVVHWVSLVLYCLAFVLGIPGNAIVIWFTGFKWKKTVTTLWFLNLAIADFIFLLFLPLYISYVAMNFHWPFGIWLCKANSFTAQLNMFASVFFLTVISLDHYIHLIHPVLSHRHRTLKNSLIVIIFIWLLASLIGGPALYFRDT

SEQ ID NO: 38561 - protein, 19 aa, Artificial Sequence
  derived and/or modified sequence
MEDLEETLFEEFENYSYDL

SEQ ID NO: 38562 - DNA, 2295 bp, Artificial Sequence
  derived and/or modified sequence
aaaccacatttccttttccagggcaataacttaaaatattatgtatttccctttgttgcaaagagaggaaatacttcttcctagactcagggcagctgtgacccgtcctcccagagaaatcattaaaccacaaggattcagacagagcccagagccctgaaaactttggccacgcactttcccgcagcagccacaggcaccggcaacttcagagagccagataaaagtggaatgaggaatgcagccgttctgaacaccaccctccatttcattctggaaccgggaaggtacacccaggcatgacaatagcttctctcctcacagaaatttaactgatttcttcattctccatttagcaaggtcatggaagatttggaggaaacattatttgaagaatttgaaaactattcctatgacctagactattactctctggagtctgatttggaggagaaagtccagctgggagttgttcactgggtctccctggtgttatattgtttggcttttgttctgggaattccaggaaatgccatcgtcatttggttcacggggttcaagtggaagaagacagtcaccactctgtggttcctcaatctagccattgcggatttcatttttcttctctttctgcccctgtacatctcctatgtggccatgaatttccactggccctttggcatctggctgtgcaaagccaattccttcactgcccagttgaacatgtttgccagtgtttttttcctgacagtgatcagcctggaccactatatccacttgatccatcctgtcttatctcatcggcatcgaaccctcaagaactctctgattgtcattatattcatctggcttttggcttctctaattggcggtcctgccctgtacttccgggacactgtggagttcaataatcatactctttgctataacaattttcagaagcatgatcctgacctcactttgatcaggcaccatgttctgacttgggtgaaatttatcattggctatctcttccctttgctaacaatgagtatttgctacttgtgtctcatcttcaaggtgaagaagcgaagcatcctgatctccagtaggcatttctggacaattctggttgtggttgtggcctttgtggtttgctggactccttatcacctgtttagcatttgggagctcaccattcaccacaatagctattcccaccatgtgatgcaggctggaatccccctctccactggtttggcattcctcaatagttgcttgaaccccatcctttatgtcctaattagtaagaagttccaagctcgcttccggtcctcagttgctgagatactcaagtacacactgtgggaagtcagctgttctggcacagtgagtgaacagctcaggaactcagaaaccaagaatctgtgtctcctggaaacagctcaataagttattacttttccacaaatcagtatatggctttttatgtgggtcctctgactgatgctttcagattaaaattgtttccaagatagagagccgactccactttcatagttattgtttctggtcactatataggcatcacatttttgtgtggatatgaaacttaggaaggatcctcttgactccttgtgatgtggcaataaattttttttaaaaaactgaaaatacttaggaaggatccgcataatttttttctgcaacttaaatgaaatgcatcattcttgttaattataccatggtgaattaatcacttttgaagcaatatcagttattttttgaataataacttttctaaagccttaagtcttaatattaaatatatgattagccaggcacggtggctgacacctgtaatcccagcactttgggaggccaaggtggggggattacccgaggtcaggaattcgagaccagcctgaccaacatggagaaaccccgtctctactaaaaatacaaaattagccggtcatggtggtgcatgtctgcaaacccagctactcgggaggctgaagcaggagaatcacttgaacctgggaggcagaggttgtggtgagccaacatcacaccattgcactccagcctgggcaacaagagtaaaactctgtctcaaaaataaataaataaaatagataaataaatatatgattaactaattttaaaaatgttaaaatgtattcttaaattcattttaattttgtacaataacctgctagacacatttttaaaatgcaacatgtgtacttaatttctttatgtaatctatgtatatacatttatgaattaaagtaattgttggttatcttaaaa

SEQ ID NO: 38563 - DNA, 603 bp, Artificial Sequence
  derived and/or modified sequence
aacagatttacttaaccactggcaaaccacatttccttttccagggcaataacttaaaatattatgtatttccctttgttgcaaagagaggaaatacttcttcctagactcagggcagctgtgacccgtcctcccagagaaatcattaaaccacaaggattcagacagagcccagagccctgaaaactttggccacgcactttcccgcagcagccacaggcaccggcaacttcagagagataaaagtggaatgaggaatgcagccgttctgaacaccaccctccatttcattctggaaccgggaaggtacacccaggcatgacaatagcttctctcctcacagaaatttaactgatttcttcattctccatttagcaaggtcatggaagatttggaggaaacattatttgaagaatttgaaaactattcctatgacctagactattactctctggagtctgatttggaggagaaagtccagctgggagttgttcactgggtctccctggtgttatattgtttggcttttgttctgggaattccaggaaatgccatcgtcatttggttcacggggttcaagtggaagaagacagtcaccactct

SEQ ID NO: 38564 - DNA, 1557 bp, Artificial Sequence
  derived and/or modified sequence
attaaaccacaaggattcagacagagcccagagccctgaaaactttggccacgcactttcccgcagcagccacaggcaccggcaacttcagagaggtaattagaacttcggaaatcttagtggaaaagatggagaactaagtcctccgcagactttcccactaagtatcctcaagaatcactttctgcatcgggcaaaacagaattagaagcaagaatctagacaaggcttcgtcctcatttagaagcctttaagaattctctgctttaagtggatgaaaacgtccctgtatggctgggttgccatggttcctcgctgtgacccccagggctactgagcctgccatataaaagtggaatgaggaatgcagccgttctgaacaccaccctccatttcattctggaaccgggaaggtacacccaggcatgacaatagcttctctcctcacagaaatttaactgatttcttcattctccatttagcaaggtcatggaagatttggaggaaacattatttgaagaatttgaaaactattcctatgacctagactattactctctggagtctgatttggaggagaaagtccagctgggagttgttcactgggtctccctggtgttatattgtttggcttttgttctgggaattccaggaaatgccatcgtcatttggttcacggggttcaagtggaagaagacagtcaccactctgtggttcctcaatctagccattgcggatttcatttttcttctctttctgcccctgtacatctcctatgtggccatgaatttccactggccctttggcatctggctgtgcaaagccaattccttcactgcccagttgaacatgtttgccagtgtttttttcctgacagtgatcagcctggaccactatatccacttgatccatcctgtcttatctcatcggcatcgaaccctcaagaactctctgattgtcattatattcatctggcttttggcttctctaattggcggtcctgccctgtacttccgggacactgtggagttcaataatcatactctttgctataacaattttcagaagcatgatcctgacctcactttgatcaggcaccatgttctgacttgggtgaaatttatcattggctatctcttccctttgctaacaatgagtatttgctacttgtgtctcatcttcaaggtgaagaagcgaagcatcctgatctccagtaggcatttctggacaattctggttgtggttgtggcctttgtggtttgctggactccttatcacctgtttagcatttgggagctcaccattcaccacaatagctattcccaccatgtgatgcaggctggaatccccctctccactggtttggcattcctcaatagttgcttgaaccccatcctttatgtcctaattagtaagaagttccaagctcgcttccggtcctcagttgctgagatactcaagtacacactgtgggaagtcagctgttctggcacagtgagtgaacagctcaggaactcagaaaccaagaatctgtgtctcctggaaacagctcaataa

SEQ ID NO: 38565 - DNA, 592 bp, Artificial Sequence
  derived and/or modified sequence
attcgaagaacattccatctctgctaatttaacttgccttttcataagcaaaagcctacccagacaaaggagggctgggtgacccccatccattaccgattttcagtctgcagcagaacagctagtagcagtggtttccattcaaaaaacaaacttcttacacaaacataggctggtcgaaagaattaatttgtacaccagataaaagtggaatgaggaatgcagccgttctgaacaccaccctccatttcattctggaaccgggaaggtacacccaggcatgacaatagcttctctcctcacagaaatttaactgatttcttcattctccatttagcaaggtcatggaagatttggaggaaacattatttgaagaatttgaaaactattcctatgacctagactattactctctggagtctgatttggaggagaaagtccagctgggagttgttcactgggtctccctggtgttatattgtttggcttttgttctgggaattccaggaaatgccatcgtcatttggttcacggggttcaagtggaagaagacagtcaccactctgtggttcctcaatctagccattgcgga

SEQ ID NO: 38566 - DNA, 830 bp, Artificial Sequence
  derived and/or modified sequence
attctggaaccgggaaggtacacccaggcatgacaatagcttctctcctcacagaaatttaactgttccctatatcatcgatgaaggaacaggagctgattgtaccaaaacacttatatgatttcttcattctccatttagcaaggtcatggaagatttggaggaaacattatttgaagaatttgaaaactattcctatgacctagactattactctctggagtctgatttggaggagaaagtccagctgggagttgttcactgggtctccctggtgttatattgtttggcttttgttctgggaattccaggaaatgccatcgtcatttggttcacggggttcaagtggaagaagacagtcaccactctgtggttcctcaatctagccattgcggatttcatttttcttctctttctgcccctgtacatctcctatgtggccatgaatttccactggccctttggcatctggctgtgcaaagccaattccttcactgcccagttgaacatgtttgccagtgtttttttcctgacagtgatcagcctggaccactatatccacttgatccatcctgtcttatctcatcggcatcgaaccctcaagaactctctgattgtcattatattcatctggcttttggcttctctaattggcggtcctgccctgtacttccgggacactgtggagttcaataatcatactctttgctataacaattttcagaagcatgatcctgacctcactttgatcaggcaccatgttctgacttgggtgaaatttatcattggctatctcttccctttgctaacaatgagtatttgctacttgt

SEQ ID NO: 38567 - DNA, 572 bp, Artificial Sequence
  derived and/or modified sequence
gtcatttcaaaagccagataaaagtggaatgaggaatgcagccgttctgaacaccaccctccatttcattctggaaccgggaaggtacacccaggcatgacaatagcttctctcctcacagaaatttaactgatttcttcattctccatttagcaaggtcatggaagatttggaggaaacattatttgaagaatttgaaaactattcctatgacctagactattactctctggagtctgatttggaggagaaagtccagctgggagttgttcactgggtctccctggtgttatattgtttggcttttgttctgggaattccaggaaatgccatcgtcatttggttcacggggttcaagtggaagaagacagtcaccactctgtggttcctcaatctagccattgcggatttcatttttcttctctttctgcccctgtacatctcctatgtggccatgaatttccactggccctttggcatctggctgtgcaaagccaattccttcactgcccagttgaacatgtttgccagtgtttttttcctgacagtgatcagcctggaccactatatcc

SEQ ID NO: 38568 - DNA, 756 bp, Artificial Sequence
  derived and/or modified sequence
agctagtagcagtggtttccattcaaaaaacaaacttcttacacaaacataggctggtcgaaagaattaatttgtacaataaaagtggaatgaggaatgcagccgttctgaacaccaccctccatttcattctggaaccgggaaggtacacccaggcatgacaatagcttctctcctcacagaaatttaactgatttcttcattctccatttagcaaggtcatggaagatttggaggaaacattatttgaagaatttgaaaactattcctatgacctagactattactctctggagtctgatttggaggagaaagtccagctgggagttgttcactgggtctccctggtgttatattgtttggcttttgttctgggaattccaggaaatgccatcgtcatttggttcacggggttcaagtggaagaagacagtcaccactctgtggttcctcaatctagccattgcggatttcatttttcttctctttctgcccctgtacatctcctatgtggccatgaatttccactggccctttggcatctggctgtgcaaagccaattccttcactgcccagttgaacatgtttgccagtgtttttttcctgacagtgatcagcctggaccactatatccacttgatccatcctgtcttatctcatcggcatcgaaccctcaagaactctctgattgtcattatattcatctggcttttggcttctctaattggcggtcctgccctgtacttccgggacactg

SEQ ID NO: 38569 - DNA, 1068 bp, Artificial Sequence
  derived and/or modified sequence
atggaagacttggaggagacgttgtttgaggaatttgaaaactatagttacgatctggattactacagtttggagagcgatctggaggaaaaagtacaattgggggtcgtgcattgggtctcgctggtcctgtattgtctggcattcgttctgggcatcccaggaaacgcaattgtcatatggtttactgggtttaagtggaaaaaaaccgtgacaacactgtggttcctaaatctggcaatcgccgattttatcttcctgttatttctacctctgtacatttcatatgtagccatgaatttccactggcccttcggcatctggctatgcaaggcaaactctttcactgcccagcttaatatgttcgcatcggtgtttttcttgaccgtgatttcactagatcactatatccacttaatccacccagtccttagccatcgccatagaacccttaagaactccctgatcgtaatcatcttcatttggctgctggcctctcttattggcggtccagccctctacttcagggacaccgtggaattcaataatcataccctgtgttacaacaattttcaaaagcacgatcccgatctgaccctgatacgccatcacgtccttacatgggtgaagttcataatcggatatctttttccattgttgacaatgtccatctgctacctgtgcctgatatttaaggtgaagaaaagatctatcttgatctctagcagacatttttggactatcctggtcgtggtggtcgcattcgtcgtgtgctggaccccatatcacctgttcagcatctgggagctgacaattcaccacaactcttactcccaccacgtgatgcaggctgggatcccactgagcacgggacttgcttttctgaactcttgtcttaacccgatactttacgtgttaatttccaagaagttccaggctagattccgctcctctgtcgcggaaatcctcaaatacactctttgggaggtgagctgctcggggacagtgtctgagcaattgcggaatagtgagacaaagaatctgtgtcttttagagaccgcgcagtag

SEQ ID NO: 38570 - DNA, 225 bp, Artificial Sequence
  derived and/or modified sequence
atggaggatttggaggaaactctcttcgaagagttcgagaactactcttatgacctggactactactcattagagtctgatctcgaagagaaggtacagctgggcgtcgtccactgggttagtttagtcttgtattgtctggctttcgtgctgggaatcccagggaacgccattgtgatctggtttacaggatttaagtggaagaaaacagtaacaacactgtag

SEQ ID NO: 38571 - DNA, 1068 bp, Artificial Sequence
  derived and/or modified sequence
atggaagacctggaggagaccctcttcgaggagtttgaaaactactcctatgatttagactattattcgttggagtctgacctggaggaaaaggttcagttgggcgtggtccactgggtgagcctggtgctctattgcctcgcatttgttctcggtattcctggtaatgcaattgtcatatggttcaccgggtttaaatggaaaaaaaccgtgactacattatggtttctgaacctcgccattgccgatttcatcttcttgctgtttctccccctgtacattagctacgtcgctatgaacttccactggccctttgggatttggctctgcaaggccaactcttttaccgcccagctaaatatgttcgccagcgtcttctttctgactgtgatcagtttggatcactacatccatctcatccatcctgtcctgtcccacagacatcgcacattgaaaaatagtctgatcgttatcattttcatctggctcctcgcctctctgatcggcggcccggctctgtacttcagggatacagtggaattcaacaaccacaccctctgctataacaatttccagaagcatgacccagacctgacccttatccggcaccacgtgctgacttgggtcaagtttatcatagggtatttgtttcccctcctgacaatgagtatctgttacctgtgtctcattttcaaggttaagaaaaggagtattctgatttctagtcggcacttttggacaattttggtggttgtggtggcgtttgttgtgtgttggactccttaccacttgttttccatctgggaattaaccattcatcacaactcctactctcatcacgttatgcaggccggaatccccttgagcacgggtctcgcttttctcaactcatgcctcaacccaatcctctatgtcctgatctcaaaaaaattccaggcacgttttcggagctcagtggccgagatactgaaatacacgctgtgggaagtgagttgctccggcaccgtcagcgagcagctcagaaatagcgaaacaaagaatttgtgcctactcgagacagcccagtag

SEQ ID NO: 38572 - DNA, 249 bp, Artificial Sequence
  derived and/or modified sequence
atggaagatctggaagagacgctgttcgaggaattcgagaattattcctatgatctcgattattacagtcttgaatccgacttagaggaaaaggtccagctaggcgtcgtgcattgggtgagtctcgttctctactgccttgcttttgtgctagggattcctggcaatgctattgttatttggtttacagggttcaagtggaagaagacagtcactacattgtggtttctaaatcttgctatcgcatag

SEQ ID NO: 38573 - DNA, 684 bp, Artificial Sequence
  derived and/or modified sequence
atggaggacctggaagagactttatttgaagagttcgagaattattcgtacgaccttgattactacagtttagaatccgaccttgaggaaaaggttcagctgggggtggtgcactgggtgagtctagtcctgtattgcctcgccttcgtcctgggaatccctggaaatgcgattgtgatctggtttactggtttcaagtggaaaaagacagtcactactctgtggtttcttaatttggccattgccgactttattttccttctgtttctgcctctgtacatctcctacgtggctatgaacttccactggcctttcggtatttggctatgcaaggcaaatagttttactgcccagctcaacatgtttgcctcagtgttctttctgacagtgatctcactcgaccactacattcacctgatccaccccgtactcagccaccgtcaccggacattgaagaattctctgattgtaatcatcttcatctggcttttggctagtctcataggagggcccgcactgtattttcgagataccgtagagttcaataaccatacgctctgttataataattttcaaaagcatgacccagatttaactcttattcggcatcacgtcctgacgtgggttaaattcataatcggataccttttcccattgctgaccatgagcatctgctacctgtag

SEQ ID NO: 38574 - DNA, 414 bp, Artificial Sequence
  derived and/or modified sequence
atggaggatcttgaagagacccttttcgaagaattcgagaattactcctacgatctcgactactacagcctagaaagtgatctggaggagaaggtacaactcggggtagttcactgggtgagcctggtgctctactgtctagccttcgtccttggcattcccgggaacgcaatcgttatctggttcacagggtttaagtggaagaagaccgtgacgactctctggttcctgaatttggcaatagctgacttcatcttccttctgttcctgcctctctatatttcgtacgtggccatgaacttccactggcctttcggaatctggttgtgtaaagctaattcatttaccgcccaactgaacatgttcgctagcgtgttcttcttgactgtcatctcacttgaccattacatctag

SEQ ID NO: 38575 - DNA, 537 bp, Artificial Sequence
  derived and/or modified sequence
atggaggatctagaagaaacgcttttcgaagaattcgagaattactcttacgatctggactactactctttagagtccgacctggaagaaaaggtacagctgggggtggtgcactgggtgagcctggtgctgtattgcttggcttttgtgctaggcatcccaggcaacgccatcgtgatctggtttaccggctttaaatggaaaaagacagtgacaaccctgtggttcctcaacctggccatcgcggattttatttttctgctgtttctccccctatatatcagctacgtggccatgaacttccactggccattcgggatttggctttgtaaagcaaacagctttactgctcagctcaatatgttcgcgagtgtcttctttttaactgtgattagccttgatcactacattcatctaattcatcccgttttgagtcatcggcaccgcaccctcaagaactctttgattgtaataatctttatctggctgctggcaagccttatcggcggtcctgcattgtacttccgggatacctag

SEQ ID NO: 38576 - DNA, 1068 bp, Artificial Sequence
  derived and/or modified sequence
atggaggacctggaggagaccctgtttgaggagtttgagaactacagctatgacctggactactacagcctggagagtgacctggaggagaaggtgcagctgggcgtggtgcactgggtgtccctggtgctgtactgcctggcctttgtgctgggcatccctggaaatgccatcgtcatctggttcaccggcttcaagtggaagaagacagtgaccaccctgtggttcctgaacctggccatcgctgacttcatcttcctgctcttcctgcccctgtacatctcctatgtggccatgaacttccactggcccttcggcatctggctgtgcaaggccaacagcttcaccgcccagctgaacatgtttgccagcgtcttcttcctgaccgtcatcagcctggaccactacatccacctgatccaccctgtgctgagccaccgccacaggaccctgaagaacagcctcatcgtcatcatcttcatctggctgctggccagcctcatcggcggccctgccctgtacttccgggacacagtggagttcaacaaccacaccctgtgctacaacaacttccagaagcatgaccctgacctgaccctcatccgccaccacgtgctgacctgggtgaagttcatcatcggctacctgttccccctgctgaccatgagcatctgctacctgtgcctgatcttcaaggtgaagaagaggagcatcctgatcagcagccgccacttctggaccatcctggtggtggtggtggcctttgtggtgtgctggaccccctaccacctgttcagcatctgggagctgaccatccaccacaacagctacagccaccacgtgatgcaggccggcatccccctgagcacaggcctggccttcctgaacagctgcctgaaccccatcctgtatgtgctgatcagcaagaagttccaggcccgcttccgcagctctgtggccgagatcctgaagtacaccctgtgggaggtgtcctgcagcggcaccgtgtctgagcagctgagaaattctgagaccaagaacctgtgcctgctggagacagcccagtag

SEQ ID NO: 38577 - DNA, 225 bp, Artificial Sequence
  derived and/or modified sequence
atggaggacctggaggagaccctgtttgaggagtttgagaactacagctatgacctggactactacagcctggagagtgacctggaggagaaggtgcagctgggcgtggtgcactgggtgtccctggtgctgtactgcctggcctttgtgctgggcatccctggaaatgccatcgtcatctggttcaccggcttcaagtggaagaagacagtgaccaccctgtag

SEQ ID NO: 38578 - DNA, 249 bp, Artificial Sequence
  derived and/or modified sequence
atggaggacctggaggagaccctgtttgaggagtttgagaactacagctatgacctggactactacagcctggagagtgacctggaggagaaggtgcagctgggcgtggtgcactgggtgtccctggtgctgtactgcctggcctttgtgctgggcatccctggaaatgccatcgtcatctggttcaccggcttcaagtggaagaagacagtgaccaccctgtggttcctgaacctggccatcgcctag

SEQ ID NO: 38579 - DNA, 684 bp, Artificial Sequence
  derived and/or modified sequence
atggaggacctggaggagaccctgtttgaggagtttgagaactacagctatgacctggactactacagcctggagagtgacctggaggagaaggtgcagctgggcgtggtgcactgggtgtccctggtgctgtactgcctggcctttgtgctgggcatccctggaaatgccatcgtcatctggttcaccggcttcaagtggaagaagacagtgaccaccctgtggttcctgaacctggccatcgctgacttcatcttcctgctcttcctgcccctgtacatctcctatgtggccatgaacttccactggcccttcggcatctggctgtgcaaggccaacagcttcaccgcccagctgaacatgtttgccagcgtcttcttcctgaccgtcatcagcctggaccactacatccacctgatccaccctgtgctgagccaccgccacaggaccctgaagaacagcctcatcgtcatcatcttcatctggctgctggccagcctcatcggcggccctgccctgtacttccgggacacagtggagttcaacaaccacaccctgtgctacaacaacttccagaagcatgaccctgacctgaccctcatccgccaccacgtgctgacctgggtgaagttcatcatcggctacctgttccccctgctgaccatgagcatctgctacctgtag

SEQ ID NO: 38580 - DNA, 414 bp, Artificial Sequence
  derived and/or modified sequence
atggaggacctggaggagaccctgtttgaggagtttgagaactacagctatgacctggactactacagcctggagagtgacctggaggagaaggtgcagctgggcgtggtgcactgggtgtccctggtgctgtactgcctggcctttgtgctgggcatccctggaaatgccatcgtcatctggttcaccggcttcaagtggaagaagacagtgaccaccctgtggttcctgaacctggccatcgctgacttcatcttcctgctcttcctgcccctgtacatctcctatgtggccatgaacttccactggcccttcggcatctggctgtgcaaggccaacagcttcaccgcccagctgaacatgtttgccagcgtcttcttcctgaccgtcatcagcctggaccactacatctag

SEQ ID NO: 38581 - DNA, 537 bp, Artificial Sequence
  derived and/or modified sequence
atggaggacctggaggagaccctgtttgaggagtttgagaactacagctatgacctggactactacagcctggagagtgacctggaggagaaggtgcagctgggcgtggtgcactgggtgtccctggtgctgtactgcctggcctttgtgctgggcatccctggaaatgccatcgtcatctggttcaccggcttcaagtggaagaagacagtgaccaccctgtggttcctgaacctggccatcgctgacttcatcttcctgctcttcctgcccctgtacatctcctatgtggccatgaacttccactggcccttcggcatctggctgtgcaaggccaacagcttcaccgcccagctgaacatgtttgccagcgtcttcttcctgaccgtcatcagcctggaccactacatccacctgatccaccctgtgctgagccaccgccacaggaccctgaagaacagcctcatcgtcatcatcttcatctggctgctggccagcctcatcggcggccctgccctgtacttccgggacacctag

SEQ ID NO: 38582 - DNA, 1068 bp, Artificial Sequence
  derived and/or modified sequence
atggaggacctggaggagaccctgttcgaggagttcgagaactacagttacgacctggactattacagcttggaatctgatctggaggaaaaggtgcagcttggtgttgtccattgggtcagcctggtcctttattgtcttgccttcgtgttggggatccccggtaatgccatagttatctggtttaccggattcaaatggaagaagactgtcactacactgtggttcttgaacttagcaatcgccgattttatttttctgctgttccttccattgtatatttcatacgtggcgatgaactttcactggccatttggcatttggctgtgcaaggctaacagtttcacagctcaactgaatatgttcgcatcagtcttcttcctaacagtgatctccttagaccactatattcatctgatccatccggtgttgtcccataggcaccgaaccctgaaaaactcgcttatcgtaataatcttcatctggctgctggcttctctaatcggtggcccagctctgtactttagggacactgtcgaatttaacaatcacaccctctgttacaacaattttcagaaacatgatcctgacctcacactgattcggcaccatgtgctcacttgggtgaagtttattataggctacctttttcctctcctcaccatgtccatctgttatctgtgtctgatctttaaagtcaagaagcggtccattctgatttcatcccgacacttttggacaattttagtggtcgtggtagcattcgtcgtgtgctggaccccatatcatctattcagcatatgggaactcaccatccaccataattcttatagccaccatgtgatgcaggccggtatcccactgtccaccggccttgccttcctaaactcctgtttgaaccctatcctctacgtgttgatctcaaaaaagttccaggcccgcttccgatcctctgtggcagagatacttaagtataccttgtgggaggtctcctgttccggcacagtgtcagagcagttgcggaactcggaaacaaagaacctgtgcctgcttgaaacagcccagtag

SEQ ID NO: 38583 - DNA, 225 bp, Artificial Sequence
  derived and/or modified sequence
atggaggacctggaggagaccctgttcgaggagttcgagaactactcatacgacctggattactattcgttggagagtgatttggaagaaaaggtgcagttgggagtggtacattgggtttccctggtgttatattgtcttgcgttcgtgctgggcatccccggcaacgcaatagtaatatggttcactggcttcaaatggaagaaaactgtgactactctctag

SEQ ID NO: 38584 - DNA, 1068 bp, Artificial Sequence
  derived and/or modified sequence
atggaggacctggaggagaccctgttcgaggagttcgagaactactcttacgacctggactactattccctcgagtctgatctggaggagaaagtgcagctcggggtggtacactgggtttcactggtgctgtactgtctagctttcgtgcttgggattcctggtaacgccatagtgatctggttcaccggtttcaaatggaaaaagactgtgaccacgttatggtttttgaacttggccatcgcggatttcatcttcttgctgtttttgcctctgtatatttcatacgtggctatgaactttcactggcccttcggtatttggctgtgcaaggctaactctttcacagcccagctgaacatgttcgccagtgttttcttccttaccgtaattagtctcgatcattatattcatctcatccatcctgtgctgagccaccggcaccgcacgctcaagaattctctcatcgtgattatattcatatggctgctggctagcctgattggaggcccagccctctacttcagggatacagtagagttcaacaaccacaccctttgttacaataactttcagaagcacgaccccgatttaacattgattaggcaccacgttctgacctgggttaaatttataattgggtacctttttccacttttgactatgtcaatttgctatctgtgtcttatctttaaggttaagaaaagatcaattctcatcagctcacggcacttttggaccattttggtagtcgtcgtggctttcgtggtgtgttggaccccatatcacttgtttagcatatgggagctgaccattcatcataattcctacagccaccacgttatgcaggccggcattcccctcagcaccggcctcgctttcctcaatagctgtctgaacccgatcctgtatgtgctaattagtaaaaaattccaggctagattcaggtccagtgtggctgaaatactgaagtacaccttatgggaggtttcttgctctggcacagtcagtgagcaactgaggaacagtgaaacaaagaacctgtgtttgctcgagacagctcagtag

SEQ ID NO: 38585 - DNA, 249 bp, Artificial Sequence
  derived and/or modified sequence
atggaggacctggaggagaccctgttcgaggagttcgagaactacagctacgatcttgattactattctctagaaagcgacttggaggaaaaagtgcagctgggagtcgtgcactgggtgtccttggtgctctactgtttggctttcgtgctgggtattccagggaacgctattgtcatttggttcactggctttaagtggaagaagacagtgactacgctgtggttcctgaatctggccatagcgtag

SEQ ID NO: 38586 - DNA, 684 bp, Artificial Sequence
  derived and/or modified sequence
atggaggacctggaggagaccctgttcgaggagttcgagaactacagctatgacctggactactacagccttgagagcgatctcgaggagaaggtgcagctcggggtggtgcactgggtgtctttggtgctgtactgccttgctttcgtcctcggcatccctggtaatgccatcgtcatctggtttacaggatttaaatggaagaagaccgtgaccaccctgtggttcttaaacttggccatcgcggactttatcttccttttgtttctgcctctgtacatcagctacgtcgccatgaactttcactggcccttcggcatctggctttgcaaagccaacagctttaccgcccagctcaatatgttcgcatctgtttttttcctcaccgtgatcagtttggatcactacattcacctcatccacccagtgctgagccaccgtcatcggactctcaagaactccttgatcgtgatcatcttcatctggctgttagcgtccttgattggcggtcccgcactgtacttccgtgacaccgtcgaatttaacaaccacacactttgctacaataattttcagaagcacgacccagacctaaccttgattcggcatcatgttttgacgtgggtcaaattcatcatcgggtacttgttcccattgctgacaatgtccatttgctacctctag

SEQ ID NO: 38587 - DNA, 414 bp, Artificial Sequence
  derived and/or modified sequence
atggaggacctggaggagaccctgttcgaggagttcgagaactacagttacgacttggactactacagcctcgaaagcgacctggaagagaaggtacagctgggggtggttcattgggtgtcactggtgttgtattgtcttgccttcgtgcttggcattcccgggaatgctattgtgatctggttcaccggtttcaaatggaaaaagacagtgacaactctgtggtttctgaatctggccatagccgatttcatctttttgcttttcctccccctgtacatcagctacgtggccatgaacttccactggccatttggtatctggctgtgtaaggcaaacagttttactgcccagctcaatatgtttgcgagcgtattcttcctaacggtgatttcattagatcattacatctag

SEQ ID NO: 38588 - DNA, 537 bp, Artificial Sequence
  derived and/or modified sequence
atggaggacctggaggagaccctgttcgaggagttcgagaactactcctatgatctggactattactccttggagagcgacctggaagagaaagttcagttgggtgtggtccattgggtatcgcttgtgctgtactgcctggccttcgtgctcggcatcccgggcaatgcaattgtgatttggttcacaggcttcaagtggaagaaaaccgtcacaaccctatggttcctaaatctcgccattgccgattttatttttctgctgttcctgccactgtatatctcatacgtagccatgaattttcattggcccttcggtatatggctttgcaaggcgaactcctttacagcccagctgaatatgtttgcctccgtgttcttcctgacagtcatcagcctggaccactacattcatctgatccatccagtgctcagccaccggcaccgtactttaaagaatagtctgatcgtgattatatttatctggctattagcgtctctaattggcggaccggcattatactttcgggacacatag

SEQ ID NO: 38589 - DNA, 1068 bp, Artificial Sequence
  derived and/or modified sequence
atggaggacctcgaagagacactgtttgaggaattcgagaattacagctacgacttagactactattcgctagagtcagacttagaagaaaaggtgcagctcggagtggtccactgggtgtcacttgtgctttactgtctggcatttgtcctaggcatacccggtaacgccatcgtgatctggttcacagggtttaaatggaaaaaaactgtcaccacactgtggtttctgaatcttgctatagctgactttatttttctcctctttctgcccctgtatatctcctatgtggcaatgaattttcattggccgtttggcatttggctttgtaaagccaattctttcacagcccaactgaacatgttcgcctcagtgtttttcctgacggtgatctcactggatcactatattcacctcatacatcctgtattatctcatagacatagaaccttaaagaactccttgattgtcataatttttatttggctactggcttcattaatcggagggccagccctctacttcagggatacagtagagtttaataaccacaccctttgctacaacaatttccagaagcacgaccctgacctcacccttatacgccatcatgttcttacatgggtgaagtttattataggttatctctttccactgttgacaatgtcaatttgttatctctgcctgatcttcaaagtcaagaaaaggagtatcctcatatcgtcccgtcatttttggacgattctggtagtggtggttgccttcgtggtttgttggacgccgtatcacctgttttctatttgggagctcacaatacaccataattcctatagtcatcacgttatgcaagccggaatccctttatcgaccggtctagcatttctaaatagttgcctgaaccccattctctacgtgcttataagtaagaagttccaggctaggttccgctctagcgtagccgaaatactgaaatacactctctgggaagtgagctgctcaggtacagtttctgagcagctcagaaactcagagaccaagaacctctgtctgctggagacagctcagtag

SEQ ID NO: 38590 - DNA, 225 bp, Artificial Sequence
  derived and/or modified sequence
atggaagatctggaggagaccctgttcgaggaattcgaaaattattcctacgatcttgattattactccctggagtcagatcttgaggagaaagtacaactgggcgtggtacactgggtcagtctggtgctttactgtttagctttcgtgcttggaatcccgggaaacgccatcgtgatttggttcactggatttaagtggaaaaagaccgtaaccacgctttag

SEQ ID NO: 38591 - DNA, 1068 bp, Artificial Sequence
  derived and/or modified sequence
atggaagacctcgaagaaacgctgttcgaagaattcgaaaattattcctatgatctcgactactactccctggagtcagacctagaggaaaaagtgcaactcggagtggtccactgggtgtcactagtcctttattgtttggcctttgttttgggcatcccgggaaatgccatcgtgatatggtttactgggttcaaatggaagaagactgtgaccacgctgtggttcctcaacttagccattgcggatttcatctttctgctgtttctccctctttatatctcatatgttgcaatgaacttccactggccattcggtatttggttgtgtaaagccaacagctttactgctcagctgaatatgttcgccagcgtattcttcctgacagtgatctcacttgatcactacatccatctcattcatcctgtcctcagccaccggcatcggactctgaagaactcactcatcgtgattatcttcatctggctgctggcatctctgattggcggaccggctctgtatttccgcgatactgtggaattcaataatcataccctctgttacaataactttcagaagcacgatccagacttgaccctaattcgtcatcacgtccttacttgggtgaagtttattatcggttatctgttcccactgttgactatgtccatttgctatctgtgcctcatttttaaggttaagaaacgcagcatacttataagtagtaggcatttttggactatcttggtggtggtggtggcatttgtggtatgctggacaccctaccacttgttttctatctgggagctgacaatccatcataacagctatagccatcacgtgatgcaggccggaattccactgtcaactggccttgcctttttgaactcatgccttaacccaatcttgtacgtccttatctccaaaaagtttcaggccagatttagatcatccgtcgctgaaattcttaaatacacactgtgggaggtttcctgtagcggtacagtgtcagagcagcttaggaacagtgagactaagaatttgtgcctgcttgagacggcccagtag

SEQ ID NO: 38592 - DNA, 249 bp, Artificial Sequence
  derived and/or modified sequence
atggaggacttggaagagaccctgttcgaagaattcgaaaattatagttatgacctcgactactattctctcgaatcggacctcgaggagaaagttcagctcggagtggtccactgggtgtccctggtcttatactgtctcgcctttgtgctaggcattcccggtaacgcaattgtgatctggtttacgggatttaaatggaaaaaaacagtgactaccctgtggtttctcaacctggctatagcttag

SEQ ID NO: 38593 - DNA, 684 bp, Artificial Sequence
  derived and/or modified sequence
atggaggaccttgaagagactctatttgaagagttcgagaactattcctatgacctcgactattactccctggagagcgatttggaagaaaaggtgcaactgggtgtggtacattgggtgtccttggtgctgtactgccttgcatttgtattggggatccccggaaatgccatcgttatttggttcacaggttttaaatggaaaaaaacagtgactactctgtggttcctgaacttggccatcgctgattttatctttcttcttttcctgcccctatatatatcctatgttgctatgaactttcattggccatttggcatttggctttgtaaggccaatagcttcacagctcagttgaacatgtttgcttcggtgttctttctgacagtgatctcgcttgatcactatatccatctgattcaccctgtgctgagtcaccggcatcgtaccttgaaaaatagtctgattgtgatcatatttatatggctcctggctagcctcatcgggggacctgcgctgtactttcgggatacagtagaatttaataatcacactctgtgctacaacaatttccagaaacatgaccccgacttaacccttataagacatcatgttctgacttgggtaaaattcatcatcggctacctcttccccctcctgactatgagtatctgctacctctag

SEQ ID NO: 38594 - DNA, 414 bp, Artificial Sequence
  derived and/or modified sequence
atggaggatctcgaggagacgctatttgaagagtttgagaactacagctacgacttagactactacagtctggaatcggatctggaggaaaaagtccagctcggggtggtacactgggtgtccttagtgctctattgtcttgctttcgtcctgggaattccaggcaatgcaatagtgatctggttcactggcttcaagtggaaaaagacagttaccacactttggtttctcaacttggccatcgctgattttatattcctcctgtttctacctctttatatcagctacgtggcaatgaacttccactggccatttgggatttggctgtgtaaagccaatagctttaccgcccagcttaacatgtttgcatctgtgttctttcttactgtgatttcgctggaccactacatctag

SEQ ID NO: 38595 - DNA, 537 bp, Artificial Sequence
  derived and/or modified sequence
atggaagatctggaagaaactctgttcgaggagttcgaaaactactcgtacgatttggattattactcgttagagtccgacctggaggaaaaggtccagttgggagtggtgcattgggttagtctggtcttatattgcctggcatttgtcctagggatacctgggaacgcaatagtcatttggtttacaggatttaagtggaagaagaccgtgacgactctctggttcctaaacctggctatcgcggacttcatatttctcctgttcctgccgctgtatatttcgtatgtggcgatgaacttccactggcctttcggcatctggttatgtaaggccaacagcttcactgcccagcttaacatgtttgcaagcgtgttctttttgacggttatatcgttggatcactacatccacctcatacatccagtgctgtcacacaggcacaggactcttaaaaactcacttatcgtcataatctttatctggctgttagcgagtttgattggcggaccagctctttacttcagagatacctag

SEQ ID NO: 38596 - DNA, 1068 bp, Artificial Sequence
  derived and/or modified sequence
atggaggacctggaggagaccctgttcgaggagttcgagaactacagctacgacctggactactacagcctggagagcgacctggaggagaaggtgcagctgggcgtggtgcactgggtgagcctggtgctgtactgcctggccttcgtgctgggcatccccggcaacgccatcgtgatctggttcaccggcttcaagtggaagaagaccgtgaccaccctgtggttcctgaacctggccatcgccgacttcatcttcctgctgttcctgcccctgtacatcagctacgtggccatgaacttccactggcccttcggcatctggctgtgcaaggccaacagcttcaccgcccagctgaacatgttcgccagcgtgttcttcctgaccgtgatcagcctggaccactacatccacctgatccaccccgtgctgagccacagacacagaaccctgaagaacagcctgatcgtgatcatcttcatctggctgctggccagcctgatcggcggccccgccctgtacttcagagacaccgtggagttcaacaaccacaccctgtgctacaacaacttccagaagcacgaccccgacctgaccctgatcagacaccacgtgctgacctgggtgaagttcatcatcggctacctgttccccctgctgaccatgagcatctgctacctgtgcctgatcttcaaggtgaagaagagaagcatcctgatcagcagcagacacttctggaccatcctggtggtggtggtggccttcgtggtgtgctggaccccctaccacctgttcagcatctgggagctgaccatccaccacaacagctacagccaccacgtgatgcaggccggcatccccctgagcaccggcctggccttcctgaacagctgcctgaaccccatcctgtacgtgctgatcagcaagaagttccaggccagattcagaagcagcgtggccgagatcctgaagtacaccctgtgggaggtgagctgcagcggcaccgtgagcgagcagctgagaaacagcgagaccaagaacctgtgcctgctggagaccgcccagtag

SEQ ID NO: 38597 - DNA, 225 bp, Artificial Sequence
  derived and/or modified sequence
atggaggacctggaggagaccctgttcgaggagttcgagaactacagctacgacctggactactacagcctggagagcgacctggaggagaaggtgcagctgggcgtggtgcactgggtgagcctggtgctgtactgcctggccttcgtgctgggcatccccggcaacgccatcgtgatctggttcaccggcttcaagtggaagaagaccgtgaccaccctgtag

SEQ ID NO: 38598 - DNA, 249 bp, Artificial Sequence
  derived and/or modified sequence
atggaggacctggaggagaccctgttcgaggagttcgagaactacagctacgacctggactactacagcctggagagcgacctggaggagaaggtgcagctgggcgtggtgcactgggtgagcctggtgctgtactgcctggccttcgtgctgggcatccccggcaacgccatcgtgatctggttcaccggcttcaagtggaagaagaccgtgaccaccctgtggttcctgaacctggccatcgcctag

SEQ ID NO: 38599 - DNA, 684 bp, Artificial Sequence
  derived and/or modified sequence
atggaggacctggaggagaccctgttcgaggagttcgagaactacagctacgacctggactactacagcctggagagcgacctggaggagaaggtgcagctgggcgtggtgcactgggtgagcctggtgctgtactgcctggccttcgtgctgggcatccccggcaacgccatcgtgatctggttcaccggcttcaagtggaagaagaccgtgaccaccctgtggttcctgaacctggccatcgccgacttcatcttcctgctgttcctgcccctgtacatcagctacgtggccatgaacttccactggcccttcggcatctggctgtgcaaggccaacagcttcaccgcccagctgaacatgttcgccagcgtgttcttcctgaccgtgatcagcctggaccactacatccacctgatccaccccgtgctgagccacagacacagaaccctgaagaacagcctgatcgtgatcatcttcatctggctgctggccagcctgatcggcggccccgccctgtacttcagagacaccgtggagttcaacaaccacaccctgtgctacaacaacttccagaagcacgaccccgacctgaccctgatcagacaccacgtgctgacctgggtgaagttcatcatcggctacctgttccccctgctgaccatgagcatctgctacctgtag

SEQ ID NO: 38600 - DNA, 414 bp, Artificial Sequence
  derived and/or modified sequence
atggaggacctggaggagaccctgttcgaggagttcgagaactacagctacgacctggactactacagcctggagagcgacctggaggagaaggtgcagctgggcgtggtgcactgggtgagcctggtgctgtactgcctggccttcgtgctgggcatccccggcaacgccatcgtgatctggttcaccggcttcaagtggaagaagaccgtgaccaccctgtggttcctgaacctggccatcgccgacttcatcttcctgctgttcctgcccctgtacatcagctacgtggccatgaacttccactggcccttcggcatctggctgtgcaaggccaacagcttcaccgcccagctgaacatgttcgccagcgtgttcttcctgaccgtgatcagcctggaccactacatctag

SEQ ID NO: 38601 - DNA, 537 bp, Artificial Sequence
  derived and/or modified sequence
atggaggacctggaggagaccctgttcgaggagttcgagaactacagctacgacctggactactacagcctggagagcgacctggaggagaaggtgcagctgggcgtggtgcactgggtgagcctggtgctgtactgcctggccttcgtgctgggcatccccggcaacgccatcgtgatctggttcaccggcttcaagtggaagaagaccgtgaccaccctgtggttcctgaacctggccatcgccgacttcatcttcctgctgttcctgcccctgtacatcagctacgtggccatgaacttccactggcccttcggcatctggctgtgcaaggccaacagcttcaccgcccagctgaacatgttcgccagcgtgttcttcctgaccgtgatcagcctggaccactacatccacctgatccaccccgtgctgagccacagacacagaaccctgaagaacagcctgatcgtgatcatcttcatctggctgctggccagcctgatcggcggccccgccctgtacttcagagacacctag

SEQ ID NO: 38602 - protein, 375 aa, Artificial Sequence
  derived and/or modified sequence
MDVTSQARGVGLEMYPGTAQPAAPNTTSPELNLSHPLLGTALANGTGELSEHQQYVIGLFLSCLYTIFLFPIGFVGNILILVVNISFREKMTIPDLYFINLAVADLILVADSLIEVFNLHERYYDIAVLCTFMSLFLQVNMYSSVFFLTWMSFDRYIALARAMRCSLFRTKHHARLSCGLIWMASVSATLVPFTAVHLQHTDEACFCFADVREVQWLEVTLGFIVPFAIIGLCYSLIVRVLVRAHRHRGLRPRRQKALRMILAVVLVFFVCWLPENVFISVHLLQRTQPGAAPCKQSFRHAHPLTGHIVNLAAFSNSCLNPLIYSFLGETFRDKLRLYIEQKTNLPALNRFCHAALKAVIPDSTEQSDVRFSSAV

SEQ ID NO: 38603 - protein, 73 aa, Artificial Sequence
  derived and/or modified sequence
MDVTSQARGVGLEMYPGTAQPAAPNTTSPELNLSHPLLGTALANGTGELSEHQQYVIGLFLSCLYTIFLFPIG

SEQ ID NO: 38604 - protein, 408 aa, Artificial Sequence
  derived and/or modified sequence
MDVTSQARGVGLEMYPGTAQPAAPNTTSPELNLSHPLLGTALANGTGELSEHQQYVIGLFLSCLYTIFLFPIGFVGNILILVVNISFREKMTIPDLYFINLAVADLILVADSLIEVFNLHERYYDIAVLCTFMSLFLQVNMYSSVFFLTWMSFDRYIALARAMRCSLFRTKHHARLSCGLIWMASVSATLVPFTAVHLQHTDEACFCFADVREVQWLEVTLGFIVPFAIIGLCYSLIVRVLVRAHRHRGLRPRRQKALRMILAVVLVFFVCWLPENVFISVHLLQRTQPGAAPCKQSFRHAHPLTHGHVMSLNCGQMWLLAPRGLARVTLAWSPWGCLGNLTTGHLALLTQNCYNPKALAPQGPKASGDQPVTQLLPANPACRCTCLPLQETFLTPSTRKATRRGHCG

SEQ ID NO: 38605 - DNA, 2778 bp, Artificial Sequence
  derived and/or modified sequence
ggaaaacgacacctagaagtaggagtgagattcgctgaagttcccttctgaggaagacccacccctccgcctggagagccggggctggcggtgcctgaggaccccttcggcctggacagcccacgcgggcttggggggcctcgctctgccctcatggggcggccatcggttcccgaagcggcgagtgaaaattcaaatggccagtagggggcgcactcggaagtggccgccccgcatgaggcagttcagcggccccgagagtccggggagggaggtttattctccgcctgcacgagactgtgaaatccgcaaccatgagcaggagaggcggccctggtggggaagaggccaccaacatctggacggcaggtacccagagagtgagcagctccacgcgggactgtgcacggtggccgacacccgcagggacgcccgccggacgagcacgcggagggccctcgcctccacggatgcaccatgccggtgtgaggagcatctgttcttcccactctctgcagttaacaaacccaacccaaaccaccacaggtgctcctcctggggagtttcctgtctgacaaatgccaggctcacttcaaggagaatcacgcttctttctaaagatggattcaccatttaaaacagagctctgggagcctttcggcaaatcttgaaagctgcacggtgcagagacatggatgtgacttcccaagcccggggcgtgggcctggagatgtacccaggcaccgcgcagcctgcggcccccaacaccacctcccccgagctcaacctgtcccacccgctcctgggcaccgccctggccaatgggacaggtgagctctcggagcaccagcagtacgtgatcggcctgttcctctcgtgcctctacaccatcttcctcttccccatcggctttgtgggcaacatcctgatcctggtggtgaacatcagcttccgcgagaagatgaccatccccgacctgtacttcatcaacctggcggtggcggacctcatcctggtggccgactccctcattgaggtgttcaacctgcacgagcggtactacgacatcgccgtcctgtgcaccttcatgtcgctcttcctgcaggtcaacatgtacagcagcgtcttcttcctcacctggatgagcttcgaccgctacatcgccctggccagggccatgcgctgcagcctgttccgcaccaagcaccacgcccggctgagctgtggcctcatctggatggcatccgtgtcagccacgctggtgcccttcaccgccgtgcacctgcagcacaccgacgaggcctgcttctgtttcgcggatgtccgggaggtgcagtggctcgaggtcacgctgggcttcatcgtgcccttcgccatcatcggcctgtgctactccctcattgtccgggtgctggtcagggcgcaccggcaccgtgggctgcggccccggcggcagaaggcgctccgcatgatcctcgcggtggtgctggtcttcttcgtctgctggctgccggagaacgtcttcatcagcgtgcacctcctgcagcggacgcagcctggggccgctccctgcaagcagtctttccgccatgcccaccccctcacgggccacattgtcaacctcgccgccttctccaacagctgcctaaaccccctcatctacagctttctcggggagaccttcagggacaagctgaggctgtacattgagcagaaaacaaatttgccggccctgaaccgcttctgtcacgctgccctgaaggccgtcattccagacagcaccgagcagtcggatgtgaggttcagcagtgccgtgtagacagccttggccgcataggcccagccagggtgtgactcgggagctgcacacacctgggtggacacaaggcacggccacgtcatgtctctaaactgcggtcagatgtggcttctggctcctcggggcctcgcgagggtcacgcttgcctggtcaccctggggctgcttaggaaacctcacgactggtcaccttgcactcctcacacagaattgctacaatcccaaagcgctcgccccgcagggtccaaaggccagcggtgaccagcctgtcacccagctcctccccgccaaccctgcctgccgctgcacctgcctgccgctgcaggaaacatttctgacaccgtcgaccaggaaagccacacggagaggccactgtgggtgaagcgcctcagttacacaggaaccctaaagcaaatctgccaccgtgggggaactgacgctggagatgcaaggtgctggtgggtctgagctggacgtcgcggtgtgtcctctgtgcccacggtctgagctagctagcgcaccgccgagttaaagaggagaaggaaaacatgctgctctggtgcacgcctgagcgtcctccatcttccaggatggcagcaatggcgctgtgcggcctcaccaggcccacgaggagcagcagcgctcggcccggagcagcaggaaggcccctctgtggagcgcccgccgtctgctccggggtggttcagtcactgcttgttgacatcaacatggcaattgcactcatgtggactgggaccgtgcgagctgccgtgtgggttagtcgggtgccaggacaatgaaatactccagcacctgtggctgacgaatttgtttctacagaaataacagctggggacaactgcggtgatgatgtaaaaaccttcccataaaatgtaagaaaagctgatgaggctggtgacgttcagcctttgtcaataaacctgtcatgtgcggatcctt

SEQ ID NO: 38606 - DNA, 2639 bp, Artificial Sequence
  derived and/or modified sequence
aaagccctgtgccaaggggcagactcactggctcagagggaggacgcacccgccagccagccgggaaccttccctcgcgggctcccagggcgggtctcttcctctctctagccctgctcaggcattcggcaggtccagcagaggtacacctcctgcagcgggttccaagtgcacctccagcctgatgggcctgaccaaggaggcttccaggagcacagaaggggctgcaacccaggtacccagagagtgagcagctccacgcgggactgtgcacggtggccgacacccgcagggacgcccgccggacgagcacgcggagggccctcgcctccacggatgcaccatgccggtgtgaggagcatctgttcttcccactctctgcagttaacaaacccaacccaaaccaccacaggtgctcctcctggggagtttcctgtctgacaaatgccaggctcacttcaaggagaatcacgcttctttctaaagatggattcaccatttaaaacagagctctgggagcctttcggcaaatcttgaaagctgcacggtgcagagacatggatgtgacttcccaagcccggggcgtgggcctggagatgtacccaggcaccgcgcagcctgcggcccccaacaccacctcccccgagctcaacctgtcccacccgctcctgggcaccgccctggccaatgggacaggtgagctctcggagcaccagcagtacgtgatcggcctgttcctctcgtgcctctacaccatcttcctcttccccatcggctttgtgggcaacatcctgatcctggtggtgaacatcagcttccgcgagaagatgaccatccccgacctgtacttcatcaacctggcggtggcggacctcatcctggtggccgactccctcattgaggtgttcaacctgcacgagcggtactacgacatcgccgtcctgtgcaccttcatgtcgctcttcctgcaggtcaacatgtacagcagcgtcttcttcctcacctggatgagcttcgaccgctacatcgccctggccagggccatgcgctgcagcctgttccgcaccaagcaccacgcccggctgagctgtggcctcatctggatggcatccgtgtcagccacgctggtgcccttcaccgccgtgcacctgcagcacaccgacgaggcctgcttctgtttcgcggatgtccgggaggtgcagtggctcgaggtcacgctgggcttcatcgtgcccttcgccatcatcggcctgtgctactccctcattgtccgggtgctggtcagggcgcaccggcaccgtgggctgcggccccggcggcagaaggcgctccgcatgatcctcgcggtggtgctggtcttcttcgtctgctggctgccggagaacgtcttcatcagcgtgcacctcctgcagcggacgcagcctggggccgctccctgcaagcagtctttccgccatgcccaccccctcacgggccacattgtcaacctcgccgccttctccaacagctgcctaaaccccctcatctacagctttctcggggagaccttcagggacaagctgaggctgtacattgagcagaaaacaaatttgccggccctgaaccgcttctgtcacgctgccctgaaggccgtcattccagacagcaccgagcagtcggatgtgaggttcagcagtgccgtgtagacagccttggccgcataggcccagccagggtgtgactcgggagctgcacacacctgggtggacacaaggcacggccacgtcatgtctctaaactgcggtcagatgtggcttctggctcctcggggcctcgcgagggtcacgcttgcctggtcaccctggggctgcttaggaaacctcacgactggtcaccttgcactcctcacacagaattgctacaatcccaaagcgctcgccccgcagggtccaaaggccagcggtgaccagcctgtcacccagctcctccccgccaaccctgcctgccgctgcacctgcctgccgctgcaggaaacatttctgacaccgtcgaccaggaaagccacacggagaggccactgtgggtgaagcgcctcagttacacaggaaccctaaagcaaatctgccaccgtgggggaactgacgctggagatgcaaggtgctggtgggtctgagctggacgtcgcggtgtgtcctctgtgcccacggtctgagctagctagcgcaccgccgagttaaagaggagaaggaaaacatgctgctctggtgcacgcctgagcgtcctccatcttccaggatggcagcaatggcgctgtgcggcctcaccaggcccacgaggagcagcagcgctcggcccggagcagcaggaaggcccctctgtggagcgcccgccgtctgctccggggtggttcagtcactgcttgttgacatcaacatggcaattgcactcatgtggactgggaccgtgcgagctgccgtgtgggttagtcgggtgccaggacaatgaaatactccagcacctgtggctgacgaatttgtttctacagaaataacagctggggacaactgcggtgatgatgtaaaaaccttcccataaaatgtaagaaaagctgatgaggctggtgacgttcagcctttgtcaataaacctgtcatgtgcgga

SEQ ID NO: 38607 - DNA, 2971 bp, Artificial Sequence
  derived and/or modified sequence
gcattactcatactcagcggacaaaggatcactcagcattcaatctcaccacttcaaaacattacagagggaaaacgacacctagaagtaggagtgagattcgctgaagttcccttctgaggaagacccacccctccgcctggagagccggggctggcggtgcctgaggaccccttcggcctggacagcccacgcgggcttggggggcctcgctctgccctcatggggcggccatcggttcccgaagcggcgagtgaaaattcaaatggccagtagggggcgcactcggaagtggccgccccgcatgaggcagttcagcggccccgagagtccggggagggaggtttattctccgcctgcacgagactgtgaaatccgcaaccatgagcaggagaggcggccctggtggggaagaggccaccaacatctggacggcagccctgctcaggcattcggcaggtccagcagaggtacacctcctgcagcgggttccaagtgcacctccagcctgatgggcctgaccaaggaggcttccaggagcacagaaggggctgcaacccaggtacccagagagtgagcagctccacgcgggactgtgcacggtggccgacacccgcagggacgcccgccggacgagcacgcggagggccctcgcctccacggatgcaccatgccggtgtgaggagcatctgttcttcccactctctgcagttaacaaacccaacccaaaccaccacaggtgctcctcctggggagtttcctgtctgacaaatgccaggctcacttcaaggagaatcacgcttctttctaaagatggattcaccatttaaaacagagctctgggagcctttcggcaaatcttgaaagctgcacggtgcagagacatggatgtgacttcccaagcccggggcgtgggcctggagatgtacccaggcaccgcgcagcctgcggcccccaacaccacctcccccgagctcaacctgtcccacccgctcctgggcaccgccctggccaatgggacaggtgagctctcggagcaccagcagtacgtgatcggcctgttcctctcgtgcctctacaccatcttcctcttccccatcggctttgtgggcaacatcctgatcctggtggtgaacatcagcttccgcgagaagatgaccatccccgacctgtacttcatcaacctggcggtggcggacctcatcctggtggccgactccctcattgaggtgttcaacctgcacgagcggtactacgacatcgccgtcctgtgcaccttcatgtcgctcttcctgcaggtcaacatgtacagcagcgtcttcttcctcacctggatgagcttcgaccgctacatcgccctggccagggccatgcgctgcagcctgttccgcaccaagcaccacgcccggctgagctgtggcctcatctggatggcatccgtgtcagccacgctggtgcccttcaccgccgtgcacctgcagcacaccgacgaggcctgcttctgtttcgcggatgtccgggaggtgcagtggctcgaggtcacgctgggcttcatcgtgcccttcgccatcatcggcctgtgctactccctcattgtccgggtgctggtcagggcgcaccggcaccgtgggctgcggccccggcggcagaaggcgctccgcatgatcctcgcggtggtgctggtcttcttcgtctgctggctgccggagaacgtcttcatcagcgtgcacctcctgcagcggacgcagcctggggccgctccctgcaagcagtctttccgccatgcccaccccctcacgggccacattgtcaacctcgccgccttctccaacagctgcctaaaccccctcatctacagctttctcggggagaccttcagggacaagctgaggctgtacattgagcagaaaacaaatttgccggccctgaaccgcttctgtcacgctgccctgaaggccgtcattccagacagcaccgagcagtcggatgtgaggttcagcagtgccgtgtagacagccttggccgcataggcccagccagggtgtgactcgggagctgcacacacctgggtggacacaaggcacggccacgtcatgtctctaaactgcggtcagatgtggcttctggctcctcggggcctcgcgagggtcacgcttgcctggtcaccctggggctgcttaggaaacctcacgactggtcaccttgcactcctcacacagaattgctacaatcccaaagcgctcgccccgcagggtccaaaggccagcggtgaccagcctgtcacccagctcctccccgccaaccctgcctgccgctgcacctgcctgccgctgcaggaaacatttctgacaccgtcgaccaggaaagccacacggagaggccactgtgggtgaagcgcctcagttacacaggaaccctaaagcaaatctgccaccgtgggggaactgacgctggagatgcaaggtgctggtgggtctgagctggacgtcgcggtgtgtcctctgtgcccacggtctgagctagctagcgcaccgccgagttaaagaggagaaggaaaacatgctgctctggtgcacgcctgagcgtcctccatcttccaggatggcagcaatggcgctgtgcggcctcaccaggcccacgaggagcagcagcgctcggcccggagcagcaggaaggcccctctgtggagcgcccgccgtctgctccggggtggttcagtcactgcttgttgacatcaacatggcaattgcactcatgtggactgggaccgtgcgagctgccgtgtgggttagtcgggtgccaggacaatgaaatactccagcacctgtggctgacgaatttgtttctacagaaataacagctggggacaactgcggtgatgatgtaaaaaccttcccataaaatgtaagaaaagctgatgaggctggtgacgttcagcctttgtcaataaacctgtcatgtgcggatcctt

SEQ ID NO: 38608 - DNA, 1542 bp, Artificial Sequence
  derived and/or modified sequence
attccatggtactcggagtcctgggaaccactcatcactgtcgggtgcaggtggacgtcccctcacggtacccagagagtgagcagctccacgcgggactgtgcacggtggccgacacccgcagggacgcccgccggacgagcacgcggagggccctcgcctccacggatgcaccatgccggtgtgaggagcatctgttcttcccactctctgcagttaacaaacccaacccaaaccaccacaggtgctcctcctggggagtttcctgtctgacaaatgccaggctcacttcaaggagaatcacgcttctttctaaagatggattcaccatttaaaacagagctctgggagcctttcggcaaatcttgaaagctgcacggtgcagagacatggatgtgacttcccaagcccggggcgtgggcctggagatgtacccaggcaccgcgcagcctgcggcccccaacaccacctcccccgagctcaacctgtcccacccgctcctgggcaccgccctggccaatgggacaggtgagctctcggagcaccagcagtacgtgatcggcctgttcctctcgtgcctctacaccatcttcctcttccccatcggctttgtgggcaacatcctgatcctggtggtgaacatcagcttccgcgagaagatgaccatccccgacctgtacttcatcaacctggcggtggcggacctcatcctggtggccgactccctcattgaggtgttcaacctgcacgagcggtactacgacatcgccgtcctgtgcaccttcatgtcgctcttcctgcaggtcaacatgtacagcagcgtcttcttcctcacctggatgagcttcgaccgctacatcgccctggccagggccatgcgctgcagcctgttccgcaccaagcaccacgcccggctgagctgtggcctcatctggatggcatccgtgtcagccacgctggtgcccttcaccgccgtgcacctgcagcacaccgacgaggcctgcttctgtttcgcggatgtccgggaggtgcagtggctcgaggtcacgctgggcttcatcgtgcccttcgccatcatcggcctgtgctactccctcattgtccgggtgctggtcagggcgcaccggcaccgtgggctgcggccccggcggcagaaggcgctccgcatgatcctcgcggtggtgctggtcttcttcgtctgctggctgccggagaacgtcttcatcagcgtgcacctcctgcagcggacgcagcctggggccgctccctgcaagcagtctttccgccatgcccaccccctcacgggccacattgtcaacctcgccgccttctccaacagctgcctaaaccccctcatctacagctttctcggggagaccttcagggacaagctgaggctgtacattgagcagaaaacaaatttgccggccctgaaccgcttctgtcacgctgccctgaaggccgtcattccagacagcaccgagcagtcggatgtgaggttcagcagtgccgtgtagacagccttggccgcataggcccagc

SEQ ID NO: 38609 - DNA, 1105 bp, Artificial Sequence
  derived and/or modified sequence
gcattactcatactcagcggacaaaggatcactcagcattcaatctcaccacttcaaaacattacagagggaaaacgacacctagaagtaggagtgagattcgctgaagttcccttctgaggaagacccacccctccgcctggagagccggggctggcggtgcctgaggaccccttcggcctggacagcccacgcgggcttggggggcctcgctctgccctcatggggcggccatcggttcccgaagcggcgagtgaaaattcaaatggccagtagggggcgcactcggaagtggccgccccgcatgaggcagttcagcggccccgagagtccggggagggaggtttattctccgcctgcacgagactgtgaaatccgcaaccatgagcaggagaggcggccctggtggggaagaggccaccaacatctggacggcagccctgctcaggcattcggcaggtccagcagaggtacacctcctgcagcgggttccaagtgcacctccagcctgatgggcctgaccaaggaggcttccaggagcacagaaggggctgcaacccaggtacccagagagtgagcagctccacgcgggactgtgcacggtggccgacacccgcagggacgcccgccggacgagcacgcggagggccctcgcctccacggatgcaccatgccggtgtgaggagcatctgttcttcccactctctgcagttaacaaacccaacccaaaccaccacaggtgctcctcctggggagtttcctgtctgacaaatgccaggctcacttcaaggagaatcacgcttctttctaaagatggattcaccatttaaaacagagctctgggagcctttcggcaaatcttgaaagctgcacggtgcagagacatggatgtgacttcccaagcccggggcgtgggcctggagatgtacccaggcaccgcgcagcctgcggcccccaacaccacctcccccgagctcaacctgtcccacccgctcctgggcaccgccctggccaatgggacaggtgagctctcggagcaccagcagtacgtgatcggcctgttcctctcgtgcctctacaccatcttcctcttccccatcggctt

SEQ ID NO: 38610 - DNA, 1900 bp, Artificial Sequence
  derived and/or modified sequence
cttcaaggagaatcacgcttctttctaaagatggattcaccatttaaaacagagctctgggagcctttcggcaaatcttgaaagctgcacggtgcagagacatggatgtgacttcccaagcccggggcgtgggcctggagatgtacccaggcaccgcgcagcctgcggcccccaacaccacctcccccgagctcaacctgtcccacccgctcctgggcaccgccctggccaatgggacaggtgagctctcggagcaccagcagtacgtgatcggcctgttcctctcgtgcctctacaccatcttcctcttccccatcggctttgtgggcaacatcctgatcctggtggtgaacatcagcttccgcgagaagatgaccatccccgacctgtacttcatcaacctggcggtggcggacctcatcctggtggccgactccctcattgaggtgttcaacctgcacgagcggtactacgacatcgccgtcctgtgcaccttcatgtcgctcttcctgcaggtcaacatgtacagcagcgtcttcttcctcacctggatgagcttcgaccgctacatcgccctggccagggccatgcgctgcagcctgttccgcaccaagcaccacgcccggctgagctgtggcctcatctggatggcatccgtgtcagccacgctggtgcccttcaccgccgtgcacctgcagcacaccgacgaggcctgcttctgtttcgcggatgtccgggaggtgcagtggctcgaggtcacgctgggcttcatcgtgcccttcgccatcatcggcctgtgctactccctcattgtccgggtgctggtcagggcgcaccggcaccgtgggctgcggccccggcggcagaaggcgctccgcatgatcctcgcggtggtgctggtcttcttcgtctgctggctgccggagaacgtcttcatcagcgtgcacctcctgcagcggacgcagcctggggccgctccctgcaagcagtctttccgccatgcccaccccctcacgcacggccacgtcatgtctctaaactgcggtcagatgtggcttctggctcctcggggcctcgcgagggtcacgcttgcctggtcaccctggggctgcttaggaaacctcacgactggtcaccttgcactcctcacacagaattgctacaatcccaaagcgctcgccccgcagggtccaaaggccagcggtgaccagcctgtcacccagctcctccccgccaaccctgcctgccgctgcacctgcctgccgctgcaggaaacatttctgacaccgtcgaccaggaaagccacacggagaggccactgtgggtgaagcgcctcagttacacaggaaccctaaagcaaatctgccaccgtgggggaactgacgctggagatgcaaggtgctggtgggtctgagctggacgtcgcggtgtgtcctctgtgcccacggtctgagctagctagcgcaccgccgagttaaagaggagaaggaaaacatgctgctctggtgcacgcctgagcgtcctccatcttccaggatggcagcaatggcgctgtgcggcctcaccaggcccacgaggagcagcagcgctcggcccggagcagcaggaaggcccctctgtggagcgcccgccgtctgctccggggtggttcagtcactgcttgttgacatcaacatggcaattgcactcatgtggactgggaccgtgcgagctgccgtgtgggttagtcgggtgccaggacaatgaaatactccagcacctgtggctgacgaatttgtttctacagaaataacagctggggacaactgcggtgatgatgtaaaaaccttcccataaaatgtaagaaaagctgatgaggctggtgacgttcagcctttgtcaataaacctgtcatgtgcgg

SEQ ID NO: 38611 - DNA, 1128 bp, Artificial Sequence
  derived and/or modified sequence
atggacgtgacttctcaagctcggggagtcggcctggagatgtaccctgggacagcccaacccgccgcccccaataccacctcaccagaactaaacttatcccatcccttactcgggaccgccctggcgaatgggactggggagctctccgaacaccaacagtacgtgatcggactctttctcagttgtctttatacaattttcctcttccccatcgggttcgtgggcaacatcctgattctggtcgtgaacatctcattcagagagaaaatgaccattccagatttgtattttataaaccttgccgtcgcagatttgatactggtggccgacagtctcatcgaagtgttcaatctgcacgagaggtattatgatatcgcggtgctgtgcacattcatgagtttatttctgcaagtgaacatgtatagcagtgtttttttccttacctggatgtcttttgacaggtacattgccctggcaagagccatgaggtgctccctgttccgaactaaacaccatgctcgactctcttgcggcctgatatggatggcctcagtcagtgcgaccctggtgccttttacagccgtccatctgcagcacactgacgaggcttgcttttgttttgccgatgtcagagaggtgcagtggctagaagtcactttgggttttattgttccatttgctatcattggactctgttattccctgatcgtccgcgtgcttgtgagagcacatcgccatcgtggcctgagaccacgccgccagaaggctctcagaatgatactggccgtcgtgttggtctttttcgtctgctggctgccggaaaatgtatttatctctgtgcatttattgcaaaggacccagcctggtgccgcaccatgtaaacagtccttcagacacgcgcacccgttgactgggcacatagtgaatctggctgctttcagtaacagttgcctcaatccactgatttactcttttcttggagaaaccttccgggataaacttcgcctatacatcgagcagaagacgaatttaccagccctaaatcggttttgccatgcagcattgaaggccgtcattcccgattcaactgagcaatctgatgtgcgcttctctagtgctgtgtag

SEQ ID NO: 38612 - DNA, 1128 bp, Artificial Sequence
  derived and/or modified sequence
atggatgttacatcccaggccaggggagtgggcctggaaatgtatccaggtacagcccagcctgcagcccctaatactacatctcccgagctgaatctctcacacccactcctcggaactgctttagcaaacggcactggggaattgtctgaacaccagcagtacgttatcgggttgtttctgtcctgtctgtataccatttttctgttccccatcgggtttgttgggaatatcctgatcctggtagtgaacatctcatttagagaaaagatgactatcccagacctgtattttatcaatttggccgtcgctgaccttattctcgttgccgactcacttatcgaggtatttaatctgcatgaaagatattatgacatcgccgtgctttgcacctttatgagcctgtttctgcaggtcaacatgtactcctcggttttctttttaacatggatgagcttcgatagatatattgccctcgcacgcgccatgcgatgctcactgttcaggacgaagcaccacgcccggctgtcttgtggcctaatctggatggccagtgttagcgccaccctggtaccatttacggctgtacacttgcaacacacagatgaagcttgcttttgcttcgctgatgtgcgagaggtacagtggcttgaggtcactctgggtttcattgtgccgtttgccatcatcgggctgtgttatagccttatagtccgagtgttggtcagagcccaccgacatcggggtcttcgaccccgcagacagaaggcactgaggatgattctggccgtggttcttgtcttcttcgtctgttggttgcccgaaaacgtatttatctccgtacatttgctgcagaggacccagcccggggctgccccttgcaagcagtctttccgccacgctcacccactgacggggcacatcgtcaatttggctgcattttccaacagctgtctgaaccccctgatttactcctttctgggagaaacctttagagacaaattgcggctgtacatagaacagaagaccaacctccccgcacttaatcggttctgccacgctgcacttaaggcggtaatcccggatagcaccgagcagagtgacgtcaggttctcatccgctgtctag

SEQ ID NO: 38613 - DNA, 1128 bp, Artificial Sequence
  derived and/or modified sequence
atggatgtgacaagccaggccaggggtgtcggccttgaaatgtacccgggcacagcacaacccgccgcccctaataccacctctcctgagttaaatctgagccaccctttgctggggacagcactcgcgaacggtaccggggagctatctgagcaccagcagtatgtgattgggctttttctgtcttgtctgtatactatctttctgtttcctatcggcttcgtgggcaacatcctgatcttggtggtgaatatttctttccgggaaaagatgacaatccccgatttatattttataaatctggctgttgctgacctgattctggtcgcagattcactcatagaggtgtttaacctccacgagcgctattacgacatagctgtcctgtgcacgttcatgagcctattcctgcaggtgaacatgtatagtagtgtgttctttttgacctggatgtctttcgaccggtacattgccctcgcacgcgccatgaggtgctcgctcttcagaacgaagcatcatgctaggttgagctgcggtttaatttggatggcgagcgtgtcagctaccttagttccattcacagccgtgcacctgcagcataccgacgaagcctgcttttgtttcgcagacgtgcgggaagtccagtggctggaagtgacgctgggctttatcgtgccttttgcaattatcggcttgtgctattcactgatcgttcgcgtcctggtgagagctcacagacatcggggactacgaccacggcggcaaaaggccctgcgtatgattctagctgtcgtgcttgtattctttgtgtgctggctgccagaaaacgtgtttatttctgttcacctgctgcagcgcacacagcccggagccgcaccctgcaaacagagctttaggcacgcccatccacttactgggcacattgtgaacctggctgcattttccaatagctgcctgaatccgttgatatacagctttttaggtgaaaccttcagggacaaactccgactgtatattgaacaaaaaaccaatttgcctgctctgaatcggttctgtcatgccgcactcaaggccgtgattcctgactcaactgaacagagtgatgtacgcttctcttcggctgtatag

SEQ ID NO: 38614 - DNA, 1128 bp, Artificial Sequence
  derived and/or modified sequence
atggacgtaacatcacaggccaggggggtcggcctggagatgtatcctggaactgcccagccggcggcccctaatacaacatccccggagctgaatctctctcaccccttgttgggcacagcgctggccaacggcacaggtgagctgagcgaacaccagcagtatgtcattgggctgttcctgagttgcttatacacaatcttcttattccccattggatttgtgggaaacatcttgattttggtcgtgaatatatctttcagggagaagatgactatcccagacctgtacttcatcaacctggcagttgctgacctaattctcgtagcagacagcctcatagaagtgtttaacctccatgagcgctattacgatattgcggtgctctgcactttcatgagcctctttttacaagtgaacatgtactcctccgtatttttcttgacttggatgagcttcgatagatatattgccctcgcaagggcgatgagatgtagcctgttccggaccaaacatcatgcaaggctgagctgtgggctaatctggatggcctcagtctctgctactctcgttccttttactgctgttcacttgcaacacacagatgaagcctgtttttgttttgccgatgtgcgggaggtgcaatggttggaggttaccttagggtttatcgtgccgtttgccataatcgggctctgctattctctgattgtgagagtgcttgtgcgagcgcaccgccatcgagggctgaggcctaggcgacagaaggcgctgcgaatgattctcgccgttgttctggttttctttgtatgttggctgccagagaatgtattcatttctgtccatctccttcaaagaactcagccaggtgctgccccatgcaaacaatcgtttagacacgcacatcccttgacaggacacatcgtaaatctggccgccttttcaaactcttgcctaaaccccctgatctacagctttctgggagagacctttagagacaaactcaggctgtatattgagcagaaaacaaatctgccagccctgaatagattctgccacgctgccctgaaggctgtgatcccggattcaactgaacagtctgatgtcaggtttagctcagcagtgtag

SEQ ID NO: 38615 - DNA, 222 bp, Artificial Sequence
  derived and/or modified sequence
atggacgtgacttcccaggcacggggggtggggttagagatgtaccctggaaccgcccagcccgcggcacccaacaccacctctccagaactcaatctctcacatccgttactggggacagctctggccaacggtacaggagagctctcagaacaccaacagtatgtcattggcctgttcctttcctgcctttatactatcttcctgttcccaattgggtag

SEQ ID NO: 38616 - DNA, 1227 bp, Artificial Sequence
  derived and/or modified sequence
atggacgtgaccagtcaagctcggggagtgggcctcgaaatgtatccgggaaccgcccagcccgccgccccaaataccacctctcccgagctgaacctgtcccaccctctcttagggactgcacttgccaatggcactggggagctgagtgagcaccagcagtatgtgattggcctcttcctgagctgtctctataccatcttccttttcccaataggtttcgtcggcaacatcctgattctggtcgttaacatatcttttagagaaaagatgaccatcccagacctgtatttcatcaacttggccgtcgcagatctcatcctggtggccgatagcctaatcgaggtcttcaatctgcacgaacgctactatgacatagctgttctctgtaccttcatgtccctgttcttacaggtgaacatgtattctagcgtcttcttcctcacttggatgtcattcgacagatacatcgcactggcacgggccatgaggtgctccctgtttcgaactaaacaccacgcccgtttgtcttgcggactaatctggatggccagtgtatcagctaccctggtaccctttacagcagtacacttgcagcacactgacgaagcttgcttttgtttcgctgacgtcagagaagttcaatggcttgaagtcacacttggtttcatcgtcccattcgccattatcgggctgtgctacagcctgatcgtcagggtcttggtacgggctcaccggcatcgcggtctcagaccacgacgacagaaagccttgagaatgatactggcggtcgtgctagttttctttgtttgctggctgcccgaaaacgtgtttatctccgttcatcttttacagagaacccaaccaggcgcagctccatgtaagcaatcttttcgtcatgctcaccctttgacacatggccacgtgatgtcgttgaactgtggtcagatgtggctcctggctcccaggggactggcacgcgtgaccctcgcctggagcccatggggatgtcttggtaacctgactaccggacacctagcactactcacccaaaattgttacaaccctaaagcactggctccacagggccccaaagccagcggcgaccagccagtcacacaattgcttccagccaacccagcgtgtaggtgtacgtgtctgcccttgcaggagacattcctgactccttccacgcggaaggcaacacggcgaggacattgtgggtag

SEQ ID NO: 38617 - DNA, 1128 bp, Artificial Sequence
  derived and/or modified sequence
atggatgtgaccagccaggcccggggcgtgggcctggagatgtacccaggcacagcccagcctgctgcccccaacaccaccagccctgagctgaacctgagccaccccctgctgggcacagccctggccaacggcaccggggagctgtctgagcaccagcagtatgtgattggcctcttcctgagctgcctgtacaccatcttcctgttccccatcggctttgtgggcaacatcctgatcctggtggtgaacatctccttccgggagaagatgaccatcccagacctgtacttcatcaacctggccgtggccgacctgatcctggtggccgacagcctcatcgaggtgttcaacctgcacgagcgctactatgacattgctgtgctgtgcaccttcatgagcctcttcctgcaggtgaacatgtacagcagcgtcttcttcctgacctggatgagctttgaccgctacatcgccctggcccgggccatgcgctgcagcctcttccgcaccaagcaccacgcccggctgagctgtggcctcatctggatggcctctgtgtctgccaccctggtgcccttcaccgctgtgcacctgcagcacacagatgaggcctgcttctgctttgctgatgtgcgggaggtgcagtggctggaggtgaccctgggcttcatcgtgccctttgccatcatcggcctgtgctacagcctgattgtgcgggtgctggtgcgggcccaccgccaccggggcctgcggccccggcggcagaaggccctgaggatgatcctggccgtggtgctggtgttctttgtgtgctggctgcctgaaaatgtgttcatctctgtgcacctgctgcagaggacccagcctggagctgccccctgcaagcagagcttcagacatgcccaccccctgaccggccacatcgtgaacctggccgccttcagcaacagctgcctgaaccccctcatctacagcttcctgggggagaccttccgggacaagctgcggctgtacatcgagcagaagaccaacctgcctgccctgaaccgcttctgccacgccgccctgaaggccgtcatcccagacagcacagagcagagtgatgtgcgcttcagcagcgctgtgtag

SEQ ID NO: 38618 - DNA, 222 bp, Artificial Sequence
  derived and/or modified sequence
atggatgtgaccagccaggcccggggcgtgggcctggagatgtacccaggcacagcccagcctgctgcccccaacaccaccagccctgagctgaacctgagccaccccctgctgggcacagccctggccaacggcaccggggagctgtctgagcaccagcagtatgtgattggcctcttcctgagctgcctgtacaccatcttcctgttccccatcggctag

SEQ ID NO: 38619 - DNA, 1227 bp, Artificial Sequence
  derived and/or modified sequence
atggatgtgaccagccaggcccggggcgtgggcctggagatgtacccaggcacagcccagcctgctgcccccaacaccaccagccctgagctgaacctgagccaccccctgctgggcacagccctggccaacggcaccggggagctgtctgagcaccagcagtatgtgattggcctcttcctgagctgcctgtacaccatcttcctgttccccatcggctttgtgggcaacatcctgatcctggtggtgaacatctccttccgggagaagatgaccatcccagacctgtacttcatcaacctggccgtggccgacctgatcctggtggccgacagcctcatcgaggtgttcaacctgcacgagcgctactatgacattgctgtgctgtgcaccttcatgagcctcttcctgcaggtgaacatgtacagcagcgtcttcttcctgacctggatgagctttgaccgctacatcgccctggcccgggccatgcgctgcagcctcttccgcaccaagcaccacgcccggctgagctgtggcctcatctggatggcctctgtgtctgccaccctggtgcccttcaccgctgtgcacctgcagcacacagatgaggcctgcttctgctttgctgatgtgcgggaggtgcagtggctggaggtgaccctgggcttcatcgtgccctttgccatcatcggcctgtgctacagcctgattgtgcgggtgctggtgcgggcccaccgccaccggggcctgcggccccggcggcagaaggccctgaggatgatcctggccgtggtgctggtgttctttgtgtgctggctgcctgaaaatgtgttcatctctgtgcacctgctgcagaggacccagcctggagctgccccctgcaagcagagcttcagacatgcccaccccctgacccacggccacgtgatgagcctgaactgtggccagatgtggctgctggccccccggggcctggcccgggtgaccctggcctggagcccctggggctgcctgggcaacctgaccaccggccacctggccctgctgacccagaactgctacaaccccaaggccctggccccccagggccccaaggccagcggggaccagcctgtgacccagctgctgcctgccaacccagcctgccgctgcacctgcctgcccctgcaggagaccttcctgacccccagcaccaggaaggccacccggcggggccactgcggctag

SEQ ID NO: 38620 - DNA, 1128 bp, Artificial Sequence
  derived and/or modified sequence
atggacgtgaccagccaggcccggggcgtgggcctggagatgtaccccggtacggcgcagcctgccgcccctaatactacatccccggaactgaacttgagtcatcccctgttgggaactgccctcgccaatggcaccggcgaacttagtgaacaccagcagtatgtgatcgggttattcctgagttgtctgtacaccatctttttgttccccatcggtttcgtcgggaacattctgattctcgttgttaacataagcttcagggaaaagatgactattcccgatctgtactttataaacctggccgtcgcagacctcattctggtggcagactcactgatcgaggtctttaaccttcacgagaggtactatgacatcgcagttctgtgtaccttcatgtctctcttccttcaagtaaacatgtatagcagcgtgttcttcctgacgtggatgagcttcgacagatacatcgcactggcccgggctatgagatgcagcctgttcagaactaaacaccacgcccggctgtcctgcggattaatctggatggcctcagtctcagctaccctcgtcccattcacagcagtgcatttacaacacacagacgaggcctgcttttgcttcgccgacgttcgcgaagtgcagtggctggaggtcactctgggcttcatcgtgcctttcgccattataggactgtgttactctctcattgtgcgggtgctggtgagggctcatcgccaccgggggctgagaccccgtagacagaaagctctgcggatgatcctggcagttgttctcgtcttctttgtgtgctggctgcctgagaatgtgtttatttccgtacatctgttgcagagaacacagcctggcgccgccccttgcaagcagtccttcaggcatgctcacccgctgaccggccatatcgtaaacctggccgcattttctaactcctgcctcaacccactcatctactcctttcttggggaaaccttccgcgataagttgaggctgtacatagagcaaaagactaaccttccagcactgaacaggttttgccatgctgccctcaaagcagtgatacctgattccaccgagcagtcagatgtgaggttttcctctgcagtgtag

SEQ ID NO: 38621 - DNA, 1128 bp, Artificial Sequence
  derived and/or modified sequence
atggacgtgaccagccaggcccggggcgtgggcctggagatgtaccctggaacggcgcagcccgcagcccctaacacaacctcacccgaactaaatctttcacacccattgttgggcactgccctggcaaatggtactggagagcttagtgaacatcagcagtatgtcatcggtctgtttttaagctgtctgtataccatcttcctatttccaataggctttgtgggcaatatcctcattctcgtggtgaatatatcattcagggagaaaatgaccatcccagacctctacttcataaacctagcagtggcagacctgatcctcgttgccgatagcctgattgaggtctttaaccttcacgaacgctactatgatatcgctgtcctttgcacatttatgagtctttttctgcaggtgaacatgtactcgtccgtgtttttcctgacatggatgtccttcgatcggtacattgctctagcaagagccatgagatgtagtctttttagaacaaagcaccacgcccggctgagctgcggactaatctggatggcgtccgtctcggccactctcgtgcccttcacagcagtgcatctgcagcacactgacgaggcttgtttctgcttcgcagatgtgcgggaggtgcagtggcttgaagtgactctgggattcatcgtcccgttcgcaattataggcttgtgctactccctgattgtacgtgtgctggtgcgagcacaccgccataggggattgagaccccggaggcagaaggctctcaggatgattctggctgtggtgttggtgttctttgtttgctggctacccgagaatgtctttatatcggttcatcttttacagcgaacccaacccggcgcggctccttgcaaacagagttttagacatgcacacccacttacgggtcacatcgtgaacctcgcggcgttctcgaactcctgtctgaatccgcttatctacagttttctgggggaaaccttcagagacaaactgagactctacatagaacagaagactaacttaccagccttgaatcggttttgccatgcagctctgaaagcagtaatcccagatagtaccgaacaatccgacgtccggttctcctcagctgtctag

SEQ ID NO: 38622 - DNA, 1128 bp, Artificial Sequence
  derived and/or modified sequence
atggacgtgaccagccaggcccggggcgtgggcctggagatgtacccgggaaccgcccagccagccgctcctaacactacatcgcctgaactgaatctgagtcatcctttgttgggcacagccctggccaacggtaccggagagcttagtgagcaccaacagtacgtgataggcttgtttttatcctgtctgtataccatattcctattcccaataggtttcgtggggaacattctcatcttagtggttaacatcagctttcgcgagaagatgaccattccggatctttattttatcaacctggccgttgctgacctgatcctggtagccgatagtctgatcgaagtgtttaatttgcatgaacggtattatgacatcgctgtgctctgtacttttatgagcttgtttctccaagtgaatatgtatagctcagtgttctttctgacgtggatgagcttcgatagatacattgctctcgcaagggcaatgcggtgtagccttttccggaccaaacatcatgcacgcttaagttgtggcctgatatggatggcctctgtgtcggccaccttagtgcccttcactgcagtacacttgcaacacaccgatgaagcgtgtttttgcttcgccgatgttagagaggtccagtggctcgaggtgactcttggcttcatcgtccctttcgctataattggtttatgttattcactcatcgttcgcgtcctggttcgggcgcaccgccatagaggattacgcccccggagacagaaagcactcaggatgatcctcgcggtggtgctggtgttctttgtgtgttggcttcctgagaatgtgtttatcagtgtacacctcctacagcggacccagcccggcgctgccccctgtaagcagagcttccgacacgcgcaccctttaaccggccacattgtgaatctggcggcttttagtaactcatgtttgaaccccctgatttattcctttttaggagagactttccgagataaactgcgactgtacattgaacagaaaaccaatctgccggctctgaacagattctgccatgcagccctgaaggctgttattccagattctacggagcagtccgacgtccggttttcctctgccgtctag

SEQ ID NO: 38623 - DNA, 1128 bp, Artificial Sequence
  derived and/or modified sequence
atggacgtgaccagccaggcccggggcgtgggcctggagatgtaccctggcaccgcacagccagcagcacctaatactacttctcctgaactcaatctatcgcatccattgctcggcacggctctcgccaacggaaccggtgagctctccgagcatcaacagtatgtgattggcctgtttctgtcctgcctgtataccatatttctgtttccgattggctttgtgggtaatatcctgatactagtcgtcaatattagtttccgcgagaagatgaccatccctgatctttacttcatcaatctcgcagtggcggatctcattctcgtggcggactctctgattgaagtgtttaacttgcacgagagatactacgatattgccgtgctgtgcactttcatgtccctgttcctccaggtgaatatgtatagtagcgtctttttcttaacttggatgtccttcgatagatacatcgccctggccagagctatgagatgtagcctgtttagaacgaaacaccacgccaggctctcctgtgggctgatctggatggcctcggtgtccgccacattagtcccatttactgcagtgcatttgcagcatacggatgaagcttgtttctgctttgccgatgtaagagaggtgcagtggttggaggttactcttggtttcatcgttccgtttgcaataattggcctttgctactctctgatcgttagggtcctcgtgcgtgcacaccggcaccggggcctacgtccaaggcggcagaaagccctgcgtatgatactcgctgtggtgttggtgttcttcgtgtgttggctccctgagaatgtgttcattagcgtgcatctgttacaacggactcaaccaggggccgccccttgcaagcagtcattcaggcacgcccaccccctaaccgggcatatcgtgaatctcgctgcattttcaaattcgtgtctcaatccactgatttactccttcctgggagagacttttagagataaactgaggctttacatcgagcagaagaccaacctccccgcactgaaccgtttttgtcacgctgccctgaaggcagtcatcccagactctacagagcagtctgatgttcgattttcatcggctgtgtag

SEQ ID NO: 38624 - DNA, 222 bp, Artificial Sequence
  derived and/or modified sequence
atggacgtgaccagccaggcccggggcgtgggcctggagatgtaccccggaaccgcccaacctgcggcacctaacaccacctctccagagcttaatctgtcccatcccctgctgggtacggctctcgctaacgggaccggagagttaagcgagcaccaacaatacgtgatcggcttgttcttgagctgcctgtacaccattttcctgttcccaatcgggtag

SEQ ID NO: 38625 - DNA, 1227 bp, Artificial Sequence
  derived and/or modified sequence
atggacgtgaccagccaggcccggggcgtgggcctggagatgtaccccggtaccgcacagcccgctgcaccaaacactacgagccctgagcttaacctatcccaccccctcctaggaaccgctctggcaaacggaaccggggaattgtctgaacatcagcagtacgtgattggactattcctgtcttgtctctacactatttttctatttcccattggtttcgtggggaatattttgattctggtggtgaatatcagtttcagggagaagatgaccataccagatctgtacttcataaatttggcagtagccgaccttatcctagttgccgactctttgatcgaagtgttcaacctgcacgaaagatattatgacatcgcagttctttgtacatttatgagcctgtttttgcaggtcaacatgtactctagtgtgttttttctgacatggatgtcttttgaccggtacatagcactcgctcgagccatgaggtgctccctgttccgaaccaagcatcacgccagattgagctgtggattgatctggatggcctctgtgagcgcaaccctggtgccatttactgccgtgcacctgcaacataccgatgaagcttgcttctgtttcgccgacgttcgagaagtgcaatggctcgaggtgaccctgggatttatagtgcctttcgccataatcggactatgttattccctaatcgtgcgggtcctggtacgggcccatcgacataggggacttcgtccacgacggcaaaaggccttaagaatgatcctcgcagtggtgttggtgttctttgtgtgctggctgcctgagaatgtgttcataagcgtgcacctgctgcagagaactcagcctggcgccgctccctgcaaacagagcttccggcacgcacatcccctgactcatggccatgttatgtctctgaattgtggccaaatgtggctgttggccccacgaggcctggctcgtgttacactggcctggagcccctggggatgcttaggtaacctgacaacaggtcacctggcgttgcttacacagaactgctacaatcctaaagcattagctccccagggccctaaagcatccggcgaccagccagtgacgcagctgctgccggccaacccagcatgtagatgtacttgcctgccactccaagagacttttttgacccctagcaccagaaaggcaactcggcgggggcactgtgggtag

SEQ ID NO: 38626 - DNA, 1128 bp, Artificial Sequence
  derived and/or modified sequence
atggatgtgacatcacaggccagaggtgttggattggagatgtaccctggcacagctcaacccgctgccccaaatacaacgagtccggagctcaacctcagccacccattactgggcactgctctagctaatggcacgggggagctgagcgagcaccagcagtacgtaatcggccttttcctgtcatgcctgtatacgatctttctttttccaattggatttgtcggtaatattctcattctggttgttaacatctcttttagagagaagatgacaataccagatttatactttatcaacctggccgttgccgacttgattctcgtggcggactctctgattgaagtctttaacttgcacgaacgatattacgacatcgctgtgttgtgcacgtttatgtccctcttccttcaggtcaacatgtattcttccgtgttctttttgacatggatgtctttcgatcgctatattgctcttgccagagccatgcgctgcagtctgtttaggaccaaacatcatgccagactttcttgcggccttatatggatggcctccgtcagtgcgacactggtgcccttcaccgcggtccatctccagcacacagacgaagcttgcttctgcttcgccgacgtcagagaggtccagtggcttgaagtcaccctggggtttattgtaccctttgcaataattgggctgtgttattctcttatcgtgcgggtccttgtgagggcgcacagacatagggggctgagaccacgcagacagaaggctctgcggatgatccttgccgtggtcctggttttcttcgtctgctggctccccgagaatgtatttatctctgtgcacttgctgcagcgcactcagccaggtgccgcaccttgtaagcaaagcttcagacacgcccatcctctgactgggcacatcgttaaccttgcagctttcagcaactcttgccttaatcccttgatatacagtttcctaggtgaaactttcagggataaattgcggctatatatcgaacagaagactaatcttcccgcactgaatcgattttgccatgctgccctcaaagctgtgatcccagattcgactgaacagtccgacgtcagattctcttccgcggtgtag

SEQ ID NO: 38627 - DNA, 1128 bp, Artificial Sequence
  derived and/or modified sequence
atggacgttacctctcaggcgaggggtgtaggactggagatgtaccccggtactgctcagcctgccgctcctaataccacttcccctgaacttaatttatcacatcccctcctgggaaccgctctagctaatggcacaggagagctctctgagcatcagcagtatgttattgggctgttcctgagttgtttgtacaccatctttttgtttcccattggatttgtggggaatatcctgattcttgtagtgaacattagctttcgcgaaaaaatgacgatcccagacttgtatttcataaacctggctgtggccgacctgatccttgtggccgactccctgatcgaggttttcaatctgcacgaacgttactacgatatcgctgtcctgtgtactttcatgagcctgttccttcaagtcaacatgtactcgtccgtgttttttttgacatggatgtctttcgaccggtatatcgccttggcaagggctatgcggtgttcactctttcggaccaagcatcacgccagactcagctgcggtttgatttggatggcctccgtctccgccacacttgttccgtttactgccgtccatctgcaacacaccgatgaggcttgtttctgttttgccgacgtcagggaagtccagtggctggaagttactctggggtttatagtgccatttgcaattattggcttatgctactctctaattgtaagagtgctagttagggcacacaggcacaggggcctgcgaccccgtcgccagaaagccctgaggatgattctggcagtggtactggtgttcttcgtatgctggctacctgaaaacgtattcatttctgtccacctgttacagcggactcagccaggggcagctccctgcaaacagagtttccgacatgctcatccattaaccggccacattgttaacctggccgcattctctaactcatgcctgaatcctctaatttacagcttcctgggcgaaacgtttcgtgacaaactgaggctatacatcgagcagaaaaccaatctgccagccttgaatcggttctgccatgcggcattaaaagcagttattcctgactccactgaacagagtgatgtcaggttcagcagcgccgtctag

SEQ ID NO: 38628 - DNA, 1128 bp, Artificial Sequence
  derived and/or modified sequence
atggacgtgacaagccaggcgagaggggtcggccttgagatgtatccaggcactgcccaacctgccgctcctaacactacgtcccctgagctaaacttatctcaccccctcctggggacagcattggccaacgggactggcgaactgagcgagcatcaacaatacgtaattggactctttctgtcctgcctctacaccatctttctctttccaattggttttgtgggaaatattcttatcttagtagtcaacatttcattccgagagaaaatgaccattcctgacctctacttcattaacttagctgtggcagacctcatcctggtggccgattccctcatagaggtgttcaatcttcatgagagatattatgacattgctgtgctatgtacctttatgtcactgttcctgcaggtcaacatgtacagcagcgtcttttttctgacatggatgtcgttcgataggtatatcgcattggccagagcgatgcgatgtagcttattccgaacgaaacaccacgccagactgagctgcgggcttatctggatggccagcgtgagcgctaccctggttccatttacagcagtgcaccttcagcacaccgacgaggcatgtttctgttttgcagacgtgcgcgaagtgcagtggttagaagtcacattaggattcattgtgcctttcgcgataattggtctgtgttactcgttgattgttcgggttctggtgcgggctcaccgacataggggtcttcgccctcgccgacagaaggccctacggatgatcttggcagtcgtactagtcttctttgtttgttggctcccagagaatgtgttcatctccgtgcatctgctccagagaacacagcctggcgcagctccttgcaagcagtctttccgacacgcccatcccttgaccggtcacatcgtaaacctggcagctttctcgaactcctgtctgaatccactcatatatagttttctcggagagacctttagggataaactgcgattgtacattgaacagaaaacaaatctgcccgcactgaaccggttttgccatgcagccctgaaagcagtcatcccagattctacggaacagtctgacgtgaggttctctagtgcagtttag

SEQ ID NO: 38629 - DNA, 1128 bp, Artificial Sequence
  derived and/or modified sequence
atggatgtaaccagccaggcacgtggcgtcggcctggagatgtaccctgggactgcccagccagccgcacccaacaccacaagtcccgagctgaatctgtctcaccccttgctgggcaccgctttagccaatgggacaggagaattgtctgaacatcagcagtatgtgatcggcctttttctctcatgtctctacaccattttcctgttccccataggatttgtcggcaatattcttattcttgtggtgaacattagtttccgcgaaaagatgacaatcccagatctctacttcatcaacttggctgtggctgacttgattttagtggcagactcacttatcgaggtctttaacctgcacgagagatactacgatatcgccgtattgtgcacttttatgagtttgtttctgcaggtgaacatgtacagctccgtgttctttctgacatggatgagcttcgacaggtacattgcgctggcgcgtgcaatgagatgctctctttttcgcaccaaacatcatgcgcgactgagctgcggactcatttggatggccagcgtgtcagcgaccttagtgcccttcacagctgtgcacctccagcacactgatgaggcttgcttctgtttcgccgacgtgagggaggtgcaatggctagaggtaacccttggattcattgttccatttgcaattatcggactttgctactccctgatcgttagagtcttagtccgagctcaccggcaccgaggcctgcggcctaggcgccagaaagccctgagaatgattcttgccgttgtattggtcttttttgtgtgttggctgccagagaacgtctttataagtgtgcatctgctgcagagaactcagcctggggcagcaccttgcaagcagtcatttagacacgcccatcctttaacgggacatatagtgaaccttgccgcattttcgaactcttgtctgaaccccctcatttactcttttctcggtgagacttttagagataagcttaggctgtacattgagcagaagacaaacctcccagctttaaacaggttttgtcatgcagcactgaaggctgtaattcccgatagcaccgagcagtctgacgttaggtttagcagtgctgtttag

SEQ ID NO: 38630 - DNA, 222 bp, Artificial Sequence
  derived and/or modified sequence
atggacgtgacgtcacaggctagaggcgtcggcctggagatgtatccgggaaccgcgcaaccagctgcccctaacacaacgagccccgaactgaatttatcacaccccctactcggtacagccctcgccaacggaaccggtgagctgagcgaacaccaacagtacgttattggtctattcctgtcctgcctgtatacaatatttctgttccccatcggatag

SEQ ID NO: 38631 - DNA, 1227 bp, Artificial Sequence
  derived and/or modified sequence
atggacgtcactagccaagctagaggtgtaggcctagagatgtatccaggtaccgcacagcctgcagccccaaataccacgagcccggagttgaatctcagtcacccgctgctaggtactgccctcgcaaacggcaccggggagctctcagagcatcaacaatacgtgattggactcttcctgagctgcctctacacaatttttctcttccccattggatttgtaggcaacattctcatactcgtggtgaatatctcattcagggagaagatgaccatccccgatctgtactttattaacctggcagttgcggacctgattttggttgccgattcactgatcgaagtgtttaatctgcatgaacgttattatgacattgctgtcctgtgtactttcatgagtctctttctgcaagtgaatatgtattccagcgtgttctttctgacttggatgtcgtttgatagatacatcgcattggcccgtgcaatgcgctgcagtctgtttcgtacaaagcaccacgctcgtctgtcttgcggactgatctggatggccagtgtgtcagcaactttagtgcccttcaccgcagtgcatctgcaacataccgacgaagcctgcttctgttttgccgacgttcgagaggtgcagtggctggaagtgaccttaggatttattgtccccttcgctataattggcctttgctactccctgattgttcgggttcttgttagggcacacaggcatcgtgggttacgaccaaggcgccagaaggccctgcgcatgattcttgctgtagtcctcgttttcttcgtctgttggctgcctgagaatgtatttatatccgtccacttgcttcagcggacccaacctggagccgctccctgcaagcagtccttccgacatgcacacccacttacacacggccacgtcatgagcctcaattgcggacagatgtggctgctggctcctcgtggcctcgcccgagttaccctagcttggtccccctgggggtgtctagggaatttaaccaccggtcacctggccctcctgacacaaaattgctacaacccaaaagcgttggctccacagggtcctaaagcttctggcgaccagcctgtcacacaactgttgcccgcaaatcccgcttgccgatgcacatgtctgccactgcaggagactttcctgacaccttctaccagaaaagctacgcgtcgaggccattgtgggtag

SEQ ID NO: 38632 - DNA, 1128 bp, Artificial Sequence
  derived and/or modified sequence
atggacgtgaccagccaggccagaggcgtgggcctggagatgtaccccggcaccgcccagcccgccgcccccaacaccaccagccccgagctgaacctgagccaccccctgctgggcaccgccctggccaacggcaccggcgagctgagcgagcaccagcagtacgtgatcggcctgttcctgagctgcctgtacaccatcttcctgttccccatcggcttcgtgggcaacatcctgatcctggtggtgaacatcagcttcagagagaagatgaccatccccgacctgtacttcatcaacctggccgtggccgacctgatcctggtggccgacagcctgatcgaggtgttcaacctgcacgagagatactacgacatcgccgtgctgtgcaccttcatgagcctgttcctgcaggtgaacatgtacagcagcgtgttcttcctgacctggatgagcttcgacagatacatcgccctggccagagccatgagatgcagcctgttcagaaccaagcaccacgccagactgagctgcggcctgatctggatggccagcgtgagcgccaccctggtgcccttcaccgccgtgcacctgcagcacaccgacgaggcctgcttctgcttcgccgacgtgagagaggtgcagtggctggaggtgaccctgggcttcatcgtgcccttcgccatcatcggcctgtgctacagcctgatcgtgagagtgctggtgagagcccacagacacagaggcctgagacccagaagacagaaggccctgagaatgatcctggccgtggtgctggtgttcttcgtgtgctggctgcccgagaacgtgttcatcagcgtgcacctgctgcagagaacccagcccggcgccgccccctgcaagcagagcttcagacacgcccaccccctgaccggccacatcgtgaacctggccgccttcagcaacagctgcctgaaccccctgatctacagcttcctgggcgagaccttcagagacaagctgagactgtacatcgagcagaagaccaacctgcccgccctgaacagattctgccacgccgccctgaaggccgtgatccccgacagcaccgagcagagcgacgtgagattcagcagcgccgtgtag

SEQ ID NO: 38633 - DNA, 222 bp, Artificial Sequence
  derived and/or modified sequence
atggacgtgaccagccaggccagaggcgtgggcctggagatgtaccccggcaccgcccagcccgccgcccccaacaccaccagccccgagctgaacctgagccaccccctgctgggcaccgccctggccaacggcaccggcgagctgagcgagcaccagcagtacgtgatcggcctgttcctgagctgcctgtacaccatcttcctgttccccatcggctag

SEQ ID NO: 38634 - DNA, 1227 bp, Artificial Sequence
  derived and/or modified sequence
atggacgtgaccagccaggccagaggcgtgggcctggagatgtaccccggcaccgcccagcccgccgcccccaacaccaccagccccgagctgaacctgagccaccccctgctgggcaccgccctggccaacggcaccggcgagctgagcgagcaccagcagtacgtgatcggcctgttcctgagctgcctgtacaccatcttcctgttccccatcggcttcgtgggcaacatcctgatcctggtggtgaacatcagcttcagagagaagatgaccatccccgacctgtacttcatcaacctggccgtggccgacctgatcctggtggccgacagcctgatcgaggtgttcaacctgcacgagagatactacgacatcgccgtgctgtgcaccttcatgagcctgttcctgcaggtgaacatgtacagcagcgtgttcttcctgacctggatgagcttcgacagatacatcgccctggccagagccatgagatgcagcctgttcagaaccaagcaccacgccagactgagctgcggcctgatctggatggccagcgtgagcgccaccctggtgcccttcaccgccgtgcacctgcagcacaccgacgaggcctgcttctgcttcgccgacgtgagagaggtgcagtggctggaggtgaccctgggcttcatcgtgcccttcgccatcatcggcctgtgctacagcctgatcgtgagagtgctggtgagagcccacagacacagaggcctgagacccagaagacagaaggccctgagaatgatcctggccgtggtgctggtgttcttcgtgtgctggctgcccgagaacgtgttcatcagcgtgcacctgctgcagagaacccagcccggcgccgccccctgcaagcagagcttcagacacgcccaccccctgacccacggccacgtgatgagcctgaactgcggccagatgtggctgctggcccccagaggcctggccagagtgaccctggcctggagcccctggggctgcctgggcaacctgaccaccggccacctggccctgctgacccagaactgctacaaccccaaggccctggccccccagggccccaaggccagcggcgaccagcccgtgacccagctgctgcccgccaaccccgcctgcagatgcacctgcctgcccctgcaggagaccttcctgacccccagcaccagaaaggccaccagaagaggccactgcggctag

SEQ ID NO: 38635 - protein, 733 aa, Artificial Sequence
  derived and/or modified sequence
MTFPEADILLKSGECAGQTMLDTMEAPGHSRQLLLQLNNQRTKGFLCDVIIVVQNALFRAHKNVLAASSAYLKSLVVHDNLLNLDHDMVSPAVFRLVLDFIYTGRLADGAEAAAAAAVAPGAEPSLGAVLAAASYLQIPDLVALCKKRLKRHGKYCHLRGGGGGGGGYAPYGRPGRGLRAATPVIQACYPSPVGPPPPPAAEPPSGPEAAVNTHCAELYASGPGPAAALCASERRCSPLCGLDLSKKSPPGSAAPERPLAERELPPRPDSPPSAGPAAYKEPPLALPSLPPLPFQKLEEAAPPSDPFRGGSGSPGPEPPGRPDGPSLLYRWMKHEPGLGSYGDELGRERGSPSERCEERGGDAAVSPGGPPLGLAPPPRYPGSLDGPGAGGDGDDYKSSSEETGSSEDPSPPGGHLEGYPCPHLAYGEPESFGDNLYVCIPCGKGFPSSEQLNAHVEAHVEEEEALYGRAEAAEVAAGAAGLGPPFGGGGDKVAGAPGGLGELLRPYRCASCDKSYKDPATLRQHEKTHWLTRPYPCTICGKKFTQRGTMTRHMRSHLGLKPFACDACGMRFTRQYRLTEHMRIHSGEKPYECQVCGGKFAQQRNLISHMKMHAVGGAAGAAGALAGLGGLPGVPGPDGKGKLDFPEGVFAVARLTAEQLSLKQQDKAAAAELLAQTTHFLHDPKVALESLYPLAKFTAELGLSPDKAAEVLSQGAHLAAGPDGRTIDRFSPT

SEQ ID NO: 38636 - protein, 714 aa, Artificial Sequence
  derived and/or modified sequence
MLDTMEAPGHSRQLLLQLNNQRTKGFLCDVIIVVQNALFRAHKNVLAASSAYLKSLVVHDNLLNLDHDMVSPAVFRLVLDFIYTGRLADGAEAAAAAAVAPGAEPSLGAVLAAASYLQIPDLVALCKKRLKRHGKYCHLRGGGGGGGGYAPYGRPGRGLRAATPVIQACYPSPVGPPPPPAAEPPSGPEAAVNTHCAELYASGPGPAAALCASERRCSPLCGLDLSKKSPPGSAAPERPLAERELPPRPDSPPSAGPAAYKEPPLALPSLPPLPFQKLEEAAPPSDPFRGGSGSPGPEPPGRPDGPSLLYRWMKHEPGLGSYGDELGRERGSPSERCEERGGDAAVSPGGPPLGLAPPPRYPGSLDGPGAGGDGDDYKSSSEETGSSEDPSPPGGHLEGYPCPHLAYGEPESFGDNLYVCIPCGKGFPSSEQLNAHVEAHVEEEEALYGRAEAAEVAAGAAGLGPPFGGGGDKVAGAPGGLGELLRPYRCASCDKSYKDPATLRQHEKTHWLTRPYPCTICGKKFTQRGTMTRHMRSHLGLKPFACDACGMRFTRQYRLTEHMRIHSGEKPYECQVCGGKFAQQRNLISHMKMHAVGGAAGAAGALAGLGGLPGVPGPDGKGKLDFPEGVFAVARLTAEQLSLKQQDKAAAAELLAQTTHFLHDPKVALESLYPLAKFTAELGLSPDKAAEVLSQGAHLAAGPDGRTIDRFSPT

SEQ ID NO: 38637 - DNA, 2202 bp, Artificial Sequence
  derived and/or modified sequence
atgaccttccccgaggccgacatcctgctgaagagcggcgagtgcgccggccagaccatgctggacaccatggaggcccccggccacagcagacagctgctgctgcagctgaacaaccagagaaccaagggcttcctgtgcgacgtgatcatcgtggtgcagaacgccctgttcagagcccacaagaacgtgctggccgccagcagcgcctacctgaagagcctggtggtgcacgacaacctgctgaacctggaccacgacatggtgagccccgccgtgttcagactggtgctggacttcatctacaccggcagactggccgacggcgccgaggccgccgccgccgccgccgtggcccccggcgccgagcccagcctgggcgccgtgctggccgccgccagctacctgcagatccccgacctggtggccctgtgcaagaagagactgaagagacacggcaagtactgccacctgagaggcggcggcggcggcggcggcggctacgccccctacggcagacccggcagaggcctgagagccgccacccccgtgatccaggcctgctaccccagccccgtgggccccccccccccccccgccgccgagccccccagcggccccgaggccgccgtgaacacccactgcgccgagctgtacgccagcggccccggccccgccgccgccctgtgcgccagcgagagaagatgcagccccctgtgcggcctggacctgagcaagaagagcccccccggcagcgccgcccccgagagacccctggccgagagagagctgccccccagacccgacagcccccccagcgccggccccgccgcctacaaggagccccccctggccctgcccagcctgccccccctgcccttccagaagctggaggaggccgccccccccagcgaccccttcagaggcggcagcggcagccccggccccgagccccccggcagacccgacggccccagcctgctgtacagatggatgaagcacgagcccggcctgggcagctacggcgacgagctgggcagagagagaggcagccccagcgagagatgcgaggagagaggcggcgacgccgccgtgagccccggcggcccccccctgggcctggcccccccccccagataccccggcagcctggacggccccggcgccggcggcgacggcgacgactacaagagcagcagcgaggagaccggcagcagcgaggaccccagcccccccggcggccacctggagggctacccctgcccccacctggcctacggcgagcccgagagcttcggcgacaacctgtacgtgtgcatcccctgcggcaagggcttccccagcagcgagcagctgaacgcccacgtggaggcccacgtggaggaggaggaggccctgtacggcagagccgaggccgccgaggtggccgccggcgccgccggcctgggcccccccttcggcggcggcggcgacaaggtggccggcgcccccggcggcctgggcgagctgctgagaccctacagatgcgccagctgcgacaagagctacaaggaccccgccaccctgagacagcacgagaagacccactggctgaccagaccctacccctgcaccatctgcggcaagaagttcacccagagaggcaccatgaccagacacatgagaagccacctgggcctgaagcccttcgcctgcgacgcctgcggcatgagattcaccagacagtacagactgaccgagcacatgagaatccacagcggcgagaagccctacgagtgccaggtgtgcggcggcaagttcgcccagcagagaaacctgatcagccacatgaagatgcacgccgtgggcggcgccgccggcgccgccggcgccctggccggcctgggcggcctgcccggcgtgcccggccccgacggcaagggcaagctggacttccccgagggcgtgttcgccgtggccagactgaccgccgagcagctgagcctgaagcagcaggacaaggccgccgccgccgagctgctggcccagaccacccacttcctgcacgaccccaaggtggccctggagagcctgtaccccctggccaagttcaccgccgagctgggcctgagccccgacaaggccgccgaggtgctgagccagggcgcccacctggccgccggccccgacggcagaaccatcgacagattcagccccacctag

SEQ ID NO: 38638 - DNA, 2202 bp, Artificial Sequence
  derived and/or modified sequence
atgacctttcctgaggccgacatcctgctcaagagtggagagtgcgcagggcagacaatgctcgacacaatggaggcaccaggccattcaagacagcttctgctccaacttaataaccagcggactaagggcttcttgtgcgacgtcattatcgtggtccagaacgctctgtttcgagctcataaaaacgtgcttgccgcaagcagcgcttatctcaagtcactggtggttcacgacaatctcctcaacctggatcacgacatggtgagtccggccgtcttccgcttggttctggatttcatttacacaggacgcctggctgacggagcagaagctgctgctgcagccgcagtagctcctggagcggagccttccctcggagccgtgctggccgcagcgtcctacctgcagattccggaccttgtagccctctgcaagaagcgcctgaaaagacatggtaagtactgccacctgcgaggtggcgggggaggtggcggagggtacgctccttacggacgcccggggcggggcctgcgagcggctactccagtaatccaggcgtgctatccgtctccagtcggccccccaccccccccagcggccgagcccccctcaggacctgaagctgctgtcaacacccactgcgcagaactgtatgcctctggtcccggccctgctgcagctttatgtgctagcgagcgcaggtgctccccactgtgtggactggacctcagtaagaagtccccgcctggatctgcggccccagaaagacccttggcggagagagagctgcccccccgccctgactcgccgcctagcgctggccccgccgcatacaaagaacctcccctcgcactgccatctctgcctccgctcccgtttcagaaactggaggaagcagccccaccctccgacccatttcggggagggtcgggctcccctgggcctgagccacccggtagacccgacggcccttcactcctttatcggtggatgaagcatgaaccaggtctcggctcatacggggacgaacttggacgtgagagagggagtccctcggagcgatgcgaagagaggggaggcgacgcagctgtgagtccaggaggaccaccactggggctggccccgccaccgagataccccggatccctggacggtcctggagctgggggcgacggcgatgattacaagagctcatcagaagaaacaggctcatccgaggacccctccccccccggggggcacttagaaggctacccctgtccacatctggcttatggagagcccgaatctttcggggataatctctatgtctgtattccctgcggcaaggggtttccctctagcgaacagttaaatgcccatgtggaggcgcacgtggaggaagaagaggcactctacggcagggcggaggcagcagaagttgcggccggcgcagcaggactgggcccccccttcggagggggaggtgacaaggtggctggagcacccggcggcttgggggagctgctgagaccttacaggtgtgcctcttgcgacaagagctataaggatccggcaactttaaggcagcatgagaagactcattggctgactcggccctacccatgtactatttgtggaaagaaatttacccagcggggaacaatgaccagacatatgaggtcacaccttgggctgaaaccattcgcatgcgatgcgtgcggcatgcgctttaccaggcagtatagactgactgagcacatgcgcatccacagtggagagaaaccgtacgagtgtcaggtgtgcggaggaaagttcgcccagcaaagaaacttgatttcccacatgaaaatgcatgctgtaggaggggccgcaggggctgctggggctctggcaggactgggagggctgcctggagtgcccggaccagacgggaaaggcaagttggactttccagagggagtgttcgcagtcgctagacttactgctgaacagctctcacttaaacagcaagacaaggcagcggccgcggagcttctcgctcaaaccacccacttcctccacgaccccaaagtggccctagagtcactttaccctctggcaaaatttacagccgagctaggcctgtctcccgacaaggccgctgaagtcctgtcacagggggcccacctggcggccggtccggacggccgcaccatagataggttcagtcctacttag

SEQ ID NO: 38639 - DNA, 3053 bp, Artificial Sequence
  derived and/or modified sequence
atgacttttcctgaagcggacattttacttaaatcgggagagtgtgctgggcagacgatgctggacacgatggaggcgcccggccactccaggcagctgctgctgcagctcaacaaccagcgcaccaagggcttcttgtgcgacgtgatcatcgtggtgcagaacgccctcttccgcgcgcacaagaacgtgctggcggccagcagcgcctacctcaagtccctggtggtgcatgacaacctgctcaacctggaccatgacatggtgagcccggccgtgttccgcctggtgctggacttcatctacaccggccgcctggctgacggcgcagaggcggctgcggccgcggccgtggccccgggggctgagccgagcctgggcgccgtgctggccgccgccagctacctgcagatccccgacctcgtggcgctgtgcaagaaacgcctcaagcgccacggcaagtactgccacctgcggggcggcggcggcggcggcggcggctacgcgccctatggtcggccgggccggggcctgcgggccgccacgccggtcatccaggcctgctacccgtccccagtcgggcctccgccgccgcctgccgcggagccgccctcgggcccagaggccgcggtcaacacgcactgcgccgagctgtacgcgtcgggacccggcccggccgccgcactctgtgcctcggagcgccgctgctcccctctttgtggcctggacctgtccaagaagagcccgccgggctccgcggcgccagagcggccgctggctgagcgcgagctgcccccgcgcccggacagccctcccagcgccggccccgccgcctacaaggagccgcctctcgccctgccgtcgctgccgccgctgcccttccagaagctggaggaggccgcaccgccttccgacccatttcgcggcggcagcggcagcccgggacccgagccccccggccgccccgacgggcctagtctcctctatcgctggatgaagcacgagccgggcctgggtagctatggcgacgagctgggccgggagcgcggctcccccagcgagcgctgcgaagagcgtggtggggacgcggccgtctcgcccggggggcccccgctcggcctggcgccgccgccgcgctaccctggcagcctggacgggcccggcgcgggcggcgacggcgacgactacaagagcagcagcgaggagaccggtagcagcgaggaccccagcccgcctggcggccacctcgagggctacccatgcccgcacctggcctatggcgagcccgagagcttcggtgacaacctgtacgtgtgcattccgtgcggcaagggcttccccagctctgagcagctgaacgcgcacgtggaggctcacgtggaggaggaggaagcgctgtacggcagggccgaggcggccgaagtggccgctggggccgccggcctagggcccccttttggaggcggcggggacaaggtcgccggggctccgggtggcctgggagagctgctgcggccctaccgctgcgcgtcgtgcgacaagagctacaaggacccggccacgctgcggcagcacgagaagacgcactggctgacccggccctacccatgcaccatctgcgggaagaagttcacgcagcgtgggaccatgacgcgccacatgcgcagccacctgggcctcaagcccttcgcgtgcgacgcgtgcggcatgcggttcacgcgccagtaccgcctcacggagcacatgcgcatccactcgggcgagaagccctacgagtgccaggtgtgcggcggcaagttcgcacagcaacgcaacctcatcagccacatgaagatgcacgccgtggggggcgcggccggcgcggccggggcgctggcgggcttgggggggctccccggcgtccccggccccgacggcaagggcaagctcgacttccccgagggcgtctttgctgtggctcgcctcacggccgagcagctgagcctgaagcagcaggacaaggcggccgcggccgagctgctggcgcagaccacgcacttcctgcacgaccccaaggtggcgctggagagcctctacccgctggccaagttcacggccgagctgggcctcagccccgacaaggcggccgaggtgctgagccagggcgctcacctggcggccgggcccgacggccggaccatcgaccgtttctctcccacctagagcgcccctcgccagcccgctctgtcgctgctgcgcggccctggcccgcaccccagggagcggcgggggcggcgcgcagggcccactgtgcccgggacaaccgcagcgtcgccacagtggcggctccacctctcggcggcctcacctggcctcactgcttcgtgccttagctcgggggtcgggggagaaccccgggacgggggtgggatggggtaagggaaatttatatttttgatatcagctttgaccaaaggagaccccaggcccctcccgcctcttcctgtggttcgtcggccccctcccccggctccgcgctgctcttagagggggaggggtgtcactgtcggggcactcctagccctacctccggcccttgcgaccacacccattctcactgtgaatctccccgctggggtcggagcgtcgggcagagttggggagtggggaggggactgagccggccggagggccccccgcacccccgctcccacccaccccgggactgataatgtgaagttcctcattttgcacaagtggcactagccccagggccaacccttccttcctcagtcaccaagggcggggagttctggagtcggaaggcgaagagcctaccaccaggtctcccactcccgcggtgccctcccttcccttccctgcggccccggaccatatttattgcatgcgccccggcggccccccatcccgagcccaggctgggctgggctggaacgcggtctctttagctccctcctcttcgtttgtatatttcctaccttgtacacaggctcttccagagccgcttccattttctatactcgaaccaaacagcaataaagcagtaaccaagg

SEQ ID NO: 38640 - DNA, 3156 bp, Artificial Sequence
  derived and/or modified sequence
ggctgagacgcgaccaggacgcggggaggacggaccagcaggacagaccgaccgggggcccggcgggcggagggcagcgcagccacgtcccccctggatccgccgtcagccgggcccggggctttcgacatgccccccaggagagtgtgctgggcagacgatgctggacacgatggaggcgcccggccactccaggcagctgctgctgcagctcaacaaccagcgcaccaagggcttcttgtgcgacgtgatcatcgtggtgcagaacgccctcttccgcgcgcacaagaacgtgctggcggccagcagcgcctacctcaagtccctggtggtgcatgacaacctgctcaacctggaccatgacatggtgagcccggccgtgttccgcctggtgctggacttcatctacaccggccgcctggctgacggcgcagaggcggctgcggccgcggccgtggccccgggggctgagccgagcctgggcgccgtgctggccgccgccagctacctgcagatccccgacctcgtggcgctgtgcaagaaacgcctcaagcgccacggcaagtactgccacctgcggggcggcggcggcggcggcggcggctacgcgccctatggtcggccgggccggggcctgcgggccgccacgccggtcatccaggcctgctacccgtccccagtcgggcctccgccgccgcctgccgcggagccgccctcgggcccagaggccgcggtcaacacgcactgcgccgagctgtacgcgtcgggacccggcccggccgccgcactctgtgcctcggagcgccgctgctcccctctttgtggcctggacctgtccaagaagagcccgccgggctccgcggcgccagagcggccgctggctgagcgcgagctgcccccgcgcccggacagccctcccagcgccggccccgccgcctacaaggagccgcctctcgccctgccgtcgctgccgccgctgcccttccagaagctggaggaggccgcaccgccttccgacccatttcgcggcggcagcggcagcccgggacccgagccccccggccgccccgacgggcctagtctcctctatcgctggatgaagcacgagccgggcctgggtagctatggcgacgagctgggccgggagcgcggctcccccagcgagcgctgcgaagagcgtggtggggacgcggccgtctcgcccggggggcccccgctcggcctggcgccgccgccgcgctaccctggcagcctggacgggcccggcgcgggcggcgacggcgacgactacaagagcagcagcgaggagaccggtagcagcgaggaccccagcccgcctggcggccacctcgagggctacccatgcccgcacctggcctatggcgagcccgagagcttcggtgacaacctgtacgtgtgcattccgtgcggcaagggcttccccagctctgagcagctgaacgcgcacgtggaggctcacgtggaggaggaggaagcgctgtacggcagggccgaggcggccgaagtggccgctggggccgccggcctagggcccccttttggaggcggcggggacaaggtcgccggggctccgggtggcctgggagagctgctgcggccctaccgctgcgcgtcgtgcgacaagagctacaaggacccggccacgctgcggcagcacgagaagacgcactggctgacccggccctacccatgcaccatctgcgggaagaagttcacgcagcgtgggaccatgacgcgccacatgcgcagccacctgggcctcaagcccttcgcgtgcgacgcgtgcggcatgcggttcacgcgccagtaccgcctcacggagcacatgcgcatccactcgggcgagaagccctacgagtgccaggtgtgcggcggcaagttcgcacagcaacgcaacctcatcagccacatgaagatgcacgccgtggggggcgcggccggcgcggccggggcgctggcgggcttgggggggctccccggcgtccccggccccgacggcaagggcaagctcgacttccccgagggcgtctttgctgtggctcgcctcacggccgagcagctgagcctgaagcagcaggacaaggcggccgcggccgagctgctggcgcagaccacgcacttcctgcacgaccccaaggtggcgctggagagcctctacccgctggccaagttcacggccgagctgggcctcagccccgacaaggcggccgaggtgctgagccagggcgctcacctggcggccgggcccgacggccggaccatcgaccgtttctctcccacctagagcgcccctcgccagcccgctctgtcgctgctgcgcggccctggcccgcaccccagggagcggcgggggcggcgcgcagggcccactgtgcccgggacaaccgcagcgtcgccacagtggcggctccacctctcggcggcctcacctggcctcactgcttcgtgccttagctcgggggtcgggggagaaccccgggacgggggtgggatggggtaagggaaatttatatttttgatatcagctttgaccaaaggagaccccaggcccctcccgcctcttcctgtggttcgtcggccccctcccccggctccgcgctgctcttagagggggaggggtgtcactgtcggggcactcctagccctacctccggcccttgcgaccacacccattctcactgtgaatctccccgctggggtcggagcgtcgggcagagttggggagtggggaggggactgagccggccggagggccccccgcacccccgctcccacccaccccgggactgataatgtgaagttcctcattttgcacaagtggcactagccccagggccaacccttccttcctcagtcaccaagggcggggagttctggagtcggaaggcgaagagcctaccaccaggtctcccactcccgcggtgccctcccttcccttccctgcggccccggaccatatttattgcatgcgccccggcggccccccatcccgagcccaggctgggctgggctggaacgcggtctctttagctccctcctcttcgtttgtatatttcctaccttgtacacaggctcttccagagccgcttccattttctatactcgaaccaaacagcaataaagcagtaaccaagg

SEQ ID NO: 38641 - DNA, 2202 bp, Artificial Sequence
  derived and/or modified sequence
atgaccttccctgaggccgacatcctgctgaagagcggggagtgtgccggccagaccatgctggacaccatggaggcccctggccacagccggcagctgctgctgcagctgaacaaccagaggaccaagggcttcctgtgtgatgtgatcatcgtggtgcagaatgccctcttccgggcccacaagaatgtgctggccgccagcagcgcctacctgaagagcctggtggtgcatgacaacctgctgaacctggaccatgacatggtgtccccagctgtgttccggctggtgctggacttcatctacacaggccgcctggctgatggagctgaggccgctgctgctgctgctgtggcccctggagctgagcccagcctgggcgctgtgctggccgccgccagctacctgcagatcccagacctggtggccctgtgcaagaagaggctgaagagacatggcaagtactgccacctgcggggcggcggcggcggcggcggcggctacgccccctacggccggcccggccggggcctgcgggccgccacccctgtgatccaggcctgctaccccagccctgtgggccccccacctcctcctgctgctgagcccccatctggccctgaggccgctgtgaacacccactgtgccgagctgtatgccagcggccctggccctgctgctgccctgtgtgccagcgagcggcgctgcagccccctgtgtggcctggacctgagcaagaagagccccccaggcagcgctgcccctgagcggcccctggccgagcgggagctgccccccaggccagacagccccccatctgctggccctgctgcctacaaggagccccccctggccctgcccagcctgccccccctgcccttccagaagctggaggaggccgccccacccagcgaccccttccggggcggcagcggcagccctggccctgagcccccaggccgcccagatggccccagcctgctgtaccgctggatgaagcatgagcccggcctgggcagctatggagatgagctgggccgggagcggggcagccccagcgagcgctgtgaggagagaggaggagatgctgctgtgtccccaggcggcccccccctgggcctggcccccccaccccgctacccaggcagcctggatggccctggagctggaggagatggagatgactacaagagcagcagcgaggagaccggcagcagcgaggaccccagccccccaggcggccacctggagggctacccctgcccccacctggcctacggggagcctgagagctttggagacaacctgtatgtgtgcatcccctgtgggaagggcttccccagcagcgagcagctgaatgcccacgtggaggcccacgtggaggaggaggaggccctgtatggccgggcagaggccgctgaggtggccgccggggccgccggcctgggccccccatttggaggcggcggggacaaggtggccggggcccctgggggcctgggggagctgctgcggccctaccgctgtgccagctgtgacaagagctacaaggaccctgccaccctgcggcagcacgagaagacccactggctgacccggccctacccctgcaccatctgtgggaagaagttcacccagaggggcaccatgaccaggcacatgaggagccacctgggcctgaagccctttgcctgtgatgcctgtggcatgaggttcacccggcagtaccgcctgacagagcacatgaggatccacagcggggagaagccctatgagtgccaggtgtgtggcggcaagtttgcccagcagaggaacctgatcagccacatgaagatgcatgctgtgggcggcgctgctggagctgctggggccctggccggcctgggcggcctgcccggggtgcccggcccagatggcaagggcaagctggacttccctgagggcgtgtttgctgtggcccggctgacagctgagcagctgagcctgaagcagcaggacaaggctgctgctgctgagctgctggcccagaccacccacttcctgcatgaccccaaggtggccctggagagcctgtaccccctggccaagttcaccgctgagctgggcctgagcccagacaaggctgctgaggtgctgagccagggcgcccacctggccgccggcccagatggccgcaccatcgaccgcttcagccccacctag

SEQ ID NO: 38642 - DNA, 2202 bp, Artificial Sequence
  derived and/or modified sequence
atgaccttccccgaggccgacatcctgctgaagagcggcgagtgcgccggccaaacaatgctggacactatggaggcgcctggtcattctcgccagctacttctgcagttgaataatcagcggactaagggatttttatgcgatgtcatcatcgtcgtccaaaacgccctgtttagagctcacaagaatgtgctggcggccagctcagcatacttaaagagcctagtcgtgcacgacaatctgcttaatttggatcatgacatggtgtctcccgcagtattcaggttagtactggactttatctacacaggtcgcctcgctgacggggcagaagcagcggccgctgcagcagtggcaccaggtgccgagccaagtttaggggcggtattggcagcggcatcgtacctgcagatccctgacctggtcgctttatgcaagaagagattaaaaagacacggcaaatattgccacctgaggggtgggggcggtggtgggggcgggtacgctccatacgggaggccaggacgcggactccgtgccgccacccctgtcattcaggcctgctacccctctcccgtgggcccaccgcccccacccgctgccgaaccaccctccggcccagaggccgctgtcaatacgcattgtgcagaactgtacgcctccggcccaggccccgccgcggctctctgtgcatcagagagacggtgcagcccattatgcggactggatctgagcaaaaagtcacctcctggcagcgcagccccagagcggccactcgcagaacgcgagttgccccccaggcctgactccccaccatctgcgggccctgcggcttacaaagagccgcccctcgctctcccaagcctaccaccgctgcccttccagaaattagaagaagcggctcctccctctgacccctttcgcggaggatctgggtcccctggacctgagcccccgggcaggccagatggaccatcacttctatacaggtggatgaaacacgagcccgggttggggagttacggcgacgagctgggacgagagaggggttctccatcggaacgatgtgaagaacgcggaggcgatgccgctgtcagcccaggcggacccccactgggtctggcccccccacctcggtacccgggtagcctcgacgggcctggcgctggcggcgacggggacgactacaaatcgtcctctgaagaaaccggctccagcgaggatccctccccacctggcggtcatctggagggctatccttgtccacacctcgcgtatggcgaacccgagagcttcggagacaatctctacgtgtgcataccgtgcggcaaaggattcccctcaagcgagcagttgaatgctcacgtggaagctcacgtagaggaagaggaggcgctgtacggacgcgcggaagctgcagaggtggccgctggagccgccggcttaggaccacccttcgggggtggcggcgataaggtggccggggccccgggtgggctcggcgaacttctgcgcccatacagatgtgcctcctgtgataagtcatacaaagatccagcaacactcaggcagcacgagaagacgcactggctgacccggccatatccatgcactatctgtggcaaaaagtttactcagcgcggtaccatgacccgacatatgcggagccacctgggactcaaaccttttgcgtgcgacgcctgtgggatgcgttttactagacagtatcgactcaccgaacacatgcggatccatagcggcgagaaaccttacgaatgtcaggtgtgtggtggcaaatttgcacagcaaaggaatctgatatcacatatgaagatgcacgcggttggaggcgccgctggggccgcaggagccctcgcaggactggggggcctgcccggcgtccccggacctgatggaaaaggtaaactggatttcccggaaggcgtttttgcagtggcccggctgaccgccgagcagcttagcctgaaacagcaagataaggctgccgcggctgagctgcttgcccagaccacacatttcctccacgaccccaaggtcgccctggagagtctgtaccctctggcaaaatttactgccgaattaggcctgtcaccggataaggccgccgaggttctaagccaaggagcccacctcgcggccggccccgacggaagaactatagatcgctttagtccgacatag

SEQ ID NO: 38643 - DNA, 2202 bp, Artificial Sequence
  derived and/or modified sequence
atgactttcccagaggcggatatactgttgaagtcgggtgagtgcgccggacagaccatgctggatacaatggaggctccaggacattctcggcaactgctgctgcagctgaacaaccagagaactaaaggcttcctgtgtgatgtgattattgttgttcaaaatgccctgttcagggcacacaagaacgtgctggccgcatcatctgcatatctgaaaagtttagttgtccacgataacctgctgaatctggaccatgacatggtgtctcctgctgtgtttagactggttctcgatttcatttacacaggacggttggccgatggcgcagaggccgcagcggctgctgccgtggccccaggagccgagccttctctgggggcagttctggccgctgcctcataccttcagatcccagatctagtggccctgtgtaagaaacggctgaagcgtcacggaaagtactgtcacctgcgaggaggcggaggcggaggtggcggatatgcaccatacggccgaccaggtcgaggtttgagggctgccactcccgtgatccaagcatgctatcctagcccagttggacctcctccccctccagctgccgaacccccttctgggccagaggcagcagttaatacccactgcgcagaactgtacgcctcaggccctggacccgctgcagctctttgcgccagcgagcggagatgttcccctctctgtggactggacctctcaaagaaatctccccctggatccgccgctcccgaacgaccactggcagagcgagaacttcctcccagacctgatagtcccccatcagctgggcctgccgcatataaggagcccccattggccctgccgagtcttccgcctctcccatttcagaaactggaagaggctgccccaccctccgacccattccggggtggtagtgggtcaccaggcccagaaccaccaggcaggcccgatggaccatctttgctctataggtggatgaagcatgaacctggcttgggctcttatggagacgagttaggtcgagaaaggggctcaccttctgaaaggtgcgaggagaggggaggtgatgctgccgtgagcccgggagggccaccgttgggcctggccccacccccaagatacccaggatcactggatggcccaggggctggtggggatggggatgattacaaatcgtcttccgaggaaaccggatcgtctgaggacccttctccccctggaggacaccttgagggatacccatgcccccatcttgcgtatggggagcccgagtcctttggggacaacctttatgtctgtatcccatgtggcaaaggcttcccatccagcgagcaattgaacgcacatgtcgaggcacacgtggaggaggaggaagcgctgtatgggagggcagaagcagctgaggttgccgcaggtgcagccggtttaggccctccattcggtggcggaggcgacaaggtcgccggagctccaggcggattaggcgaactgctgcggccatatcgatgcgccagttgtgacaaatcctacaaggaccctgccaccttaaggcaacacgaaaagacgcactggctaacccgcccttacccttgtactatttgcgggaagaagtttactcagcgcggaactatgactcgacacatgcgcagccacctggggctcaaacccttcgcgtgcgacgcatgcggtatgcggtttacgaggcagtacagactcaccgaacacatgcgcattcactccggcgaaaaaccttacgagtgccaggtttgtggcggaaagttcgcccagcagaggaatctcattagtcatatgaaaatgcatgcagtgggcggagccgcaggagctgccggtgccctggcaggccttggtggcctgcctggggttcccggaccggacgggaaaggcaaactcgactttcccgagggagtgttcgctgtggccagacttaccgctgagcagttatcccttaagcaacaggacaaggcggctgcagccgagcttttagcacaaactacacatttcctgcacgaccccaaggtggccctggaatcactgtaccccctggctaaattcaccgccgagctggggctgtctcctgataaggccgctgaggtactgtctcagggggcacacctggccgctggtccggatgggaggaccatcgatcggttctctccgacctag

SEQ ID NO: 38644 - protein, 415 aa, Artificial Sequence
  derived and/or modified sequence
MMLGPEGGEGFVVKLRGLPWSCSVEDVQNFLSDCTIHDGAAGVHFIYTREGRQSGEAFVELGSEDDVKMALKKDRESMGHRYIEVFKSHRTEMDWVLKHSGPNSADSANDGFVRLRGLPFGCTKEEIVQFFSGLEIVPNGITLPVDPEGKITGEAFVQFASQELAEKALGKHKERIGHRYIEVFKSSQEEVRSYSDPPLKFMSVQRPGPYDRPGTARRYIGIVKQAGLERMRPGAYSTGYGGYEEYSGLSDGYGFTTDLFGRDLSYCLSGMYDHRYGDSEFTVQSTTGHCVHMRGLPYKATENDIYNFFSPLNPVRVHIEIGPDGRVTGEADVEFATHEEAVAAMSKDRANMQHRYIELFLNSTTGASNGAYSSQVMQGMGVSAAQATYSGLESQSVSGCYGAGYSGQNSMGGYD

SEQ ID NO: 38645 - protein, 338 aa, Artificial Sequence
  derived and/or modified sequence
MGHRYIEVFKSHRTEMDWVLKHSGPNSADSANDGFVRLRGLPFGCTKEEIVQFFSGLEIVPNGITLPVDPEGKITGEAFVQFASQELAEKALGKHKERIGHRYIEVFKSSQEEVRSYSDPPLKFMSVQRPGPYDRPGTARRYIGIVKQAGLERMRPGAYSTGYGGYEEYSGLSDGYGFTTDLFGRDLSYCLSGMYDHRYGDSEFTVQSTTGHCVHMRGLPYKATENDIYNFFSPLNPVRVHIEIGPDGRVTGEADVEFATHEEAVAAMSKDRANMQHRYIELFLNSTTGASNGAYSSQVMQGMGVSAAQATYSGLESQSVSGCYGAGYSGQNSMGGYD

SEQ ID NO: 38646 - DNA, 1248 bp, Artificial Sequence
  derived and/or modified sequence
atgatgctgggccccgagggcggcgagggcttcgtggtgaagctgagaggcctgccctggagctgcagcgtggaggacgtgcagaacttcctgagcgactgcaccatccacgacggcgccgccggcgtgcacttcatctacaccagagagggcagacagagcggcgaggccttcgtggagctgggcagcgaggacgacgtgaagatggccctgaagaaggacagagagagcatgggccacagatacatcgaggtgttcaagagccacagaaccgagatggactgggtgctgaagcacagcggccccaacagcgccgacagcgccaacgacggcttcgtgagactgagaggcctgcccttcggctgcaccaaggaggagatcgtgcagttcttcagcggcctggagatcgtgcccaacggcatcaccctgcccgtggaccccgagggcaagatcaccggcgaggccttcgtgcagttcgccagccaggagctggccgagaaggccctgggcaagcacaaggagagaatcggccacagatacatcgaggtgttcaagagcagccaggaggaggtgagaagctacagcgacccccccctgaagttcatgagcgtgcagagacccggcccctacgacagacccggcaccgccagaagatacatcggcatcgtgaagcaggccggcctggagagaatgagacccggcgcctacagcaccggctacggcggctacgaggagtacagcggcctgagcgacggctacggcttcaccaccgacctgttcggcagagacctgagctactgcctgagcggcatgtacgaccacagatacggcgacagcgagttcaccgtgcagagcaccaccggccactgcgtgcacatgagaggcctgccctacaaggccaccgagaacgacatctacaacttcttcagccccctgaaccccgtgagagtgcacatcgagatcggccccgacggcagagtgaccggcgaggccgacgtggagttcgccacccacgaggaggccgtggccgccatgagcaaggacagagccaacatgcagcacagatacatcgagctgttcctgaacagcaccaccggcgccagcaacggcgcctacagcagccaggtgatgcagggcatgggcgtgagcgccgcccaggccacctacagcggcctggagagccagagcgtgagcggctgctacggcgccggctacagcggccagaacagcatgggcggctacgactag

SEQ ID NO: 38647 - DNA, 2186 bp, Artificial Sequence
  derived and/or modified sequence
gtcgtggaagcaggactgcgccgcgtcttcctcaaggtggggttcggggggccaccgaatcgctgtcacgccggcaggttgagaacaaaaacatgcacctggagtttccccggagccctctgcgtggttgagcttcggtggaatttcggggctcttggctgccagccgcgcttgcctggtagcaacagaaaccagtcctgctcgcctccgtggacatttcattaccatccagaagtgtctcccactgaaggcatccgtggttgtttttaagccacaaaaaagccacacccaagatcacctgacacccaccctgacaagtgtccatgatgctgggccctgagggaggtgaaggctttgtggtcaagctccgtggcctgccctggtcctgctctgttgaggacgtgcagaacttcctctctgactgcacgattcatgatggggccgcaggtgtccatttcatctacactagagagggcaggcagagtggtgaggcttttgttgaacttggatcagaagatgatgtaaaaatggccctgaaaaaagacagggaaagcatgggacaccggtacattgaggtgttcaagtcccacagaaccgagatggattgggtgttgaagcacagtggtcccaacagtgccgacagcgccaacgatggcttcgtgcggcttcgaggactcccatttggatgcacaaaggaagaaattgttcagttcttctcagggttggaaattgtgccaaacgggatcacattgcctgtggaccccgaaggcaagattacaggggaagcgttcgtgcagtttgcctcgcaggagttagctgagaaggctctagggaaacacaaggagaggatagggcacaggtacattgaggtgtttaagagcagccaggaggaagttaggtcatactcagatccccctctgaagttcatgtccgtgcagcggccagggccctatgaccggcccgggactgccaggaggtacattggcatcgtgaagcaggcaggcctggaaaggatgaggcctggtgcctacagcacaggctacgggggctacgaggagtacagtggcctcagtgatggctacggcttcaccaccgacctgttcgggagagacctcagctactgtctctccggaatgtatgaccacagatacggcgacagtgagttcacagtgcagagcaccacaggccactgtgtccacatgaggggcctgccgtacaaagcgaccgagaacgacatttacaacttcttctctcctctcaaccctgtgagagtccatattgagattggcccagatggaagagtgacgggtgaagcagatgttgagtttgctactcatgaagaagctgtggcagctatgtccaaagacagggccaatatgcagcacagatatatagaactcttcttgaattcaacaacaggggccagcaatggggcgtatagcagccaggtgatgcaaggcatgggggtgtctgctgcccaggccacttacagtggcctggagagccagtcagtgagtggctgttacggggccggctacagtgggcagaacagcatgggtggctatgactagttttgttaggaacatttgagttacttcaatcattttcacaggcagccaacaagcaattaagagcagttataatagaggaagctgggggacccattttgcaccatgagtttgtgaaaaatctggattaaaaaattacctcttcagtgttttctcatgcaaaattttcttctagcatgtgataatgagtaaactaaaactattttcagcttttctcaattaacattttggtagtatacttcagagtgatgttatctaagtttaagtagtttaagtatgttaaatgtggatcttttacaccacatcacagtgaacacactggggagacgtgcttttttggaaaactcaaaggtgctagctccctgattcaaagaaatatttctcatgtttgttcattctagtttatattttcatttaaaatcctttaggttaagtttaagctttttaaaagttagttttgagaattgagacacaatactaatactgtaggaattggtgaggccttgacttaaaactttctttgtactgtgatttccttttgggtgtattttgctaagtgaaacttgttaaattttttgttaactaaatttttttcttaaaataaagactttttcacaa

SEQ ID NO: 38648 - DNA, 1017 bp, Artificial Sequence
  derived and/or modified sequence
atgggccacagatacatcgaggtgttcaagagccacagaaccgagatggactgggtgctgaagcacagcggccccaacagcgccgacagcgccaacgacggcttcgtgagactgagaggcctgcccttcggctgcaccaaggaggagatcgtgcagttcttcagcggcctggagatcgtgcccaacggcatcaccctgcccgtggaccccgagggcaagatcaccggcgaggccttcgtgcagttcgccagccaggagctggccgagaaggccctgggcaagcacaaggagagaatcggccacagatacatcgaggtgttcaagagcagccaggaggaggtgagaagctacagcgacccccccctgaagttcatgagcgtgcagagacccggcccctacgacagacccggcaccgccagaagatacatcggcatcgtgaagcaggccggcctggagagaatgagacccggcgcctacagcaccggctacggcggctacgaggagtacagcggcctgagcgacggctacggcttcaccaccgacctgttcggcagagacctgagctactgcctgagcggcatgtacgaccacagatacggcgacagcgagttcaccgtgcagagcaccaccggccactgcgtgcacatgagaggcctgccctacaaggccaccgagaacgacatctacaacttcttcagccccctgaaccccgtgagagtgcacatcgagatcggccccgacggcagagtgaccggcgaggccgacgtggagttcgccacccacgaggaggccgtggccgccatgagcaaggacagagccaacatgcagcacagatacatcgagctgttcctgaacagcaccaccggcgccagcaacggcgcctacagcagccaggtgatgcagggcatgggcgtgagcgccgcccaggccacctacagcggcctggagagccagagcgtgagcggctgctacggcgccggctacagcggccagaacagcatgggcggctacgactag

SEQ ID NO: 38649 - DNA, 2670 bp, Artificial Sequence
  derived and/or modified sequence
gctcgcaggcgggggtttccatggtgatggtcaacaagcctcaactgcctctgctacaactgccaagttccccgcgtcccaccctcctctaggtgctccaagggaccaccggggtgcctgatatgagagcgggagtgtagagactcggaggccgaggttgagaacaaaaacatgcacctggagtttccccggagccctctgcgtggttgagcttcggtggaatttcggggctcttggctgccagccgcgcttgcctggtagcaacagaaaccagtcctgctcgcctccgtggacatttcattaccatccagaagtgtctcccactgaaggcatccgtggttgtttttaagccacaaaaaagccacacccaagatcacctgacacccaccctgacaagtgtccatgatgctgggccctgagggaggtgaaggctttgtggtcaagctccgtggcctgccctggtcctgctctgttgaggacgtgcagaacttcctctctgactgcacgattcatgatggggccgcaggtgtccatttcatctacactagagagggcaggcagagtggtgaggcttttgttgaacttggatcagaagatgatgtaaaaatggccctgaaaaaagacagggaaagcatgggacaccggtacattgaggtgttcaagtcccacagaaccgagatggattgggtgttgaagcacagtggtcccaacagtgccgacagcgccaacgatggcttcgtgcggcttcgaggactcccatttggatgcacaaaggaagaaattgttcagttcttctcagggttggaaattgtgccaaacgggatcacattgcctgtggaccccgaaggcaagattacaggggaagcgttcgtgcagtttgcctcgcaggagttagctgagaaggctctagggaaacacaaggagaggatagggcacaggtacattgaggtgtttaagagcagccaggaggaagttaggtcatactcagatccccctctgaagttcatgtccgtgcagcggccagggccctatgaccggcccgggactgccaggaggtacattggcatcgtgaagcaggcaggcctggaaaggatgaggcctggtgcctacagcacaggctacgggggctacgaggagtacagtggcctcagtgatggctacggcttcaccaccgacctgttcgggagagacctcagctactgtctctccggaatgtatgaccacagatacggcgacagtgagttcacagtgcagagcaccacaggccactgtgtccacatgaggggcctgccgtacaaagcgaccgagaacgacatttacaacttcttctctcctctcaaccctgtgagagtccatattgagattggcccagatggaagagtgacgggtgaagcagatgttgagtttgctactcatgaagaagctgtggcagctatgtccaaagacagggccaatatgcagcacagatatatagaactcttcttgaattcaacaacaggggccagcaatggggcgtatagcagccaggtgatgcaaggcatgggggtgtctgctgcccaggccacttacagtggcctggagagccagtcagtgagtggctgttacggggccggctacagtgggcagaacagcatgggtggctatgactagttttgttaggaacatttgagttacttcaatcattttcacaggcagccaacaagcaattaagagcagttataatagaggaagctgggggacccattttgcaccatgagtttgtgaaaaatctggattaaaaaattacctcttcagtgttttctcatgcaaaattttcttctagcatgtgataatgagtaaactaaaactattttcagcttttctcaattaacattttggtagtatacttcagagtgatgttatctaagtttaagtagtttaagtatgttaaatgtggatcttttacaccacatcacagtgaacacactggggagacgtgcttttttggaaaactcaaaggtgctagctccctgattcaaagaaatatttctcatgtttgttcattctagtttatattttcatttaaaatcctttaggttaagtttaagctttttaaaagttagttttgagaattgagacacaatactaatactgtaggaattggtgaggccttgacttaaaactttctttgtactgtgatttccttttgggtgtattttgctaagtgaaacttgttaaattttttgttaactaaatttttttcttaaaataaagactttttcacaatgactggcacagattactcagcaaaagatagcaaaacgggtggttgaagataattcattttaatcgtaatgtattttagtgtgaatttaaaaatttcatacatcaaatctatgatctcccttatattcttatgatgaggctaaataaaagtctaataaaaatgttaaatatgtgaatggtggaaatggtgactagcagcacacattctgggaagcatcaaatagacacacggccccagccacctgcaacttatgtgcactgttgtaaaccattcagaattttcctgctaggcccttgatgctggagtcacatctgttgatagctggagaactttagtttcaagtactacattgtgaaagcaattattttgtttctagtttttataaaatgctgatttaaactttt

SEQ ID NO: 38650 - DNA, 2617 bp, Artificial Sequence
  derived and/or modified sequence
cggttcccgtagccttagctctcggccccgggccctttttcctcctcggctgcgccgcgtgtcctcggagcgcggtccctgtattggtctcctgctcctagaggttgagaacaaaaacatgcacctggagtttccccggagccctctgcgtggttgagcttcggtggaatttcggggctcttggctgccagccgcgcttgcctggtagcaacagaaaccagtcctgctcgcctccgtggacatttcattaccatccagaagtgtctcccactgaaggcatccgtggttgtttttaagccacaaaaaagccacacccaagatcacctgacacccaccctgacaagtgtccatgatgctgggccctgagggaggtgaaggctttgtggtcaagctccgtggcctgccctggtcctgctctgttgaggacgtgcagaacttcctctctgactgcacgattcatgatggggccgcaggtgtccatttcatctacactagagagggcaggcagagtggtgaggcttttgttgaacttggatcagaagatgatgtaaaaatggccctgaaaaaagacagggaaagcatgggacaccggtacattgaggtgttcaagtcccacagaaccgagatggattgggtgttgaagcacagtggtcccaacagtgccgacagcgccaacgatggcttcgtgcggcttcgaggactcccatttggatgcacaaaggaagaaattgttcagttcttctcagggttggaaattgtgccaaacgggatcacattgcctgtggaccccgaaggcaagattacaggggaagcgttcgtgcagtttgcctcgcaggagttagctgagaaggctctagggaaacacaaggagaggatagggcacaggtacattgaggtgtttaagagcagccaggaggaagttaggtcatactcagatccccctctgaagttcatgtccgtgcagcggccagggccctatgaccggcccgggactgccaggaggtacattggcatcgtgaagcaggcaggcctggaaaggatgaggcctggtgcctacagcacaggctacgggggctacgaggagtacagtggcctcagtgatggctacggcttcaccaccgacctgttcgggagagacctcagctactgtctctccggaatgtatgaccacagatacggcgacagtgagttcacagtgcagagcaccacaggccactgtgtccacatgaggggcctgccgtacaaagcgaccgagaacgacatttacaacttcttctctcctctcaaccctgtgagagtccatattgagattggcccagatggaagagtgacgggtgaagcagatgttgagtttgctactcatgaagaagctgtggcagctatgtccaaagacagggccaatatgcagcacagatatatagaactcttcttgaattcaacaacaggggccagcaatggggcgtatagcagccaggtgatgcaaggcatgggggtgtctgctgcccaggccacttacagtggcctggagagccagtcagtgagtggctgttacggggccggctacagtgggcagaacagcatgggtggctatgactagttttgttaggaacatttgagttacttcaatcattttcacaggcagccaacaagcaattaagagcagttataatagaggaagctgggggacccattttgcaccatgagtttgtgaaaaatctggattaaaaaattacctcttcagtgttttctcatgcaaaattttcttctagcatgtgataatgagtaaactaaaactattttcagcttttctcaattaacattttggtagtatacttcagagtgatgttatctaagtttaagtagtttaagtatgttaaatgtggatcttttacaccacatcacagtgaacacactggggagacgtgcttttttggaaaactcaaaggtgctagctccctgattcaaagaaatatttctcatgtttgttcattctagtttatattttcatttaaaatcctttaggttaagtttaagctttttaaaagttagttttgagaattgagacacaatactaatactgtaggaattggtgaggccttgacttaaaactttctttgtactgtgatttccttttgggtgtattttgctaagtgaaacttgttaaattttttgttaactaaatttttttcttaaaataaagactttttcacaatgactggcacagattactcagcaaaagatagcaaaacgggtggttgaagataattcattttaatcgtaatgtattttagtgtgaatttaaaaatttcatacatcaaatctatgatctcccttatattcttatgatgaggctaaataaaagtctaataaaaatgttaaatatgtgaatggtggaaatggtgactagcagcacacattctgggaagcatcaaatagacacacggccccagccacctgcaacttatgtgcactgttgtaaaccattcagaattttcctgctaggcccttgatgctggagtcacatctgttgatagctggagaactttagtttcaagtactacattgtgaaagcaattattttgtttctagtttttataaaatgctgatttaaactttt

SEQ ID NO: 38651 - DNA, 1248 bp, Artificial Sequence
  derived and/or modified sequence
atgatgttgggaccagaaggcggtgagggattcgttgtcaagctcagaggcttgccctggtcttgcagcgttgaagatgttcagaactttctgtcggactgcactatccatgacggcgcagctggagtacactttatttatacacgcgagggccgtcagtccggagaggcatttgtggagctggggtccgaggacgatgtgaaaatggcgttgaaaaaagatcgcgagtccatggggcataggtacattgaggttttcaaatctcatcgtactgagatggactgggtcttgaagcacagtgggccaaatagcgctgacagcgctaacgatgggtttgtgaggctgcgtggactccctttcggatgcaccaaggaagagattgtccaattcttcagtggactagaaatagtgccaaacggtattaccttacctgtggaccctgagggcaagatcactggagaggctttcgttcagtttgcctctcaggagctcgctgagaaagccctcggcaaacataaggagcgcattgggcatcggtacattgaggtcttcaaaagcagccaagaggaggtgcgctcatactccgaccctccacttaagttcatgtcagtgcaacgcccaggaccttacgaccgtcctggcactgcccgccggtacatagggatcgtgaaacaggccggtctagagaggatgcggccgggcgcctactctaccgggtatggggggtacgaagagtatagtggccttagcgatggttatggtttcactactgacctattcggccgtgatctttcttactgcttatctgggatgtacgaccacaggtatggagacagcgaattcacagtgcagagtactacagggcattgcgtacatatgagaggcttgccatataaagctaccgagaatgacatctacaattttttttcaccattgaatcccgtccgcgtgcatatagaaatcggtccagatgggagagtgacaggggaggcagacgtggaattcgccacacacgaggaagccgtggccgccatgtcgaaggatagagccaacatgcagcaccgatatatcgaactattcctcaatagcaccactggtgcaagtaacggagcatattcatcgcaggtcatgcagggtatgggagtgagtgctgcacaggcgacatactcaggattagaatctcagtccgtgagcggttgctatggtgctgggtatagcgggcagaacagtatgggcgggtacgactag

SEQ ID NO: 38652 - DNA, 1248 bp, Artificial Sequence
  derived and/or modified sequence
atgatgctgggacccgaggggggcgaggggtttgttgtcaaactacggggtctaccatggtcttgctctgtggaagatgtgcagaacttcctgtccgactgcacaatccacgatggagccgccggtgtccactttatctacaccagagagggtaggcagagtggcgaagcattcgtcgagctgggcagcgaggatgatgtgaagatggcgctgaaaaaagatagggagagcatgggccaccgatacatagaggtgttcaagagtcacagaacagaaatggactgggtgttgaaacatagcgggcccaacagtgcggactctgccaatgatggattcgtgcgcctgcggggccttcctttcgggtgtacgaaagaggaaattgtccaattttttagcggcctcgaaatcgttcctaacggtataacgttaccagttgaccccgaaggcaagattacgggggaggcattcgttcaatttgcctctcaggagcttgccgaaaaagcactgggtaaacacaaagagcggattgggcaccgctacatcgaggtctttaagtctagccaggaggaggttaggtcctatagcgatccacccttaaagttcatgtccgtgcagagaccagggccatatgataggccagggacagcacgacggtatatcgggattgttaaacaggcaggcttggaaaggatgcggcccggcgcctatagtaccgggtatggcggttatgaggaatacagcggtctgtccgatggctacgggttcactactgacctattcgggcgggacctgtcgtactgtctctcagggatgtacgatcacagatatggggactctgagtttacagtgcagagcaccacaggacactgtgttcacatgcgcggacttccttacaaggccacggaaaacgacatttataacttcttcagtcccctcaacccagtcagagtgcatatcgagattgggcccgatggaagagtcacgggagaagccgatgtggaatttgcaacacatgaggaggcagttgccgccatgtccaaggatagagccaacatgcagcatagatatatagaactgtttttgaactcaaccacaggtgcatcaaatggcgcctacagcagccaggtgatgcaggggatgggggtgtcagctgcccaggccacttactccggcttggagagccagtccgtgagtgggtgttacggcgctggctactccggtcagaattctatgggtggatacgattag

SEQ ID NO: 38653 - DNA, 1248 bp, Artificial Sequence
  derived and/or modified sequence
atgatgctgggccccgagggcggagaagggttcgtagtgaagcttcggggcctcccatggtcttgctctgtggaggatgttcagaacttcctgagcgattgtacgatccatgacggagcagctggcgtgcatttcatctatacacgcgagggcaggcagtcgggagaggcttttgtggaacttggaagcgaagacgacgtgaagatggccttgaagaaagacagagaaagcatgggacaccgatacattgaggtgtttaaaagccatcggaccgagatggactgggtcctcaaacactcaggcccaaattcagccgattctgccaacgacggcttcgtcaggctgcggggactgccttttgggtgtacaaaggaggaaatcgtccagttttttagcggcctggagattgttccaaacggaatcacattgccggtggacccggagggaaaaataaccggagaggccttcgtgcagttcgcttcacaggaactggctgagaaagcactcgggaagcacaaggagcgaataggccaccgctacattgaagtattcaagtcctctcaagaagaggtgagaagctatagtgacccacccctgaaattcatgtctgtgcagcgccccggcccctacgaccgccctggcaccgccagaagatatatcggcattgtgaaacaggcagggcttgagcgaatgcgtcctggagcctattctaccggatatggggggtatgaggaatattccggcctgagcgacggctatggatttacgaccgacctctttgggcgggacttgtcctattgcctcagtgggatgtacgaccaccgttacggtgattctgagtttacagtccaatcaacgaccggacactgtgtccatatgagaggccttccttataaggctacggagaacgacatctataatttcttttcgcccctgaaccctgtgagagtgcatattgaaatcggaccagacggtcgagtgacaggcgaggctgatgtagagttcgccactcatgaggaggctgtcgccgccatgagcaaagatcgcgctaacatgcaacacaggtacatcgaacttttcctgaactccaccacaggcgcctcaaatggggcctattcaagtcaagttatgcagggcatgggggtgagtgcagcgcaggctacttattctggtctggaatcccagagtgtctcaggctgctatggggctggctactccgggcagaatagtatgggcggttatgattag

SEQ ID NO: 38654 - DNA, 1248 bp, Artificial Sequence
  derived and/or modified sequence
atgatgctgggacctgaaggtggcgaaggtttcgtggtgaagctccgtgggctgccgtggagctgcagcgtagaagatgtacagaacttcctgtctgattgcaccattcacgatggagcagcaggtgtccactttatttacacgcgtgagggccgccagagtggggaggcattcgtcgagctgggcagcgaggatgacgtgaaaatggcactcaaaaaagatcgggagagcatgggccacagatacatagaggtctttaaatctcatcggaccgagatggattgggtgctgaagcactccggaccgaattcagctgattccgcaaacgacggctttgtacgcctgagggggctgcccttcggctgtaccaaagaggaaatcgtgcaattcttctcaggtctggaaatcgtgccgaacggcattactctgccggtggatcccgaaggcaagattacaggcgaggcgtttgtccagttcgcctcacaagagttagctgaaaaggcactgggcaagcacaaggaacgtatcggacacagatatattgaagtcttcaagtcttcccaggaagaggtccggagctatagcgacccccccttgaagtttatgtccgtgcagagacccgggccctacgataggccgggcacagcgcgacgatacatcggcatagtgaagcaggccggtttggaacggatgaggcctggcgcctacagtacaggctatggggggtacgaggaatactcaggcttatcagacggctacggttttacgactgatctgttcggcagagatctgtcatactgcttgtcaggcatgtacgaccatcggtacggagactcagaattcacggttcagtccacgacagggcactgtgtgcatatgcggggactcccatataaggccaccgagaatgacatctacaactttttcagtcccctgaaccctgtgagagtacacattgagatcgggcccgacggcagggtgactggagaggccgatgtggagtttgcaactcacgaagaggctgttgccgcgatgtcgaaggaccgggccaacatgcaacacaggtacattgagcttttcctgaattctacaactggcgcctcgaacggtgcatacagtagccaggtgatgcagggaatgggcgtgtctgccgcgcaggccacttacagcggtctggaaagtcagtcagtgtctggctgttacggcgccggctactctggccaaaacagcatggggggatacgactag

SEQ ID NO: 38655 - DNA, 1017 bp, Artificial Sequence
  derived and/or modified sequence
atgggtcatcggtacattgaggtatttaaatcacacaggacggaaatggactgggtgctgaagcactccgggcccaactccgcggacagcgccaacgacggatttgtgcgcctcaggggactcccctttggatgtactaaggaagaaatcgtccaattctttagtggtctggaaatcgttcccaacggcataaccctgcctgtcgacccggagggcaagatcaccggagaggcttttgtgcagtttgcatctcaggaacttgcggaaaaagctctgggcaagcacaaggagaggataggacacagatatatcgaggtcttcaagtcatctcaggaggaagttagatcatattccgaccctcccctgaagtttatgagtgtgcagagaccaggaccatacgacaggcccggcaccgcccgtcgttacattggaattgtaaagcaggctggactggaaaggatgcgccccggagcttactctactggatatggcggttacgaggaatacagtgggctgagcgatggctatggcttcactacggacctgttcgggcgcgatttatcttattgcctttctggcatgtacgaccatcgctacggagactcagaattcacagttcagagtaccactggacactgtgtccacatgagaggattgccttataaagccaccgagaatgacatttataacttcttttctcccctgaaccctgttagggtacacatcgaaattggtccggacggacgagttacaggcgaagctgatgtcgagttcgcaacacatgaggaggctgtagcagcaatgtctaaggaccgggcaaacatgcagcatcggtatatcgagctctttctgaacagtacaactggggcctccaacggtgcatattcatcccaagtcatgcaggggatgggagtttccgcggcacaggcaacttatagcgggctcgaaagtcagagtgtttccggctgttatggagcaggctattccggacagaatagcatgggcggctacgattag

SEQ ID NO: 38656 - DNA, 1248 bp, Artificial Sequence
  derived and/or modified sequence
atgatgctgggaccagaaggaggtgagggctttgtcgtaaaactgcggggactaccatggtcatgctccgtggaggatgttcaaaatttcctctccgattgtacaatccatgacggggccgccggcgtgcatttcatctacactcgcgagggcagacaaagtggcgaagcatttgtcgagctggggtctgaggacgacgtcaagatggctctgaaaaaggaccgagagagcatgggccacaggtatatcgaagtcttcaagtcccacagaacagagatggattgggttctgaagcactccgggcccaactctgccgactctgcaaacgacgggttcgtgaggcttcgggggctccctttcgggtgtactaaggaggaaattgttcaattcttttccgggctggagatcgtgccaaacgggatcactcttccagtggatccggaaggaaaaatcacaggggaggctttcgttcagttcgccagtcaagagttagccgagaaagcactaggtaagcataaggagagaatcgggcacaggtatattgaagtatttaaatcaagccaggaggaggtgaggtcttactccgatccacctctcaagtttatgtccgtgcaacggccaggcccatacgatcggcctggaaccgctaggcggtacataggcattgtgaagcaggcgggtctggaaaggatgaggcctggtgcctactccacaggctacggcggctacgaagaatatagcgggctgagtgacggttacggattcaccactgacctgtttggtcgagatctgagctactgcctcagcggaatgtacgatcacaggtacggggactccgaattcaccgtgcagtctaccaccggccactgtgtgcacatgcgaggactcccatacaaagcaacagagaatgacatatataacttcttcagcccattgaaccctgtccgggtgcacatcgaaataggtcctgacggacgggtaactggcgaagccgacgtggaatttgcaacacacgaggaagctgtggccgccatgtcaaaggatcgcgccaacatgcagcaccgctatatcgagctcttcctcaactccacaaccggggcttcaaacggcgcttattcatctcaggtaatgcagggaatgggcgtgtctgctgcacaggcaacctattccggacttgagtcccagtccgtgagcggatgctatggggctgggtactccggacaaaacagcatgggtggatacgattag

SEQ ID NO: 38657 - DNA, 1248 bp, Artificial Sequence
  derived and/or modified sequence
atgatgctgggccctgagggcggggagggctttgtggtgaagctgcggggcctgccctggagctgcagcgtggaggatgtgcagaacttcctgagtgactgcaccatccatgatggagctgctggggtgcacttcatctacacccgggagggccggcagagcggggaggcctttgtggagctgggctctgaagatgatgtgaagatggccctgaagaaggaccgggagagcatgggccaccgctacatcgaggtgttcaagagccacaggacagagatggactgggtgctgaagcacagcggccccaacagcgctgacagcgccaatgatggctttgtgcggctgcggggcctgcccttcggctgcaccaaggaggagatcgtgcagttcttcagcggcctggagatcgtgcccaacggcatcaccctgcctgtggaccctgagggcaagatcaccggggaggcctttgtgcagtttgccagccaggagctggccgagaaggccctgggcaagcacaaggagcgcatcggccaccgctacatcgaggtgttcaagagcagccaggaggaggtgcgcagctacagcgacccccccctgaagttcatgtctgtgcagaggcctggcccctatgacaggcctggaacagcccggcgctacatcggcatcgtgaagcaggccggcctggagaggatgaggcctggggcctacagcacaggctacggcggctatgaggagtacagcggcctgagtgatggctacggcttcaccacagacctgtttggccgggacctgagctactgcctgagcggcatgtatgaccaccgctacggggacagcgagttcaccgtgcagagcaccaccggccactgtgtgcacatgaggggcctgccctacaaggccacagaaaatgacatctacaacttcttcagccccctgaaccctgtgcgggtgcacattgaaattggaccagatggccgggtgactggagaggctgatgtggagtttgccacccatgaggaggccgtggccgccatgagcaaggaccgggccaacatgcagcaccgctacatcgagctgttcctgaacagcaccactggagccagcaatggagcctacagcagccaggtgatgcagggcatgggcgtgtctgctgcccaggccacctacagcggcctggagagccagagcgtgtctggctgctatggagctggctacagcggccagaacagcatgggcggctatgactag

SEQ ID NO: 38658 - DNA, 1017 bp, Artificial Sequence
  derived and/or modified sequence
atgggccaccgctacatcgaggtgttcaagagccacaggacagagatggactgggtgctgaagcacagcggccccaacagcgctgacagcgccaatgatggctttgtgcggctgcggggcctgcccttcggctgcaccaaggaggagatcgtgcagttcttcagcggcctggagatcgtgcccaacggcatcaccctgcctgtggaccctgagggcaagatcactggagaggcctttgtgcagtttgccagccaggagctggccgagaaggccctgggcaagcacaaggagagaattggccaccgctacatcgaggtgttcaagagcagccaggaggaggtgcgcagctacagcgacccccccctgaagttcatgtctgtgcagaggcctggcccctatgaccggcccggcacagcccggcgctacatcggcatcgtgaagcaggccggcctggagaggatgaggcctggggcctacagcacaggctatggaggctatgaggagtacagcggcctgagtgatggctacggcttcaccacagacctgtttggccgggacctgagctactgcctgagcggcatgtatgaccacagatatggagacagcgagttcaccgtgcagagcaccaccggccactgtgtgcacatgaggggcctgccctacaaggccacagaaaatgacatctacaacttcttcagccccctgaaccctgtgcgggtgcacatcgagatcggcccagatggccgggtgactggagaggctgatgtggagtttgccacccatgaggaggccgtggccgccatgagcaaggaccgggccaacatgcagcaccgctacatcgagctgttcctgaacagcaccaccggggccagcaatggagcctacagcagccaggtgatgcagggcatgggcgtgtctgctgcccaggccacctacagcggcctggagagccagagcgtgtctggctgctacggggccggctacagcggccagaacagcatgggcggctatgactag

SEQ ID NO: 38659 - DNA, 1248 bp, Artificial Sequence
  derived and/or modified sequence
atgatgctgggccccgagggcggcgagggcttcgtggtgaagctgcggggcttgccttggtcatgtagtgtcgaggatgttcaaaattttttgtcggattgcaccatccacgatggagcagcaggagttcactttatttacacacgcgaggggaggcagtctggtgaggccttcgtggagttggggtccgaggatgacgtgaaaatggctctaaagaaagatagggaaagtatgggccacagatatattgaggtgttcaagtcccatcggaccgaaatggattgggtactgaagcatagtggtcccaacagcgctgactcagcaaatgacgggtttgtgcgactacgcggtctgcccttcggatgcacaaaggaagagatcgtccagttcttctcggggctggaaatcgtaccgaacggtatcacccttcccgtggatccagagggcaagattaccggagaagccttcgtgcagtttgccagtcaggagctggccgagaaggcactcggcaagcataaagaacggattgggcacaggtatattgaggtcttcaagagttcacaggaggaagtccgctcctactccgatccacccctaaagtttatgagcgtacagagaccagggccctatgaccgacccggtaccgcccggaggtacatcggtattgtgaagcaagccggcctcgagcggatgaggccaggcgcttattcgactggctatggcggttacgaggagtatagcgggttatctgatggatatgggtttaccactgacctctttggtagagatttatcatactgcttaagtgggatgtacgaccaccgctacggcgacagtgagttcacagtgcagagtactactggacactgcgtgcacatgcgggggttgccatacaaagccacagagaacgacatctacaattttttctccccactcaacccggtccgtgtgcatatcgaaataggccctgatggaagagtgaccggtgaagctgacgtggagtttgcaactcacgaagaagctgtcgctgccatgtccaaagatagggcaaacatgcagcatcggtacatagaactgttcctgaatagtactaccggggcctccaacggcgcctatagttcacaggttatgcagggtatgggagtctctgccgcccaagccacgtactctgggctagaatcgcagtccgtgagtggctgttacggagctggttattccggacagaactctatgggaggatacgactag

SEQ ID NO: 38660 - DNA, 1248 bp, Artificial Sequence
  derived and/or modified sequence
atgatgctgggccccgagggcggcgagggcttcgtggtgaagctgagggggttaccatggtcgtgcagtgttgaggacgtacagaacttcttgtctgactgtacaatccatgatggggcagcaggcgtccactttatttatactcgcgaaggacgccagtccggagaagcctttgtggaactcggatccgaggatgatgtgaagatggcacttaagaaggatcgcgaatcgatgggccataggtatatcgaggtcttcaagagtcaccggactgagatggactgggtactgaaacatagcggccctaatagcgccgattcagcaaatgatgggtttgtgcgattgagaggcctgccttttggctgtacgaaggaggaaattgtgcagttttttagtggtcttgagatcgtgccaaacggcatcacactgcccgtggacccagaagggaaaatcacaggcgaggctttcgtacagttcgccagccaggagctggcagaaaaagcacttggcaaacacaaggagcggatagggcataggtatattgaagttttcaagtcctctcaggaggaggtccgcagctatagcgatcctccattaaagtttatgagcgtacagaggcctgggccatatgaccgccccggtaccgcgagaagatatattggtattgtgaagcaggctggcttagaacgcatgagacccggggcgtactccactggctacggagggtacgaagagtatagcggcctcagcgatggttatgggttcaccaccgacctctttggaagggacttgtcatattgcctctcagggatgtacgatcacaggtatggggacagtgagttcaccgtgcagtcaaccacaggccactgtgtgcatatgcgcggcctcccctacaaggcaactgaaaatgatatttacaatttttttagccctctcaaccctgtgcgcgtccacatcgagattggacctgacgggcgagtgacaggcgaggcagacgtagaattcgcaacacacgaggaagccgtggccgctatgagcaaagatcgagctaatatgcaacaccgctacatagagctgtttttgaatagcactacaggagcgtctaatggagcttactcctctcaggtgatgcagggaatgggtgtgtctgcagcccaggcgacttactctgggttggaatcccagagcgtgagtggatgctacggagccggatattccggtcaaaattccatgggcggctacgattag

SEQ ID NO: 38661 - DNA, 1248 bp, Artificial Sequence
  derived and/or modified sequence
atgatgctgggccccgagggcggcgagggcttcgtggtgaagctgagggggctgccatggtcgtgcagcgtggaggatgtgcaaaattttctcagcgactgtacaatccatgatggcgctgcaggcgtgcacttcatctacacgcgtgagggtagacaaagtggagaagctttcgtcgagttagggtccgaagatgacgtgaaaatggccttaaagaaggatagagaaagcatgggccataggtacatcgaagtttttaagagccaccgaacagaaatggactgggtcctcaaacatagtggaccaaactctgcagactcggctaatgacgggttcgtccggctgcgcgggttgccattcggctgcaccaaggaagaaatcgtccagttcttttctggcctggagattgtaccgaatggcatcacccttcctgtcgatccagaagggaaaattacgggtgaggcctttgtccaattcgccagccaggagttagccgaaaaggccctcggcaagcacaaagagcggattgggcatagatacatcgaagtgttcaaatcgtcccaggaggaagtccgttcctatagtgaccctcccttgaagtttatgtccgtacagcggccgggaccatacgacaggcctggcacggcccggagatatattgggattgtcaaacaagccggtctggagaggatgagacctggggcctactcaacaggctacggtggctatgaggagtacagcgggctatccgatggatacgggttcaccacagacttgtttgggcgcgacttaagctattgcctcagcggcatgtatgatcaccggtacggcgattcggaatttactgtacaatcgactacaggacactgtgtacatatgcgcggactcccgtacaaggcaacagaaaatgatatctacaattttttctctcccctcaatccagtgcgcgtgcatatagaaattgggccagacggccgtgttaccggggaagcggacgttgaatttgccacgcatgaggaagccgtggctgcgatgagtaaagaccgcgcaaatatgcagcacaggtacattgagctttttctgaattccaccactggtgcctctaacggggcctacagctcccaagttatgcaagggatgggtgtttctgctgcacaagcaacctactcaggcctggagtcacagagcgtgtcaggttgctacggggccgggtacagcgggcagaactccatggggggctatgattag

SEQ ID NO: 38662 - DNA, 1248 bp, Artificial Sequence
  derived and/or modified sequence
atgatgctgggccccgagggcggcgagggcttcgtggtgaagctgcggggactgccctggagttgtagcgtggaagacgtgcagaattttctgagcgattgtaccatacacgacggagctgctggagtgcattttatttacacgagggaagggagacagtccggagaagctttcgtcgagctcggctctgaagatgatgtgaaaatggccctaaaaaaagacagagagtctatgggacatcggtatattgaggtgttcaagtctcaccgaacagaaatggattgggtgctaaagcacagcggtcctaattccgccgactcagctaatgacggcttcgtaaggctaagaggtctgcccttcgggtgtacaaaagaggagatagttcagtttttttccggcctcgagattgtgcccaatgggataaccttacccgtcgaccctgagggcaaaatcaccggggaagcttttgtgcagttcgcatcacaggagttggccgagaaagctctgggaaaacacaaggaaagaattgggcatcgctacatcgaagttttcaagtcgtctcaggaggaggtgcggtcatatagcgaccccccgctgaaatttatgtctgtgcagcgcccgggcccgtacgatcgccccggaacggctagacggtatatcggcatcgtgaagcaggctggcctagagcggatgagacctggcgcctactcaactggatacggggggtatgaagaatactccggcctgtccgacgggtatggcttcactactgacctgttcggaagggatctgtcatattgtctgagtggtatgtacgaccacaggtatggcgactcagagtttactgtgcagtcaacaactggacactgcgttcacatgcgagggctgccctataaggccaccgaaaacgacatttacaacttcttttccccactcaaccccgtccgcgtgcacattgagattggccccgacggtagagttaccggggaggctgatgtggagttcgctacccatgaggaggcagtggctgccatgtctaaagatcgtgctaacatgcaacaccggtacattgagttgtttctgaattccacaaccggcgccagcaacggagcctactcttctcaggtcatgcaagggatgggcgtctccgctgctcaggctacttatagcggcctggaatcccaatcggtttcagggtgttatggagcgggctatagcggccagaattcgatggggggatatgattag

SEQ ID NO: 38663 - DNA, 1017 bp, Artificial Sequence
  derived and/or modified sequence
atgggccaccggtacatcgaggtgttcaagagccaccggaccgagatggattgggtcctcaaacatagcggcccaaatagtgccgatagcgctaacgatgggttcgtccgcctacgtgggctgccatttgggtgcaccaaagaagaaattgtgcagttcttctctggcctggagattgtccctaacggaattacactacctgtcgacccagaagggaaaatcacaggagaagccttcgtgcagtttgcctctcaggaactggctgagaaagccctcggaaagcataaagagaggataggccataggtatatcgaggtgttcaagtcttcccaggaggaggtaagaagctactctgaccctcccttgaaatttatgagtgtgcagcgcccaggcccctacgatcggcccggaactgccaggagatacattggaatcgtgaagcaggcggggctggaacggatgcgaccaggcgcatactctactggttatggcggctatgaggaatattccggtctatccgatggctacggtttcaccaccgatttgttcggaagggatctgagttactgtctgtctggcatgtacgatcataggtatggcgacagcgagttcacagttcaaagcactactggccattgcgtccatatgcgcgggttaccctataaggcaacagaaaatgacatctataatttcttctctccgctgaatcctgtgcgcgtccatatcgagattggcccagatggtagagttaccggagaggcggatgtggagttcgctactcacgaggaagctgtggccgcaatgtctaaagatcgagcaaacatgcagcaccggtatattgaactcttcctgaacagcactaccggtgcatctaatggagcctactccagtcaggtgatgcagggcatgggtgtctctgcagcgcaggccacttattccgggctggagtcgcagagtgtgtcggggtgttacggcgccggctattctggacagaactccatggggggctatgattag

SEQ ID NO: 38664 - DNA, 1248 bp, Artificial Sequence
  derived and/or modified sequence
atgatgctgggccccgagggcggcgagggcttcgtggtgaagctgagagggctgccctggagttgttccgtggaagatgttcagaacttcctgtctgattgtacaatccacgacggcgctgccggggtccactttatctacacacgcgaaggcaggcagtcaggcgaggcatttgtggaactgggttctgaggacgatgtaaaaatggctctcaagaaggaccgagagtccatggggcaccgctatatcgaggtgttcaagtctcatcgaactgaaatggactgggtgctcaaacacagtggccctaattccgctgatagtgcaaacgacggattcgttcggctcagaggtcttcctttcggatgcactaaggaggagatagtacagtttttttcgggccttgagatcgtgcctaacggaataacactgccggtggaccctgagggcaaaattactggagaggcttttgttcagtttgcatctcaggagctggccgaaaaggccctaggaaaacataaggaaagaattggacaccggtatattgaagttttcaagtctagtcaggaggaagtgaggagttatagcgaccctcctctgaagttcatgtccgtacaacgtccagggccatacgacaggcccggcaccgctagaaggtacatcgggattgtgaagcaggcagggcttgaaagaatgagaccaggggcatatagtacaggatacgggggctatgaggagtactctggcctgtccgatggctacgggttcaccacagacctattcggccgcgacctgtcgtactgtctgagcggaatgtacgaccatcgctacggagactccgagtttaccgttcagagtacaactggccactgcgtccacatgagaggactgccatataaagcaaccgagaatgacatttacaacttcttctcacccctgaaccctgtccgggtgcatatcgagattggacctgatggccgggtgaccggggaagccgacgtggaattcgctacccatgaagaggctgtcgcagccatgtccaaagatcgtgcaaatatgcagcatagatatatagagttattcctaaatagtacaaccggggcgagcaatggtgcctattccagccaggttatgcaaggtatgggtgtttctgccgcgcaggctacctacagcggcctggagagtcaatccgtaagcggatgttatggcgcaggctattcaggtcagaattcaatgggaggttacgactag

SEQ ID NO: 38665 - DNA, 1248 bp, Artificial Sequence
  derived and/or modified sequence
atgatgctcggccctgaggggggtgagggtttcgtcgtaaagttgcgtggcctgccgtggtcatgttcagtcgaggatgttcagaactttttgtccgactgcaccatacatgatggagcagctggggtccatttcatttatacccgcgagggacggcaatctggcgaggcatttgtagaactcggaagcgaagacgatgtgaagatggcccttaagaaagatcgggaatcaatgggtcatcggtacattgaggtgtttaagagtcacagaaccgaaatggactgggtgctgaagcattctgggccaaatagcgctgactccgcaaacgatgggtttgtgagattacggggtcttccattcgggtgtaccaaggaagaaatcgttcagttcttcagcggactcgagatcgtgccgaatgggataactctgcctgtggatcctgagggaaagatcaccggtgaggccttcgtccagttcgcgagccaggagctggctgagaaagcgcttggaaaacacaaggagcgcatcggacacaggtatattgaggtgttcaaatcttcccaggaggaagtgcgttcctactcggatccccctctgaagttcatgagtgtgcagcgcccagggccttatgatagaccgggaaccgcccgaaggtacattggaattgtgaaacaagccggattagagagaatgagacccggagcttacagcaccggatacggcggatatgaggagtattctggtctctctgatgggtacggctttacgacagaccttttcggaagggaccttagttattgcctgagtggtatgtacgaccataggtacggggatagtgagttcacagttcagtccactacaggccactgcgtacatatgcggggtctgccttacaaggctacggaaaatgacatatacaattttttttcccccctcaatccggttagggtgcatatcgagataggccctgacggaagagtcaccggtgaggccgatgtcgagtttgctactcacgaggaagctgtggcagcaatgtccaaagatagggcgaacatgcagcatcgatacatcgaattatttctgaatagcacaaccggcgcatctaacggggcatacagtagtcaagtcatgcaggggatgggtgtctccgctgcccaggctacttactccggccttgaatcccagagtgtctccggctgttacggggcaggatatagtggtcaaaattctatggggggttatgattag

SEQ ID NO: 38666 - DNA, 1248 bp, Artificial Sequence
  derived and/or modified sequence
atgatgcttggccctgagggcggtgagggcttcgtcgtgaagttgaggggcctgccatggagctgtagcgttgaggatgtgcagaattttctctccgactgcaccatccacgacggggcagctggggtccattttatttacacaagagaaggcagacagagcggtgaagcttttgttgaactggggtccgaagatgatgtgaaaatggcactgaagaaggacagggagagcatgggacatcgatacattgaggtgttcaaatcccatcggaccgaaatggactgggtgctcaaacattccggcccaaattctgcagacagcgctaacgatggcttcgtgcgtctgcgagggcttccattcggatgcacaaaagaagaaatagtgcagtttttttcaggattagagatcgttcccaacgggataactctccctgtcgacccagaagggaagatcaccggcgaggccttcgtccagtttgcctcccaagaattggctgagaaggctctggggaagcacaaagaacgcattggccaccggtacatagaggttttcaagtcgtctcaggaggaggtgagatcgtattccgaccctcccctgaagttcatgtcagtgcagcgaccaggaccatacgatcgccctggtaccgcaaggagatacatcgggatagtgaaacaggcagggctggagcggatgcgcccaggggcttactccactggctatggcggatacgaggaatactccggcctgagcgatggttacggatttaccacagatctgttcggacgggacctctcatattgcctgtcggggatgtacgatcataggtatggtgactctgaatttactgtccagtccactacaggccactgtgtgcatatgagaggcctaccgtacaaagcgaccgaaaacgacatctacaacttcttcagtccgctcaaccccgtacgggttcatattgaaattggaccggatggacgcgtaactggagaagctgacgttgaattcgccacccatgaggaagcagtggcggcaatgtctaaagatcgggcaaacatgcaacacagatacattgaacttttccttaatagtacgactggagcttcaaacggagcatacagtagccaagtgatgcaagggatgggcgtctctgccgctcaagcaacatactccgggctggaatcacagagcgtgagcggctgctacggtgcaggttacagcggccagaactctatggggggatatgactag

SEQ ID NO: 38667 - DNA, 1248 bp, Artificial Sequence
  derived and/or modified sequence
atgatgctggggcctgaaggtggagagggattcgtcgtgaagctgcgcggacttccatggagttgcagcgttgaagacgtacagaacttcctgtctgactgcaccatccatgacggcgcagctggagtgcactttatttacacccgagagggtaggcaatctggtgaagcattcgtagaacttggtagcgaggatgacgtcaagatggcccttaagaaagatagggagagcatgggccaccgttacattgaagtgtttaagagccaccggacagaaatggattgggttctaaagcattctggcccaaacagcgcagattcagcaaacgacggttttgtccgactgcggggactaccgtttggctgtacaaaggaagagatcgttcaattcttcagcggattggagattgtgcccaacggcatcaccttgccagttgaccctgaggggaagataaccggggaggcatttgtccagtttgccagtcaggaactcgctgagaaggccctcggcaagcacaaggagcgcatcggacatagatatatcgaggtgtttaaatccagccaggaagaagtacggtcgtactccgatcctccgctcaagttcatgtctgtccaaagacccggaccctatgaccgccctggtactgcacggaggtacataggcatcgttaagcaggccggactggaacggatgcggcctggggcttattccaccggatacggcggttacgaagaatatagcggcctgagcgatggctacggttttacaaccgaccttttcggcagggacctatcctactgtttgtcaggcatgtatgaccatcgatatggcgattcggaatttacagtacagtctactacggggcattgcgtgcatatgaggggattaccatacaaggcaacggaaaatgatatttacaacttcttttcccccctgaaccccgtgcgagttcatattgagattggtccggacggacgggtaacgggtgaggctgatgtggaattcgctacacatgaggaggcagtggccgctatgagcaaggaccgagctaatatgcagcaccggtacatcgaactgttcctgaatagcactacaggggcaagcaatggagcctatagtagtcaggtgatgcagggcatgggggtgtccgcagcccaggctacctattctggtctcgaaagccagtctgtgagtggttgctacggggcagggtactcagggcagaactctatgggaggttacgattag

SEQ ID NO: 38668 - DNA, 1248 bp, Artificial Sequence
  derived and/or modified sequence
atgatgctcggtcctgaaggcggtgagggcttcgtcgtaaagttaagaggcttaccctggagttgctccgtggaagatgtccaaaacttcctgagcgactgtaccatacatgatggcgctgcaggcgtgcatttcatttatacgagagagggaaggcagtccggggaggcattcgttgaactggggagcgaagacgatgtcaagatggccttgaaaaaagaccgggaatctatgggccataggtatatcgaagtgttcaaatctcaccggactgaaatggattgggttctgaaacattccggcccaaacagtgccgactctgccaatgacgggtttgtgagactccgcggtttaccgttcgggtgtactaaagaggagatagtgcagtttttctctgggctggaaattgtgcccaacggtattaccctgcctgtggatccagagggaaagatcaccggggaagccttcgttcagttcgcctcacaagaactggccgaaaaagccctcggaaaacataaggaaaggatcgggcacaggtatattgaggtatttaagtcctctcaggaagaagttcgctcttactcggatccccctctgaagttcatgagtgtgcaacggccaggcccttacgaccgtcccggtacagctcgccgatatatcggcattgtcaagcaggcagggcttgaacgcatgaggcctggcgcatatagcacagggtacggtggatacgaggagtacagcggactttccgatggatacgggtttactacagatctgttcggccgtgatctatcttattgcctcagtggaatgtacgaccaccgctatggcgacagtgaattcacagtgcagagcaccactggccactgtgtgcatatgaggggcctgccatacaaggctacagagaatgacatttacaattttttttctccccttaatcccgtgagagtgcatatcgaaatcggtcccgatggacgggtgaccggagaagccgatgtggaattcgctactcatgaggaggcggtggccgcaatgtcaaaagaccgcgcaaatatgcaacaccgatacatcgagctgttcttgaactcaactacgggcgcttctaacggagcgtattcaagccaggttatgcagggcatgggtgtaagcgcagcccaggccacatacagtggtctagaaagtcagtctgtttccggttgctacggggctgggtatagtggccaaaactccatgggcggatacgactag

SEQ ID NO: 38669 - DNA, 1017 bp, Artificial Sequence
  derived and/or modified sequence
atggggcatagatacattgaagtgttcaaatctcaccggacagaaatggactgggtcttgaaacactccgggccaaactccgcagatagtgcaaacgatggattcgtacgactgagggggcttccctttgggtgcacgaaagaggagatcgtccagttttttagcggactcgagatcgtaccaaatggcatcacattgcctgtagaccccgaagggaagatcaccggtgaagcttttgtgcaatttgcctcccaggagttggcagagaaggcgctggggaaacataaagagagaataggtcatagatatattgaagtctttaaatcgagccaggaagaggtcaggtcatacagcgatccaccccttaaattcatgtcagttcagcgcccaggaccatacgataggccgggaaccgcccgtcggtatattggcatcgtaaaacaagctggattggagcgtatgcggccaggcgcatattctaccgggtatggcggatacgaggagtatagcgggctcagcgacgggtatggatttaccacagacctctttggccgagatctgtcctattgtctgagcgggatgtacgatcatcgctacggggactccgaatttactgtacaatctacaactggccactgcgtgcatatgaggggccttccttataaagcaaccgagaacgacatttataatttcttttctccgctcaatcctgtgagagttcacattgagattggcccagatggcagagtgactggagaggccgacgtcgagtttgcaacgcacgaggaggcggtcgcagccatgtcgaaggatcgagctaacatgcaacacaggtacatcgagctttttttgaacagtacaacaggcgcttcaaatggtgcgtatagttcccaagtgatgcagggaatgggggtgagcgctgcacaggccacctacagtggactcgagagccagtctgtttctggctgctatggcgctggatacagtggtcagaatagcatgggcggatacgattag

SEQ ID NO: 38670 - DNA, 1248 bp, Artificial Sequence
  derived and/or modified sequence
atgatgctgggcccagaaggaggcgaggggttcgtggtcaaattacgaggactgccgtggtcatgtagcgtcgaggacgtgcagaacttcctgagcgactgcactattcatgacggagcggctggtgtgcattttatttacacgcgtgaaggtcggcagtccggggaagcgttcgtggaactgggcagtgaggacgacgtaaagatggccctgaaaaaggatcgtgagtctatgggccatagatacatcgaggtgtttaaaagccacagaaccgagatggactgggtgctgaaacactctggcccaaattcagcagattccgccaacgatggttttgtgcggttgagaggcttgcctttcggatgcacgaaagaggagatcgtgcagttcttcagcggcctcgagattgtgcctaacggcatcacgttgccagtcgacccagaaggaaagataactggagaagcattcgttcagtttgcttcccaagaacttgccgagaaggctctgggcaaacacaaagaaaggatcgggcaccggtacatcgaggttttcaaatctagtcaagaagaggtcaggtcctatagcgacccccctctcaagtttatgagcgttcagaggccagggccatacgataggcctggaacagcgagaaggtacatagggattgtgaagcaggcaggtctggagcgaatgaggcccggagcatacagcactggctatggtggttacgaggaatactcaggactctctgatggatatggatttactacagatctgtttgggcgagacctgtcctactgtttgagcggcatgtacgatcaccgatacggcgactccgagttcactgtccagtctaccaccggtcactgtgtgcatatgaggggcttgccgtacaaggcgacggagaacgatatctacaacttcttttcaccattaaatccagtccgggttcacatcgagatcggcccagacggtcgagtgactggtgaggctgacgtcgaattcgctacccatgaagaggcggtagccgctatgtctaaggatagggctaacatgcagcatcgctacattgagctgtttctcaattccactacaggcgcttccaacggtgcctatagttcccaggtgatgcaaggtatgggggtcagtgcggcacaagccacttactcgggcttagaatcccaatcagtgtcaggatgctatggagccggatatagcggccaaaatagcatgggcggatatgattag

SEQ ID NO: 38671 - DNA, 2755 bp, Artificial Sequence
  derived and/or modified sequence
cgccgctcgctccgccccccgcccggaagctcccgcccgagcccgcgcaggccctggggccgaccttcctgccgggccgggcggtccgaggctgctggagtgccgtgagcaggccgcgggaacgtcgccgtcaccttgtctcggggcctcggcgctgcttcccgccaaaacacgtttaccgcgcgcccgggcctcccaccttgcggaagggaccccaccaccacttggatttctgttgcaggttgagaacaaaaacatgcacctggagtttccccggagccctctgcgtggttgagcttcggtggaatttcggggctcttggctgccagccgcgcttgcctggtagcaacagaaaccagtcctgctcgcctccgtggacatttcattaccatccagaagtgtctcccactgaaggcatccgtggttgtttttaagccacaaaaaagccacacccaagatcacctgacacccaccctgacaagtgtccatgatgctgggccctgagggaggtgaaggctttgtggtcaagctccgtggcctgccctggtcctgctctgttgaggacgtgcagaacttcctctctgactgcacgattcatgatggggccgcaggtgtccatttcatctacactagagagggcaggcagagtggtgaggcttttgttgaacttggatcagaagatgatgtaaaaatggccctgaaaaaagacagggaaagcatgggacaccggtacattgaggtgttcaagtcccacagaaccgagatggattgggtgttgaagcacagtggtcccaacagtgccgacagcgccaacgatggcttcgtgcggcttcgaggactcccatttggatgcacaaaggaagaaattgttcagttcttctcagggttggaaattgtgccaaacgggatcacattgcctgtggaccccgaaggcaagattacaggggaagcgttcgtgcagtttgcctcgcaggagttagctgagaaggctctagggaaacacaaggagaggatagggcacaggtacattgaggtgtttaagagcagccaggaggaagttaggtcatactcagatccccctctgaagttcatgtccgtgcagcggccagggccctatgaccggcccgggactgccaggaggtacattggcatcgtgaagcaggcaggcctggaaaggatgaggcctggtgcctacagcacaggctacgggggctacgaggagtacagtggcctcagtgatggctacggcttcaccaccgacctgttcgggagagacctcagctactgtctctccggaatgtatgaccacagatacggcgacagtgagttcacagtgcagagcaccacaggccactgtgtccacatgaggggcctgccgtacaaagcgaccgagaacgacatttacaacttcttctctcctctcaaccctgtgagagtccatattgagattggcccagatggaagagtgacgggtgaagcagatgttgagtttgctactcatgaagaagctgtggcagctatgtccaaagacagggccaatatgcagcacagatatatagaactcttcttgaattcaacaacaggggccagcaatggggcgtatagcagccaggtgatgcaaggcatgggggtgtctgctgcccaggccacttacagtggcctggagagccagtcagtgagtggctgttacggggccggctacagtgggcagaacagcatgggtggctatgactagttttgttaggaacatttgagttacttcaatcattttcacaggcagccaacaagcaattaagagcagttataatagaggaagctgggggacccattttgcaccatgagtttgtgaaaaatctggattaaaaaattacctcttcagtgttttctcatgcaaaattttcttctagcatgtgataatgagtaaactaaaactattttcagcttttctcaattaacattttggtagtatacttcagagtgatgttatctaagtttaagtagtttaagtatgttaaatgtggatcttttacaccacatcacagtgaacacactggggagacgtgcttttttggaaaactcaaaggtgctagctccctgattcaaagaaatatttctcatgtttgttcattctagtttatattttcatttaaaatcctttaggttaagtttaagctttttaaaagttagttttgagaattgagacacaatactaatactgtaggaattggtgaggccttgacttaaaactttctttgtactgtgatttccttttgggtgtattttgctaagtgaaacttgttaaattttttgttaactaaatttttttcttaaaataaagactttttcacaatgactggcacagattactcagcaaaagatagcaaaacgggtggttgaagataattcattttaatcgtaatgtattttagtgtgaatttaaaaatttcatacatcaaatctatgatctcccttatattcttatgatgaggctaaataaaagtctaataaaaatgttaaatatgtgaatggtggaaatggtgactagcagcacacattctgggaagcatcaaatagacacacggccccagccacctgcaacttatgtgcactgttgtaaaccattcagaattttcctgctaggcccttgatgctggagtcacatctgttgatagctggagaactttagtttcaagtactacattgtgaaagcaattattttgtttctagtttttataaaatgctgatttaaactttt

SEQ ID NO: 38672 - DNA, 1758 bp, Artificial Sequence
  derived and/or modified sequence
cttgcgtccttccggctccgtcgtggaagcaggactgcgccgcgtcttcctcaaggttgagaacaaaaacatgcacctggagtttccccggagccctctgcgtggttgagcttcggtggaatttcggggctcttggctgccagccgcgcttgcctggtagcaacagaaaccagtcctgctcgcctccgtggacatttcattaccatccagaagtgtctcccactgaaggcatccgtggttgtttttaagccacaaaaaagccacacccaagatcacctgacacccaccctgacaagtgtccatgatgctgggccctgagggaggtgaaggctttgtggtcaagctccgtggcctgccctggtcctgctctgttgatgatgtaaaaatggccctgaaaaaagacagggaaagcatgggacaccggtacattgaggtgttcaagtcccacagaaccgagatggattgggtgttgaagcacagtggtcccaacagtgccgacagcgccaacgatggcttcgtgcggcttcgaggactcccatttggatgcacaaaggaagaaattgttcagttcttctcagggttggaaattgtgccaaacgggatcacattgcctgtggaccccgaaggcaagattacaggggaagcgttcgtgcagtttgcctcgcaggagttagctgagaaggctctagggaaacacaaggagaggatagggcacaggtacattgaggtgtttaagagcagccaggaggaagttaggtcatactcagatccccctctgaagttcatgtccgtgcagcggccagggccctatgaccggcccgggactgccaggaggtacattggcatcgtgaagcaggcaggcctggaaaggatgaggcctggtgcctacagcacaggctacgggggctacgaggagtacagtggcctcagtgatggctacggcttcaccaccgacctgttcgggagagacctcagctactgtctctccggaatgtatgaccacagatacggcgacagtgagttcacagtgcagagcaccacaggccactgtgtccacatgaggggcctgccgtacaaagcgaccgagaacgacatttacaacttcttctctcctctcaaccctgtgagagtccatattgagattggcccagatggaagagtgacgggtgaagcagatgttgagtttgctactcatgaagaagctgtggcagctatgtccaaagacagggccaatatgcagcacagatatatagaactcttcttgaattcaacaacaggggccagcaatggggcgtatagcagccaggtgatgcaaggcatgggggtgtctgctgcccaggccacttacagtggcctggagagccagtcagtgagtggctgttacggggccggctacagtgggcagaacagcatgggtggctatgactagttttgttaggaacatttgagttacttcaatcattttcacaggcagccaacaagcaattaagagcagttataatagaggaagctgggggacccattttgcaccatgagtttgtgaaaaatctggattaaaaaattacctcttcagtgttttctcatgcaaaattttcttctagcatgtgataatgagtaaactaaaactattttcagcttttctcaattaacattttggtagtatacttcagagtgatgttatctaagtttaagtagtttaagtatgttaaatgtggatcttttacaccacatcacagtgaacacactggggagacgtgc

SEQ ID NO: 38673 - DNA, 2676 bp, Artificial Sequence
  derived and/or modified sequence
acgcgtttcccattggtgacatcttggcgggcccggcaatggcacttcctcctctgcaccccgtgacccacgtccggctgccggtcttggatcacgaggcctccgcttcccggactccggaccccgcgcctcctcggggccgacgggccagtccctggcgtggttgagaacaaaaacatgcacctggagtttccccggagccctctgcgtggttgagcttcggtggaatttcggggctcttggctgccagccgcgcttgcctggtagcaacagaaaccagtcctgctcgcctccgtggacatttcattaccatccagaagtgtctcccactgaaggcatccgtggttgtttttaagccacaaaaaagccacacccaagatcacctgacacccaccctgacaagtgtccatgatgctgggccctgagggaggtgaaggctttgtggtcaagctccgtggcctgccctggtcctgctctgttgaggacgtgcagaacttcctctctgactgcacgattcatgatggggccgcaggtgtccatttcatctacactagagagggcaggcagagtggtgaggcttttgttgaacttggatcagaagatgatgtaaaaatggccctgaaaaaagacagggaaagcatgggacaccggtacattgaggtgttcaagtcccacagaaccgagatggattgggtgttgaagcacagtggtcccaacagtgccgacagcgccaacgatggcttcgtgcggcttcgaggactcccatttggatgcacaaaggaagaaattgttcagttcttctcagggttggaaattgtgccaaacgggatcacattgcctgtggaccccgaaggcaagattacaggggaagcgttcgtgcagtttgcctcgcaggagttagctgagaaggctctagggaaacacaaggagaggatagggcacaggtacattgaggtgtttaagagcagccaggaggaagttaggtcatactcagatccccctctgaagttcatgtccgtgcagcggccagggccctatgaccggcccgggactgccaggaggtacattggcatcgtgaagcaggcaggcctggaaaggatgaggcctggtgcctacagcacaggctacgggggctacgaggagtacagtggcctcagtgatggctacggcttcaccaccgacctgttcgggagagacctcagctactgtctctccggaatgtatgaccacagatacggcgacagtgagttcacagtgcagagcaccacaggccactgtgtccacatgaggggcctgccgtacaaagcgaccgagaacgacatttacaacttcttctctcctctcaaccctgtgagagtccatattgagattggcccagatggaagagtgacgggtgaagcagatgttgagtttgctactcatgaagaagctgtggcagctatgtccaaagacagggccaatatgcagcacagatatatagaactcttcttgaattcaacaacaggggccagcaatggggcgtatagcagccaggtgatgcaaggcatgggggtgtctgctgcccaggccacttacagtggcctggagagccagtcagtgagtggctgttacggggccggctacagtgggcagaacagcatgggtggctatgactagttttgttaggaacatttgagttacttcaatcattttcacaggcagccaacaagcaattaagagcagttataatagaggaagctgggggacccattttgcaccatgagtttgtgaaaaatctggattaaaaaattacctcttcagtgttttctcatgcaaaattttcttctagcatgtgataatgagtaaactaaaactattttcagcttttctcaattaacattttggtagtatacttcagagtgatgttatctaagtttaagtagtttaagtatgttaaatgtggatcttttacaccacatcacagtgaacacactggggagacgtgcttttttggaaaactcaaaggtgctagctccctgattcaaagaaatatttctcatgtttgttcattctagtttatattttcatttaaaatcctttaggttaagtttaagctttttaaaagttagttttgagaattgagacacaatactaatactgtaggaattggtgaggccttgacttaaaactttctttgtactgtgatttccttttgggtgtattttgctaagtgaaacttgttaaattttttgttaactaaatttttttcttaaaataaagactttttcacaatgactggcacagattactcagcaaaagatagcaaaacgggtggttgaagataattcattttaatcgtaatgtattttagtgtgaatttaaaaatttcatacatcaaatctatgatctcccttatattcttatgatgaggctaaataaaagtctaataaaaatgttaaatatgtgaatggtggaaatggtgactagcagcacacattctgggaagcatcaaatagacacacggccccagccacctgcaacttatgtgcactgttgtaaaccattcagaattttcctgctaggcccttgatgctggagtcacatctgttgatagctggagaactttagtttcaagtactacattgtgaaagcaattattttgtttctagtttttataaaatgctgatttaaactttt

SEQ ID NO: 38674 - protein, 781 aa, Artificial Sequence
  derived and/or modified sequence
MATQADLMELDMAMEPDRKAAVSHWQQQSYLDSGIHSGATTTAPSLSGKGNPEEEDVDTSQVLYEWEQGFSQSFTQEQVADIDGQYAMTRAQRVRAAMFPETLDEGMQIPSTQFDAAHPTNVQRLAEPSQMLKHAVVNLINYQDDAELATRAIPELTKLLNDEDQVVVNKAAVMVHQLSKKEASRHAIMRSPQMVSAIVRTMQNTNDVETARCTAGTLHNLSHHREGLLAIFKSGGIPALVKMLGSPVDSVLFYAITTLHNLLLHQEGAKMAVRLAGGLQKMVALLNKTNVKFLAITTDCLQILAYGNQESKLIILASGGPQALVNIMRTYTYEKLLWTTSRVLKVLSVCSSNKPAIVEAGGMQALGLHLTDPSQRLVQNCLWTLRNLSDAATKQEGMEGLLGTLVQLLGSDDINVVTCAAGILSNLTCNNYKNKMMVCQVGGIEALVRTVLRAGDREDITEPAICALRHLTSRHQEAEMAQNAVRLHYGLPVVVKLLHPPSHWPLIKATVGLIRNLALCPANHAPLREQGAIPRLVQLLVRAHQDTQRRTSMGGTQQQFVEGVRMEEIVEGCTGALHILARDVHNRIVIRGLNTIPLFVQLLYSPIENIQRVAAGVLCELAQDKEAAEAIEAEGATAPLTELLHSRNEGVATYAAAVLFRMSEDKPQDYKKRLSVELTSSLFRTEPMAWNETADLGLDIGAQGEPLGYRQDDPSYRSFHSGGYGQDALGMDPMMEHEMGGHHPGADYPVDGLPDLGHAQDLMDGLPPGDSNQLAWFDTDL

SEQ ID NO: 38675 - protein, 774 aa, Artificial Sequence
  derived and/or modified sequence
MELDMAMEPDRKAAVSHWQQQSYLDSGIHSGATTTAPSLSGKGNPEEEDVDTSQVLYEWEQGFSQSFTQEQVADIDGQYAMTRAQRVRAAMFPETLDEGMQIPSTQFDAAHPTNVQRLAEPSQMLKHAVVNLINYQDDAELATRAIPELTKLLNDEDQVVVNKAAVMVHQLSKKEASRHAIMRSPQMVSAIVRTMQNTNDVETARCTAGTLHNLSHHREGLLAIFKSGGIPALVKMLGSPVDSVLFYAITTLHNLLLHQEGAKMAVRLAGGLQKMVALLNKTNVKFLAITTDCLQILAYGNQESKLIILASGGPQALVNIMRTYTYEKLLWTTSRVLKVLSVCSSNKPAIVEAGGMQALGLHLTDPSQRLVQNCLWTLRNLSDAATKQEGMEGLLGTLVQLLGSDDINVVTCAAGILSNLTCNNYKNKMMVCQVGGIEALVRTVLRAGDREDITEPAICALRHLTSRHQEAEMAQNAVRLHYGLPVVVKLLHPPSHWPLIKATVGLIRNLALCPANHAPLREQGAIPRLVQLLVRAHQDTQRRTSMGGTQQQFVEGVRMEEIVEGCTGALHILARDVHNRIVIRGLNTIPLFVQLLYSPIENIQRVAAGVLCELAQDKEAAEAIEAEGATAPLTELLHSRNEGVATYAAAVLFRMSEDKPQDYKKRLSVELTSSLFRTEPMAWNETADLGLDIGAQGEPLGYRQDDPSYRSFHSGGYGQDALGMDPMMEHEMGGHHPGADYPVDGLPDLGHAQDLMDGLPPGDSNQLAWFDTDL

SEQ ID NO: 38676 - DNA, 3720 bp, Artificial Sequence
  derived and/or modified sequence
aggatacagcggcttctgcgcgacttataagagctccttgtgcggcgccattttaagcctctcggtctgtggcagcagcgttggcccggccccgggagcggagagcgaggggaggcggagacggaggaaggtctgaggagcagcttcagtccccgccgagccgccaccgcaggtcgaggacggtcggactcccgcggcgggaggagcctgttcccctgagggtatttgaagtataccatacaactgttttgaaaatccagcgtggacaatggctactcaagctgatttgatggagttggacatggccatggaaccagacagaaaagcggctgttagtcactggcagcaacagtcttacctggactctggaatccattctggtgccactaccacagctccttctctgagtggtaaaggcaatcctgaggaagaggatgtggatacctcccaagtcctgtatgagtgggaacagggattttctcagtccttcactcaagaacaagtagctgatattgatggacagtatgcaatgactcgagctcagagggtacgagctgctatgttccctgagacattagatgagggcatgcagatcccatctacacagtttgatgctgctcatcccactaatgtccagcgtttggctgaaccatcacagatgctgaaacatgcagttgtaaacttgattaactatcaagatgatgcagaacttgccacacgtgcaatccctgaactgacaaaactgctaaatgacgaggaccaggtggtggttaataaggctgcagttatggtccatcagctttctaaaaaggaagcttccagacacgctatcatgcgttctcctcagatggtgtctgctattgtacgtaccatgcagaatacaaatgatgtagaaacagctcgttgtaccgctgggaccttgcataacctttcccatcatcgtgagggcttactggccatctttaagtctggaggcattcctgccctggtgaaaatgcttggttcaccagtggattctgtgttgttttatgccattacaactctccacaaccttttattacatcaagaaggagctaaaatggcagtgcgtttagctggtgggctgcagaaaatggttgccttgctcaacaaaacaaatgttaaattcttggctattacgacagactgccttcaaattttagcttatggcaaccaagaaagcaagctcatcatactggctagtggtggaccccaagctttagtaaatataatgaggacctatacttacgaaaaactactgtggaccacaagcagagtgctgaaggtgctatctgtctgctctagtaataagccggctattgtagaagctggtggaatgcaagctttaggacttcacctgacagatccaagtcaacgtcttgttcagaactgtctttggactctcaggaatctttcagatgctgcaactaaacaggaagggatggaaggtctccttgggactcttgttcagcttctgggttcagatgatataaatgtggtcacctgtgcagctggaattctttctaacctcacttgcaataattataagaacaagatgatggtctgccaagtgggtggtatagaggctcttgtgcgtactgtccttcgggctggtgacagggaagacatcactgagcctgccatctgtgctcttcgtcatctgaccagccgacaccaagaagcagagatggcccagaatgcagttcgccttcactatggactaccagttgtggttaagctcttacacccaccatcccactggcctctgataaaggctactgttggattgattcgaaatcttgccctttgtcccgcaaatcatgcacctttgcgtgagcagggtgccattccacgactagttcagttgcttgttcgtgcacatcaggatacccagcgccgtacgtccatgggtgggacacagcagcaatttgtggagggggtccgcatggaagaaatagttgaaggttgtaccggagcccttcacatcctagctcgggatgttcacaaccgaattgttatcagaggactaaataccattccattgtttgtgcagctgctttattctcccattgaaaacatccaaagagtagctgcaggggtcctctgtgaacttgctcaggacaaggaagctgcagaagctattgaagctgagggagccacagctcctctgacagagttacttcactctaggaatgaaggtgtggcgacatatgcagctgctgttttgttccgaatgtctgaggacaagccacaagattacaagaaacggctttcagttgagctgaccagctctctcttcagaacagagccaatggcttggaatgagactgctgatcttggacttgatattggtgcccagggagaaccccttggatatcgccaggatgatcctagctatcgttcttttcactctggtggatatggccaggatgccttgggtatggaccccatgatggaacatgagatgggtggccaccaccctggtgctgactatccagttgatgggctgccagatctggggcatgcccaggacctcatggatgggctgcctccaggtgacagcaatcagctggcctggtttgatactgacctgtaaatcatcctttaggtaagaagttttaaaaagccagtttgggtaaaatacttttactctgcctacagaacttcagaaagacttggttggtagggtgggagtggtttaggctatttgtaaatctgccacaaaaacaggtatatactttgaaaggagatgtcttggaacattggaatgttctcagatttctggttgttatgtgatcatgtgtggaagttattaactttaatgttttttgccacagcttttgcaacttaatactcaaatgagtaacatttgctgttttaaacattaatagcagcctttctctctttatacagctgtattgtctgaacttgcattgtgattggcctgtagagttgctgagagggctcgaggggtgggctggtatctcagaaagtgcctgacacactaaccaagctgagtttcctatgggaacaattgaagtaaactttttgttctggtcctttttggtcgaggagtaacaatacaaatggattttgggagtgactcaagaagtgaagaatgcacaagaatggatcacaagatggaatttatcaaaccctagccttgcttgttaaatttttttttttttttttttaagaatatctgtaatggtactgactttgcttgctttgaagtagctctttttttttttttttttttttttttgcagtaactgttttttaagtctctcgtagtgttaagttatagtgaatactgctacagcaatttctaatttttaagaattgagtaatggtgtagaacactaattcataatcactctaattaattgtaatctgaataaagtgtaacaattgtgtagcctttttgtataaaatagacaaatagaaaatggtccaattagtttcctttttaatatgcttaaaataagcaggtggatctatttcatgtttttgatcaaaaactatttgggatatgtatgggtagggtaaatcagtaagaggtgttatttggaaccttgttttggacagtttaccagttgccttttatcccaaagttgttgtaacctgctgtgatacgatgcttcaagagaaaatgcggttataaaaaatggttcagaattaaacttttaattcattcgattg

SEQ ID NO: 38677 - DNA, 2346 bp, Artificial Sequence
  derived and/or modified sequence
atggctacacaggctgatctcatggaactggatatggccatggaacctgaccggaaggctgctgtgagccactggcagcagcagagctatctcgacagcggaatccactcaggggctaccacaacagctccatctctgtctggaaaagggaatcccgaggaagaggatgttgatacatctcaggtgctgtatgagtgggagcagggcttcagtcaatcgtttactcaggagcaggtcgcagacattgatgggcagtatgcaatgactagggcacagagggtgcgagctgcgatgtttcctgagacgctcgatgaagggatgcagatcccgagtacccagttcgacgctgcccaccctacaaacgttcagcgacttgccgaacccagtcagatgctcaagcacgccgtagttaacctcattaattaccaggacgacgcagaactcgccaccagagcaatacctgagttgacgaagctgttgaatgatgaagatcaagttgttgttaataaggccgctgttatggttcaccagctctcaaagaaagaggcctcacgacatgctataatgcgttccccccaaatggtgtccgccatagtacgtacaatgcaaaacaccaacgacgtggagacagcccggtgtaccgccggaacactccacaacctctcccatcacagagaggggcttctcgccatttttaagtctgggggcattcctgccttggttaaaatgctgggctcacccgtggactctgtgctgttttatgcaataacaacactgcacaacctcttgctgcaccaggagggcgccaagatggccgttcggctggctggaggacttcaaaagatggtggccttgctgaataagactaatgtcaagtttctcgcaataacaaccgattgcctccagatcttagcctatggaaatcaggaatccaagttaatcatcctggcaagcggagggccacaagcgctggtaaatattatgaggacatatacatatgagaaattgctatggacaacctcccgtgtcctcaaggtgctctcagtgtgtagctctaataagcctgccatcgtcgaggccggaggcatgcaggctctcgggcttcaccttacggacccctcacagaggctagtgcaaaattgtctttggactctgagaaatttgagtgacgccgctaccaagcaggagggtatggagggactgctaggaacactggtacagctgcttgggtctgatgacataaacgtggtcacatgtgctgcgggaatcctgtcaaacctgacctgtaacaactataagaacaaaatgatggtctgccaagtgggtggaatcgaagcactggtacggaccgttctacgggccggagatcgggaggacatcactgaaccagcgatttgtgccctgcgccatctgacaagccggcatcaggaggccgagatggcacagaatgccgtacggctgcactacggactgcccgttgtggtgaagctgctgcatcccccatcccattggcccttaatcaaagccaccgttggattgatcagaaacctggccttatgtccagcgaaccatgctccccttcgagaacaaggtgcgataccccgcctggtccagttgttggtaagggcccatcaggacactcaaaggcggacatctatgggaggtacacagcagcagtttgtcgagggggttaggatggaggagattgtggaaggttgtactggggcacttcatatcctagcccgggacgtgcacaacagaattgttatcagaggcctcaatactattccattgtttgtgcagctgctatattcgcccatcgaaaatatccaaagggttgcagccggggtcctgtgtgagttggctcaggacaaagaagcggcagaggctatcgaagcagagggcgctaccgctcccttgactgagctgttgcactccaggaacgagggggtggccacttacgcagctgctgtgctttttcgaatgtccgaggacaaacctcaggattataaaaagaggctgagcgtggagcttacttcctccttatttaggacggagcccatggcttggaatgagaccgctgaccttgggctcgacatcggggcacaaggcgaaccccttggctacagacaggatgacccttcatacagatctttccattctggaggatacggccaagacgccctcggaatggaccctatgatggagcacgagatgggggggcaccacccaggggccgactaccccgtagacggtttacctgatctaggtcatgcccaggacctcatggatggcctaccacccggggactcaaaccaactggcgtggtttgacaccgacctgtag

SEQ ID NO: 38678 - DNA, 2346 bp, Artificial Sequence
  derived and/or modified sequence
atggctactcaggcagacctgatggaacttgatatggccatggagcccgaccgtaaagccgccgtgtcacactggcagcagcaaagctaccttgattccggaattcactccggcgccaccacaactgctccctccctttccgggaaggggaatcctgaggaagaggacgtggatacgtctcaggtgctttatgagtgggagcagggcttcagccagtctttcacgcaggagcaagtcgccgatatagacggacagtacgctatgactcgagcccaaagagtccgggctgctatgttcccagagactcttgacgagggaatgcagatcccttctacccagttcgatgccgcacacccaaccaacgttcaaaggttagctgagcccagtcagatgctcaagcacgcagtcgtgaacttgatcaattatcaagatgacgctgagctggccacacgagcgataccggagctgactaaactgctgaatgatgaagaccaggtcgtggtgaataaggcggccgtgatggttcaccagctgtcaaaaaaagaagccagccgccacgctataatgcgcagcccccagatggtcagtgcaatagttagaactatgcagaatactaacgacgtggagaccgctcgctgtaccgctggaaccctgcataacttatcccaccacagggaaggccttctggctattttcaaatctggtggcattccagcccttgtcaagatgctgggttcgcccgtcgactccgttctgttctacgcgattaccacattacacaatttgttgcttcaccaggaaggcgctaagatggcagtcaggcttgctgggggtcttcaaaagatggtggctttgctgaataagactaatgtgaagttcttggctattaccacggactgtctgcagattctggcttacggtaatcaggagtccaagctcattatactggcaagtggaggcccccaagcgcttgtaaatatcatgcggacttatacttatgaaaaactactgtggacaactagtagggttcttaaagttctgtcagtgtgcagtagcaacaagccagccatcgtggaagcgggaggtatgcaggcccttggattgcacctaactgatcctagtcagcgtctggtgcagaattgcttgtggactctgcggaatctgtccgatgctgccaccaagcaggagggtatggagggccttttgggaacgctagtgcagcttcttggctctgacgacatcaacgtggttacgtgcgcggcagggatcctctccaacctcacttgtaacaactataaaaataaaatgatggtttgccaggtgggaggtattgaggccttggtgagaaccgtgttgcgggctggcgatcgcgaagacattacagagccagctatctgtgccctgaggcatctcacttctaggcaccaggaggcagaaatggcacagaacgccgtgagactgcattacggactgccggtagtcgtcaaactgctgcatcccccttcgcactggcctctgataaaagctaccgtgggcctcatcaggaacctggcattgtgtcccgccaatcacgctcctctaagggaacaaggcgccatcccgagattggtgcaactcctcgtgcgcgcgcaccaagatacgcagcggagaacctccatgggcggcacacaacagcagttcgtggagggggtgagaatggaggagatagtagaagggtgcaccggggctctgcatatcctagccagggacgtgcacaataggatcgtgatccgtggtctcaacaccattcctctgttcgttcagctgctctatagccccatcgagaacatccagagggtcgcagccggggtgctttgcgagcttgcacaggataaggaagccgctgaagccatagaggctgaaggtgcgactgctcccctgacagaattgttgcactcccgcaacgaaggcgttgctacgtacgctgcagctgtgctcttcaggatgagtgaagataaacctcaggattataaaaaaagactgtctgttgagctgactagctcactgttcagaacagagccgatggcctggaacgagacagccgatttaggcctggacattggggcacagggggagcctctgggatatcgccaggacgacccttcatatcgtagtttccattctggtggctatggccaggatgccctgggtatggatccaatgatggagcacgaaatgggaggtcatcatcccggggccgattatcccgtggatgggctccccgatctcggtcatgcccaggatctgatggatgggctcccgcccggtgactctaatcagctggcttggtttgataccgacctctag

SEQ ID NO: 38679 - DNA, 2346 bp, Artificial Sequence
  derived and/or modified sequence
atggctactcaggcagatctgatggaactggatatggctatggaacctgataggaaagcggctgtctcccactggcaacaacaatcttatcttgactccgggatccattcgggtgccactactacagctcccagtctttctggcaagggaaaccccgaggaggaggacgtagacacctctcaggtgctttacgagtgggaacaggggtttagtcagagttttacccaggaacaggtcgccgacatcgatggccagtacgcgatgactcgggcccagagagtgcgagctgccatgttccctgagacccttgatgagggaatgcagattcccagtacccagttcgacgccgcccatcctacaaatgtgcaacgcctggccgagccatctcagatgctcaaacacgcagtggtaaacctcatcaattatcaggatgatgcagagctcgccacccgggccatacctgaattgacaaaattgttgaacgacgaagatcaagtcgtcgttaataaagcggctgtgatggtgcaccagctgtccaaaaaagaggccagcaggcatgcgatcatgcgaagcccacagatggtatcagcgatcgtacgtactatgcagaacacaaacgatgtggagactgccaggtgtaccgccggcaccctgcacaatctgagccaccaccgcgaaggactcctggccatcttcaagagtgggggtatcccggctctggtgaaaatgctcggctcccctgtggattctgtgctcttctacgctatcaccactctgcacaatctgcttctccatcaagaaggggcgaagatggcagtgcgacttgccggcgggctgcaaaaaatggtcgctctacttaataaaacgaatgtcaagtttctggccattacaactgactgccttcagatcttagcatatggaaatcaggaatccaaactgataattcttgcttcgggcggaccgcaggcgcttgtaaatatcatgcgcacctatacttacgagaaactactttggactaccagtagagtgctcaaggtgttgtccgtttgttcttcaaataagcctgcaatcgtcgaggccggaggcatgcaggcacttggactgcaccttacggacccctcacagagactggtccagaattgcttatggacacttcgaaatctgagcgatgccgcaactaaacaggaggggatggagggcctgttgggaacactggtgcagctgcttggatccgatgatatcaatgtcgtaacctgtgccgccggaatcctaagcaaccttacatgcaacaactacaagaataagatgatggtttgccaggtgggcggcatagaggccttggttcgcacagtgctcagagccggcgaccgcgaagatatcaccgaacccgccatctgcgcacttcggcaccttaccagcaggcaccaggaagcagaaatggcccaaaacgctgtgcggctgcactatggcctgcccgtcgttgtcaaacttctgcatccgccttcccactggcccctgatcaaagctaccgtcgggttgatccgcaatctggctctgtgtccagccaatcatgcccctctgagagagcaaggagctataccccggctggtgcaactgctggtgagagcccatcaggacacccagcggcggacatccatgggagggacccagcagcaatttgtcgaaggtgtgagaatggaggagatcgtcgaaggttgtactggcgcccttcacattttagcaagggacgtacataacagaatcgtgattaggggtctgaatactattcccctcttcgtgcagctcctgtatagccctatagaaaacatccagagagtggcagcaggggtgttgtgtgagttggcgcaggataaagaagctgcggaggccatcgaggctgagggcgctaccgctcccctgactgagctgctgcattccagaaatgaaggcgttgccacctacgctgccgcggtgctctttcggatgtcagaagacaagcctcaggattacaaaaagcggctcagtgtggaacttacgtcgagcttatttcgcactgaacctatggcttggaacgagacagctgacctaggattggatatcggcgctcagggggagcccctgggttataggcaggacgatcctagctaccgaagctttcatagcggcgggtacggacaggacgccttaggaatggacccaatgatggaacatgagatgggtggacaccaccccggagcagactatccagtggatggcttgccggacctgggacacgctcaagacctaatggacggcctacccccaggcgactccaatcaattggcttggtttgacacggacttgtag

SEQ ID NO: 38680 - DNA, 2346 bp, Artificial Sequence
  derived and/or modified sequence
atggctactcaggcagatcttatggaattggatatggcgatggaaccagaccggaaggctgcagtgtcccactggcaacagcagtcatacctggattccggcattcactctggcgccactacgacggcccccagtctgagtggcaaaggaaacccagaagaggaggatgttgacacctcacaggttctgtacgagtgggagcaggggttttcacaatccttcactcaagagcaagtggctgacatagatgggcaatatgcaatgacacgcgcacagcgggtccgcgctgctatgtttcctgagactttggatgagggcatgcaaatccccagtacccaatttgacgccgcccatcccacgaatgtccaaaggctggcagagccttcacagatgctgaagcacgcagtggtgaatcttataaactaccaggacgacgctgagctggccacaagagctattcccgagctgaccaaactcctcaacgacgaggaccaggtggtcgtcaacaaggcagctgtcatggtgcaccaactaagcaaaaaggaggctagccgtcacgctataatgagatcgccacaaatggtctcggcaattgtaagaacgatgcagaatacaaacgacgtggagactgcaagatgcaccgcgggcaccctccataacttatcacaccaccgggagggactccttgctatatttaaatcaggtggcatccctgcgctagtgaagatgctcggcagtcctgttgacagtgtccttttctacgcaataactaccctccacaaccttttgctgcatcaggagggggctaaaatggccgtccgtctcgccggcggcctgcagaagatggtagccttgctcaacaagaccaatgttaaatttctggctatcaccaccgactgcctgcagattctcgcttacggaaatcaggagtccaagctcataattttggcaagcggcggaccacaggcactcgtcaatataatgaggacctatacctacgagaagctgctctggactacctctagggtgctgaaggtactcagcgtctgcagcagtaacaaacccgctatcgtggaagctgggggcatgcaggcacttggactgcatttaacagacccgagtcaacgcttggttcaaaattgcctctggaccctcagaaatctgagcgacgcagcaactaaacaggagggcatggagggcttgctcggtactctggttcagcttctgggcagcgatgatataaacgtagtcacttgcgcagctgggattcttagcaatctaacttgcaataattacaaaaataagatgatggtatgccaagtgggaggtattgaagccctcgtacgtacagtcctccgggcaggggatcgtgaggatatcaccgagccagcaatttgcgccctcaggcacctaactagtcgccatcaagaggccgagatggcccagaatgcggtcagactgcattacggtctgccagtggttgtgaagcttctccacccaccttctcattggcctttaatcaaggccaccgtcggacttatcaggaacctcgccctctgcccggctaatcatgctcccctgcgagaacagggggcgatcccccgactggtgcagctgctcgttagagctcaccaggacacccagaggcgaacctccatgggcggtacccagcagcagtttgtggaaggtgttaggatggaggagatagtagaggggtgcaccggcgccctccatatactcgccagagatgtgcataatcgtatcgtgattagagggctgaatacgattccactgtttgtgcagctcttgtattcacccatagagaacatacaaagagtggctgcgggagtgctgtgtgagctcgcccaggataaggaagctgctgaggcaattgaggcagagggagctaccgctcctctgactgagctgctccacagccgtaacgaaggcgtggctacctatgccgccgccgtcctgtttcgcatgtcagaagacaaaccacaagactacaagaaacggctttcagtcgagttgacctcctctctctttaggactgagcccatggcttggaatgaaacagccgatcttggtcttgacattggtgcgcagggggagccgctgggttacagacaagacgaccctagctaccggtcttttcattccggcggatacggacaagacgctttaggtatggatcccatgatggagcatgagatgggggggcaccaccctggtgcggattacccagtggatggactccccgacttgggacacgcccaggaccttatggatggacttcctcccggagactccaaccagctcgcatggttcgacacagacctgtag

SEQ ID NO: 38681 - DNA, 42 bp, Artificial Sequence
  derived and/or modified sequence
atggctacccaggccgacctgatggagctagacatggcgtag

SEQ ID NO: 38682 - DNA, 2325 bp, Artificial Sequence
  derived and/or modified sequence
atggaattggacatggccatggaaccagatcgcaaagccgccgtttcccattggcagcaacagtcctatctggacagtggcattcacagcggtgccacgacaactgcgccttcgctgtcagggaagggcaatcccgaggaggaagacgtggacacctcccaggtattgtacgaatgggagcagggattctctcagtcttttacacaggaacaagtggcagatatcgacggccaatacgcgatgacacgggcgcaaagggtgcgggccgctatgttcccagagacactcgacgaaggtatgcaaattcccagtacacagttcgatgcagctcacccaacaaacgttcagagactcgccgagccctctcaaatgcttaagcacgcagtggtcaaccttatcaactatcaggacgatgcggagctagcaactcgggcgatcccagaactgaccaagctcttgaacgatgaggaccaagtggttgtcaataaggccgcagtgatggtgcatcaactttcaaaaaaggaagcctctcgccacgccatcatgcgttccccccagatggttagcgccatcgtacgcaccatgcagaacactaatgatgtggagactgcaagatgcaccgccggaaccctccacaacctgtcccaccacagggaggggctgctagccatatttaagtctgggggtattcctgcccttgttaagatgctcggaagtcccgttgactcagttctcttctatgccataactactcttcacaatcttcttctgcatcaagagggagccaaaatggcagtgcgtctcgcaggagggttgcagaagatggtcgccctgttaaacaaaactaacgttaagttcctcgcaatcactaccgattgcctgcagatattagcctacgggaatcaagaaagcaagctaatcattctcgcttcgggcgggcctcaggcactagtcaacatcatgcggacatatacctatgagaagctcctgtggactacgtccagagtactgaaagtgctgagcgtttgctcctctaataaacctgctatcgtggaagctggcggcatgcaagcactcggcctccacttgactgatccttcccagaggcttgtgcagaactgcctttggacactgcgtaatctgtccgatgccgccaccaagcaggaagggatggaagggcttcttggcactttagtgcagttgctcgggagtgacgatatcaacgtggtgacgtgtgctgctgggattctctccaacttgacgtgcaataactacaaaaataagatgatggtttgtcaggttggcggcatcgaggctctcgtgaggaccgtgctccgcgcaggcgacagggaggatatcaccgagcctgctatctgtgcactgcgtcacctcacctccagacatcaggaggcagaaatggcccaaaacgctgtcaggcttcattatggactgcccgtcgttgtgaaactgctccacccacctagtcactggcccctgattaaagccactgtagggctcatccgaaaccttgctctgtgcccagcaaaccacgcgccactgagagagcagggggccattcctagactagtccagttgctggtcagggcacatcaagatactcaaagacggacctctatgggcggcacacagcagcagtttgtggagggcgtaagaatggaggagattgtggaggggtgcacgggcgctttgcacattttggcacgtgacgtgcataacagaattgtgattcggggcctgaacacgatcccccttttcgtgcagctgctttactcgcctatcgaaaacatccagagggtagccgccggcgttctgtgcgaactggcacaggacaaagaggccgctgaggccatagaggcagagggggccaccgctcctttgacagaactcctccactcacgaaacgaaggcgtggcaacctatgccgccgctgtcctgttccgcatgtcagaggacaagccccaggactacaagaagagactcagcgtagaactgacatcctccctgttccgtaccgaacccatggcatggaatgagacggcagatctcggtctggacataggggcccagggcgaaccactggggtatcgacaggatgacccatcttaccgaagcttccatagcgggggctacggtcaggatgcgctcggcatggatccgatgatggagcacgagatggggggccatcatccgggagccgactaccccgttgacgggttacctgatctgggtcacgcccaggacctaatggatggactgccccccggggattccaaccagctcgcctggtttgacacagacctgtag

SEQ ID NO: 38683 - DNA, 2346 bp, Artificial Sequence
  derived and/or modified sequence
atggccacccaggccgacctgatggagctggacatggccatggagccagacaggaaggctgctgtgagccactggcagcagcagagctacctggacagcggcatccacagcggggccaccaccacagcccccagcctgtctggaaaaggaaatcctgaggaggaggatgtggacaccagccaggtgctgtatgagtgggagcagggcttcagccagagcttcacccaggagcaggtggccgacattgatggccagtatgccatgacccgggcccagagggtgcgggccgccatgtttcctgagaccctggatgagggcatgcagatccccagcacccagtttgatgctgcccaccccaccaacgtgcagaggctggccgagcccagccagatgctgaagcatgctgtggtgaacctgatcaactaccaggatgatgctgagctggccacccgggccatccctgagctgaccaagctgctgaatgatgaggaccaggtggtggtgaacaaggctgctgtgatggtgcaccagctgagcaagaaggaggccagcagacatgccatcatgaggagcccccagatggtgtctgccatcgtgaggaccatgcagaacaccaatgatgtggagacagcccgctgcacagctggcaccctgcacaacctgagccaccaccgggagggcctgctggccatcttcaagagcggcggcatcccagccctggtgaagatgctgggcagccctgtggacagcgtgctcttctacgccatcaccaccctgcacaacctgctgctgcaccaggagggcgccaagatggctgtgcggctggccggcggcctgcagaagatggtggccctgctgaacaagaccaacgtgaagttcctggccatcaccacagactgcctgcagatcctggcctacggcaaccaggagagcaagctgatcatcctggccagcggcggcccccaggccctggtgaacatcatgaggacctacacctatgagaagctgctgtggaccaccagccgggtgctgaaggtgctgtctgtgtgcagcagcaacaagccagccatcgtggaggccggcggcatgcaggccctgggcctgcacctgacagaccccagccagaggctggtgcagaactgcctgtggaccctgaggaacctgagtgatgctgccaccaagcaggagggcatggagggcctgctgggcaccctggtgcagctgctgggcagtgatgacatcaacgtggtgacctgtgccgccggcatcctgagcaacctgacctgcaacaactacaagaacaagatgatggtgtgccaggtgggcggcatcgaggccctggtgaggacagtgctgcgggccggggaccgggaggacatcacagagcccgccatctgtgccctgcggcacctgaccagccgccaccaggaggccgagatggcccagaatgctgtgcggctgcactacggcctgcctgtggtggtgaagctgctgcacccccccagccactggcccctcatcaaggccaccgtgggcctcatccggaacctggccctgtgcccagccaaccacgcccccctgcgggagcagggcgccatcccccggctggtgcagctgctggtgcgggcccaccaggacacccagaggaggacctccatgggcggcacccagcagcagtttgtggagggcgtgaggatggaggagatcgtggagggctgcaccggggccctgcacatcctggccagagatgtgcacaaccgcatcgtcatccggggcctgaacaccatccccctgtttgtgcagctgctgtacagccccatcgagaacatccagagggtggccgccggcgtgctgtgtgagctggcccaggacaaggaggccgctgaggccattgaagctgagggcgccacagcccccctgacagagctgctgcacagcagaaatgaaggagtggccacctatgctgctgctgtgctcttcaggatgtctgaggacaagccccaggactacaagaagaggctgtctgtggagctgaccagcagcctcttcagaacagagcccatggcctggaatgaaacagctgacctgggcctggacatcggggcccagggcgagcccctgggctaccggcaggatgaccccagctaccgctccttccacagcggcggctacggccaggatgccctgggcatggaccccatgatggagcacgagatgggcggccaccaccctggagctgactaccctgtggatggcctgcctgacctgggccacgcccaggacctgatggatggcctgcccccaggggacagcaaccagctggcctggtttgacacagacctgtag

SEQ ID NO: 38684 - DNA, 2325 bp, Artificial Sequence
  derived and/or modified sequence
atggagctggacatggccatggagccagacaggaaggctgctgtgagccactggcagcagcagagctacctggacagcggcatccacagcggggccaccaccacagcccccagcctgagcggcaagggcaaccctgaggaggaggatgtggacaccagccaggtgctgtatgagtgggagcagggcttcagccagagcttcacccaggagcaggtggccgacattgatggccagtatgccatgacccgggcccagagggtgcgggccgccatgtttcctgagaccctggatgagggcatgcagatccccagcacccagtttgatgctgcccaccccaccaacgtgcagaggctggccgagcccagccagatgctgaagcatgctgtggtgaacctgatcaactaccaggatgatgctgagctggccacccgggccatccctgagctgaccaagctgctgaatgatgaggaccaggtggtggtgaacaaggctgctgtgatggtgcaccagctgagcaagaaggaggccagcagacatgccatcatgaggagcccccagatggtgtctgccatcgtgaggaccatgcagaacaccaatgatgtggagacagcccgctgcacagctggcaccctgcacaacctgagccaccaccgggagggcctgctggccatcttcaagagcggcggcatcccagccctggtgaagatgctgggcagccctgtggacagcgtgctcttctacgccatcaccaccctgcacaacctgctgctgcaccaggagggcgccaagatggctgtgcggctggccggcggcctgcagaagatggtggccctgctgaacaagaccaacgtgaagttcctggccatcaccacagactgcctgcagatcctggcctacggcaaccaggagagcaagctgatcatcctggccagcggcggcccccaggccctggtgaacatcatgaggacctacacctatgagaagctgctgtggaccaccagccgggtgctgaaggtgctgtctgtgtgcagcagcaacaagccagccatcgtggaggccggcggcatgcaggccctgggcctgcacctgacagaccccagccagaggctggtgcagaactgcctgtggaccctgaggaacctgagtgatgctgccaccaagcaggagggcatggagggcctgctgggcaccctggtgcagctgctgggcagtgatgacatcaacgtggtgacctgtgccgccggcatcctgagcaacctgacctgcaacaactacaagaacaagatgatggtgtgccaggtgggcggcatcgaggccctggtgaggacagtgctgcgggccggggaccgggaggacatcacagagcccgccatctgtgccctgcggcacctgaccagccgccaccaggaggccgagatggcccagaatgctgtgcggctgcactacggcctgcctgtggtggtgaagctgctgcacccccccagccactggcccctcatcaaggccaccgtgggcctcatccggaacctggccctgtgcccagccaaccacgcccccctgcgggagcagggcgccatcccccggctggtgcagctgctggtgcgggcccaccaggacacccagaggaggacctccatgggcggcacccagcagcagtttgtggagggcgtgaggatggaggagatcgtggagggctgcacaggagccctgcacatcctggccagagatgtgcacaacagaattgtcatccggggcctgaacaccatccccctgtttgtgcagctgctgtacagccccatcgagaacatccagagggtggccgccggcgtgctgtgtgagctggcccaggacaaggaggccgctgaggccatcgaggccgagggcgccacagcccccctgacagagctgctgcacagcagaaatgaaggagtggccacctacgccgctgctgtgctcttcaggatgtctgaggacaagccccaggactacaagaagaggctgtctgtggagctgaccagcagcctcttcagaacagagcccatggcctggaatgaaacagctgacctgggcctggacattggagcccagggcgagcccctgggctaccggcaggatgaccccagctaccgctccttccacagcggcggctacggccaggatgccctgggcatggaccccatgatggagcacgagatgggcggccaccaccctggagctgactaccctgtggatggcctgcctgacctgggccacgcccaggacctgatggatggcctgcccccaggggacagcaaccagctggcctggtttgacacagacctgtag

SEQ ID NO: 38685 - DNA, 2346 bp, Artificial Sequence
  derived and/or modified sequence
atggccacccaggccgacctgatggagctggacatggccatggagcctgatagaaaagctgctgttagccactggcaacagcagtcttatttggattcggggatccactcaggggccacaaccacagcaccaagcctttctggaaagggcaatcctgaagaagaagatgttgacacttcacaggttctgtatgagtgggagcagggcttttcacagagttttactcaggagcaggtggccgacatcgacggccaatatgccatgacaagagcacagcgggttagggctgcaatgtttccagaaacgctagatgagggaatgcagattccttcaactcagttcgatgccgcccacccaacaaacgtccagagactggccgagccttctcagatgctgaagcatgcagtggtgaatctgatcaattaccaggacgacgctgaactggccacaagggctattcccgagctgacaaagctactgaacgacgaagaccaggtggtcgtcaataaggccgccgtcatggtgcaccagcttagcaagaaagaggccagccgacacgctattatgaggtctccccagatggtaagcgctatcgtaagaaccatgcagaacaccaacgacgtggaaactgctcgttgcactgcaggaactctgcacaatctgtctcaccacagggaaggcctgttagctattttcaagtcaggggggattccagcactggttaagatgctgggatcacctgttgactcagtgcttttttacgctattaccactttacacaatctgctgttacatcaagaaggggcaaaaatggcggtgagactggcaggaggcttgcagaaaatggttgccctgttgaataaaaccaatgtcaaatttcttgcaatcaccaccgactgtctccagatcttagcctatggcaaccaggaatccaagctgattatactggcctcaggcgggcctcaggccctggtaaacatcatgagaacctacacttatgagaagcttctctggacaaccagcagagtactaaaagtgttgtcagtctgtagtagcaataagcctgctatagtagaagcgggcgggatgcaggcacttggactgcacctaacagatccaagccaaaggctggtccagaattgcttgtggacgctgagaaacctgtccgacgctgccaccaaacaggagggaatggaagggctactgggtactctcgtccagctgctgggcagtgatgatattaatgtggttacctgcgccgccggaattctcagcaacttgacctgtaacaactacaagaataagatgatggtttgtcaggtcggcggtattgaggcattggtgcgtacagtccttcgggctggtgatagggaagatattactgagccagctatttgcgccctgcgccacctaacttcccggcaccaggaggcagagatggcccagaacgcagtgcgattacactacggactcccagtagtagtgaagctgctgcatcctccttctcattggcctcttatcaaagctaccgtgggtctgatcagaaacttagccctttgccctgcaaatcacgccccattgagggagcagggtgcgattccccgtctggttcagctgcttgtccgagcgcaccaggatactcagcgtcgcacctcgatgggcgggacacagcaacaatttgtggaaggggttcgcatggaggaaatcgttgagggctgcacaggcgcccttcatatcctggccagagatgtgcacaacagaattgtgatccgtgggctcaatacaatcccactcttcgtacaactgttgtattccccaatcgagaacatccagcgcgtggctgccggcgttctgtgcgaactggcccaggataaggaggctgcagaagcaatagaggccgagggcgccaccgccccactgacagaactcctccatagtcggaacgagggcgtcgccacctatgccgccgctgtgctgttcaggatgagcgaagataaaccacaggactacaagaaacgattatctgtcgagctgacttcctcactcttccgcaccgaacccatggcctggaacgaaacagccgacttaggcttagatataggggcgcagggcgaacctctgggctataggcaggatgatcccagctatcgatcgttccacagcggcggctatggccaggacgcccttggaatggacccaatgatggaacatgagatgggcggtcatcatcctggagccgattatcccgtggacggactaccagacttgggccacgcccaggacttaatggatgggctccctccgggcgactctaaccagctagcttggttcgataccgacctatag

SEQ ID NO: 38686 - DNA, 2346 bp, Artificial Sequence
  derived and/or modified sequence
atggccacccaggccgacctgatggagctggacatggccatggagccggacaggaaagcagctgtgagccattggcagcaacagtcatatttagatagcggaatccactcaggggctaccaccactgcaccatctttgtcgggcaaggggaatccagaggaggaagacgtggacacttcccaggtactttacgaatgggaacaaggattttcccagtcattcactcaggagcaggtggcggatatagacggacagtatgcgatgaccagagcccagagagtccgagctgctatgtttccagagacgctggacgagggaatgcagatcccctccacccagttcgacgcagcccaccccaccaatgtgcagagactggccgagccttctcagatgctcaaacacgccgtggtgaatctgatcaattaccaggatgacgccgaactagcaacaagagctattcccgagctcaccaaactgttaaacgacgaagatcaggtagtggtcaataaagctgctgtcatggttcatcagctgtctaagaaggaggcatcaaggcacgcaattatgagaagtcctcagatggtgtccgctattgttcgcaccatgcaaaacactaacgacgtcgagactgccagatgtacggccggaaccctccataacctatcccatcacagagaggggttattggccattttcaagagcggcggtatcccagcacttgtaaagatgctgggaagcccagtcgatagtgttcttttctatgccatcacaacactgcacaacttacttctgcaccaggaaggagctaaaatggctgtgaggttggccgggggactgcagaaaatggtggctctgttgaacaagacaaacgtgaaattcctcgccatcacaaccgactgtctgcagattctggcatacgggaaccaggagtccaagctgattatcttggccagcggcgggcctcaggcactcgtgaatataatgaggacctatacatatgagaaactgctgtggactacatcccgtgtcctaaaggtcctatctgtctgcagcagtaacaaacccgcgatagtggaagctggcggcatgcaggcccttgggcttcatctgaccgaccccagtcaaaggcttgtgcagaactgtctttggactctaaggaacctgtcggacgcagccaccaaacaggagggaatggagggtctgctcgggaccctggttcaactgttaggctctgatgacattaacgtggtgacctgtgccgctggtatcttgtcgaatcttacctgcaataactacaagaacaagatgatggtatgccaggtgggggggattgaggccctggttcgcaccgtcctgcgagccggtgatagggaggacattaccgaacccgctatctgcgcattaagacaccttacgtcaaggcaccaggaggctgagatggctcagaacgcggtgaggttgcattatggtctccccgtcgtagtaaagcttcttcatcccccaagtcactggccccttattaaggccacagtaggactaattcgtaatttggctctttgtccagctaaccacgctcccttaagggagcaaggcgccataccaaggctagtgcaactgctggtgcgtgcccaccaggatactcagcgccgcacctcaatggggggtacccagcaacagttcgtcgaaggcgtgagaatggaggaaatcgtggagggttgtacaggagccctgcacatcctggccagagacgttcacaatcgtatcgtgatcaggggcctcaatactatccccttatttgtgcagctgctgtattctccgatcgagaacatccagcgcgtggccgcaggtgtcttatgtgagttagcacaggacaaagaggctgctgaagccatcgaagcagaaggcgcaaccgctcccttgaccgaattactgcactcacggaatgagggagtggcaacatacgccgctgccgtgctgtttcgaatgtctgaagacaagccccaggactataaaaagaggctaagcgtggagctgacctcttcgctcttcaggaccgagccaatggcctggaacgaaacagcagatcttggcctggatattggagctcagggcgagcccctgggttacaggcaggatgatccttcctatcgctcttttcactctggcggatatggacaggacgcgttaggaatggatcctatgatggaacacgaaatgggcggccaccaccccggtgctgattacccagttgatggtctcccggacctcggacacgcacaggacctgatggatgggctaccccctggggactcaaatcagttagcctggtttgatactgatctgtag

SEQ ID NO: 38687 - DNA, 2346 bp, Artificial Sequence
  derived and/or modified sequence
atggccacccaggccgacctgatggagctggacatggccatggagcctgataggaaagctgcagtgtcgcactggcagcaacagagctatctggacagtggcatccatagcggcgccactacaaccgccccgtctctgagcgggaagggtaaccccgaggaagaggatgtcgataccagccaggtcttatacgaatgggaacagggctttagtcagtcctttacgcaggaacaagtggctgacatcgatggacagtacgcaatgactcgggcacaaagggtccgcgcagccatgtttcccgaaaccctggatgaggggatgcaaatccccagtactcaattcgatgccgcgcaccccacgaacgtacagcggttggctgaaccaagccagatgctgaaacacgctgtggtgaacctgatcaattaccaagacgatgctgaactggccaccagggcaatcccagagctgaccaaactgctgaacgacgaggaccaagtcgttgtaaataaagctgccgttatggttcaccagcttagcaaaaaggaagcttccaggcacgcaattatgcggtcacctcagatggtgagcgctattgtccgtaccatgcaaaacactaacgatgttgagacggcaaggtgtactgcagggacgctgcataatctgagccaccatcgggagggcttgttagcaatcttcaagtctggcgggatcccagctcttgttaaaatgctcggatcgccggtcgattctgtgcttttctatgcgattacaactctccacaatctgcttttacaccaggagggggcaaaaatggcggtgaggcttgctggaggcctccagaagatggttgcgctgctcaataagacaaatgtgaagttccttgcaatcacaacggattgccttcagattcttgcctacggtaatcaggagagtaagctgattatcctagcctcgggtggcccccaggccctggttaacattatgcgaacctacacttacgagaaattactttggacaacttccagagtgctaaaggtgctgagtgtttgctcatccaacaagcctgcaatcgtggaggctggcggcatgcaagcactcggcctccatctgacagacccatcccagcgcctggtccagaattgcctgtggaccctgcggaacctcagtgacgccgcgaccaagcaggagggaatggaaggcctactcggaactctggtccaacttctgggctccgatgacatcaatgtagtcacttgtgctgcaggcatacttagcaacctgacttgtaacaactataaaaacaagatgatggtgtgtcaggtagggggcatagaagccctagtcagaacagtcctgagagccggagacagggaagacatcacggagccggcaatatgcgccctgaggcacctcacaagcaggcatcaagaagcagagatggcacagaatgccgtccgtctgcattatgggctgcccgtggtcgtgaaattactccacccgccaagccattggcctcttatcaaagctactgtggggcttatccggaacctggctttatgccctgctaatcatgcacccctgagggagcagggcgctatccctagactggtgcagctgctggtgcgagcccaccaggatacacaacgacggacttcaatgggcggaacacagcagcagttcgttgagggagtccggatggaagaaatcgtggaagggtgcacgggggctctgcatattttagctcgggacgtacataataggatagtaattaggggtctcaatacaatccccctgttcgtgcagctattgtattcacctattgagaatattcaaagagttgctgccggcgtgctctgcgagctcgcacaggacaaggaagcagccgaggctatcgaggcagagggagcaacagcacctttaacagagcttctgcattcccgtaacgaaggagttgccacctacgctgccgccgtgcttttccggatgagcgaggacaaacctcaggactacaagaagcgtctctccgtggagctgacctcatctctgtttcgaaccgagccgatggcttggaatgagactgccgacctggggcttgacataggtgcccaaggtgagccacttggttataggcaggacgacccctcatacagatctttccatagcggtggatatggtcaggacgccctggggatggacccaatgatggagcacgagatggggggacatcacccgggcgcagactaccctgtggacggccttcccgacctgggacacgcacaagatttaatggatggtctgccacccggcgactccaatcaactcgcctggtttgacacagatctgtag

SEQ ID NO: 38688 - DNA, 2346 bp, Artificial Sequence
  derived and/or modified sequence
atggccacccaggccgacctgatggagctggacatggccatggagcccgaccgcaaggctgcagtgtcccattggcagcagcaatcctaccttgattccggcatccactccggggcaaccaccacggccccttccctaagcggcaagggcaacccagaagaggaagatgttgacacaagccaggtcctatacgaatgggagcagggattcagtcagagctttacacaagaacaggtggccgatattgatggccagtacgctatgacaagggcacagcgcgttcgcgccgctatgttccctgaaactctcgacgagggaatgcaaattccaagtacccagttcgatgcggcacacccgacaaacgtccaacgcttggctgaaccaagccaaatgcttaaacatgccgttgtgaatctgattaactaccaagacgacgcggaattggccacaagggcaataccggagcttaccaagctcttaaacgacgaagaccaggtagtcgttaacaaggcagctgttatggtccaccagttaagcaagaaggaggccagcaggcacgcaatcatgcggtcaccacaaatggtgtccgcaattgtcaggacaatgcaaaatactaacgacgtggagactgcgcgctgcacagctgggactctgcacaatctgagccaccaccgggagggactgcttgcaatattcaaaagtggcggcattcctgccctagtgaaaatgctgggatctccggttgacagcgttctgttctacgctataacaactctgcacaatctgctcctccatcaggagggcgccaaaatggccgtgaggctggccggcggactccagaaaatggtggccctgcttaataaaaccaacgtgaaattcctcgccatcaccaccgattgcttgcagatcttggcgtacggtaaccaggagagtaaactcataattctggccagtggagggccccaggcactggttaacatcatgcgaacatacacttacgaaaaactcctctggactaccagccgcgtcctaaaggtgctctccgtatgctcgtccaacaagcctgcaatagtggaggcgggaggaatgcaggcactgggccttcatttaactgatccatcccagcgcctggtccaaaactgcttatggacacttcggaacctatccgatgcggccacaaaacaggaggggatggagggtctcctagggactcttgtgcagcttctgggaagcgatgacatcaacgtcgtgacctgcgccgctggaatcctgtctaaccttacatgcaataattacaaaaataaaatgatggtctgtcaggtgggtggaatcgaagccctggtaagaaccgttctgcgagccggcgaccgggaagatataactgaacccgctatttgtgccctgcggcacttgacgtcacgccaccaagaggctgagatggcccagaacgctgtgcgcctgcattatggcctgccagtggttgtgaaactcttacacccaccaagccattggcccctcatcaaagccacagtgggcttaatcaggaacttagccctctgcccagccaatcatgctcccttgcgagagcagggcgcaatacccagactggttcaattgctcgtacgagctcaccaagatacccagcgccgtacaagcatgggtgggacccagcagcagttcgttgagggagtgcgaatggaggagatcgtcgaggggtgcaccggagcccttcatatactcgcgagagatgtccacaacaggattgtcattcgcggcctgaataccataccactgtttgttcagcttctgtattcccccattgaaaacattcagagggtggccgccggtgtgctgtgcgagctagcccaggataaagaggccgctgaggcaatcgaggccgaaggagctacagcccccttaacggaactgctacacagccggaatgagggagtggccacctacgctgcagctgtcctgtttcgcatgtctgaggataagccccaggactataaaaagagactttcagtggaactgacttctagcttgtttcgaaccgagcctatggcctggaacgagaccgccgacttaggtctcgacatcggtgcacagggtgagcccttgggctaccggcaggacgatccatcctatcggtctttccattcaggcggctacggacaggatgctctggggatggacccaatgatggagcacgaaatgggcgggcaccacccgggggctgattatcctgtcgacggccttcccgatctcggccacgcccaggacttgatggatggactccctcccggggattcaaaccaactggcctggtttgataccgatctctag

SEQ ID NO: 38689 - DNA, 2325 bp, Artificial Sequence
  derived and/or modified sequence
atggagctggacatggccatggagcccgaccggaaggccgccgtgtcacactggcagcagcaatcataccttgactcgggcatccattcaggtgccactaccaccgccccgtccctcagtggcaaagggaatccggaagaagaagatgtggatacctcccaggtgctctatgaatgggagcagggtttttcacaatccttcacccaggaacaggtggctgacatcgatggacagtacgctatgacaagggcacaaagggtgcgtgcagctatgttcccggagacactggacgaaggcatgcagataccctctacacagtttgatgcagcccaccccactaatgtgcagagactagccgaacctagccagatgctcaagcacgcagtcgtgaacctgatcaactaccaggatgacgctgaactagcgacccgtgcaatccctgagctgactaaattattgaatgatgaggaccaggtggtggtgaacaaagccgctgtgatggtccaccagctatctaaaaaagaggcctcaagacacgccatcatgcggagcccccagatggtgtcggccatcgttcgcacaatgcagaacactaacgatgttgagactgcacgatgcactgctgggacgctgcacaatttaagccatcacagagaggggctccttgccatcttcaagtctggaggtatccctgcccttgtgaagatgctcgggtctcctgttgactcagtccttttctatgcaatcactactttgcacaatctgcttctacaccaggaaggagcaaaaatggccgtgcgcctggcaggcggactccagaaaatggtcgccctcctgaacaaaacaaatgtgaagttcctggctattaccacggattgtctccagatcctcgcgtacggaaaccaagagtccaaattgataattcttgcctccggggggccacaagccttagtgaacataatgcgcacctacacttatgaaaaactcctgtggaccacaagccgcgtgcttaaggtactcagtgtgtgctccagcaacaagccagcaatagtggaagcaggcgggatgcaggccctaggtcttcacctgactgacccgtcacagcgcctggttcaaaattgcctgtggaccctgcgtaacctgagtgacgcagccacgaagcaggagggaatggaaggcctcttagggaccttagtgcagctgctcggcagcgacgacatcaacgttgtgacttgcgcagccggcattctgtccaatctcacctgtaataattacaagaataaaatgatggtttgtcaggttggagggatcgaggctttggtgaggactgtcttacgggctggggatcgtgaggacataaccgagccagctatctgtgcactgcgacaccttaccagccgccaccaggaagccgaaatggcgcaaaacgcagtgagattacattacggcctcccagtggtggtgaagctgttgcaccctccttctcattggccgttgattaaagccaccgtaggcctgatacggaatttagccctgtgtcccgcgaatcacgctcccctacgcgagcaaggggcaattccaaggctcgtgcagctactggtaagggcacaccaggacacgcagcgaagaacctcaatgggcggaactcagcaacaatttgtcgaaggggtgaggatggaggagattgtcgaaggctgcaccggagcattgcacatcctcgctagggatgtgcacaacaggatagtcatccgagggctcaatacaattcctctctttgtgcagctcctgtatagcccgattgagaacatccagcgcgtcgccgctggagtgctgtgcgaactggcacaggacaaggaagccgccgaagccatcgaagccgagggagccacagcccccctgacggaactgctacacagccggaatgaaggtgtcgcaacctacgcagctgcggtattattcaggatgtccgaggacaagcctcaagattacaaaaaaagactatcagtggaactgactagcagtctgtttaggaccgagcccatggcgtggaatgagacagcagacctgggtctagacattggagcacagggggagccgctggggtacaggcaggacgaccccagttaccgtagttttcatagtggtggctacgggcaggatgcccttggaatggatcccatgatggagcatgaaatgggagggcatcatcccggcgcggattaccctgtggatgggctgccggacctgggacatgctcaggacctcatggacggcctgccacctggtgacagcaaccagttggcatggttcgacaccgatttatag

SEQ ID NO: 38690 - DNA, 2346 bp, Artificial Sequence
  derived and/or modified sequence
atggccacacaggctgatctgatggagctggacatggccatggaaccagacaggaaagcagccgtgagtcattggcagcaacagtcgtacttggactccggaatacacagcggagccactaccactgcaccctctttaagcggaaaaggcaatcccgaagaagaggatgtggatactagccaggtcctgtacgaatgggaacagggcttctctcaatctttcactcaagaacaggtggcagacatagatgggcagtacgccatgactagggctcagcgagtccgcgcagccatgttccccgaaaccctggatgaaggtatgcagattcccagtacccagttcgatgcagcacatcccactaatgtgcagcgtcttgctgaaccttctcagatgctgaaacatgccgtagtcaatctaatcaattatcaggacgacgcagagctggctacccgcgctattccagagcttactaagcttctgaacgatgaggatcaagtggtggtgaataaagcggcagtcatggtacaccaattatcgaaaaaggaagcctccagacacgctatcatgcggagtccccagatggtgagcgcgatcgtgcgcacaatgcagaataccaatgacgtcgagacagcacgctgcactgcaggaacactgcacaatctgagtcaccatagggaagggctgctggccatctttaagtccgggggtattccggctctggtcaagatgctgggatcacctgtggattcggtactgttctacgctataactactcttcataatttactgctgcatcaggagggagcaaaaatggcagttcgtctcgccggaggtctgcagaaaatggtagcgctgctgaacaagacaaacgttaagttcctagccatcacgaccgactgcctccagatcctcgcatatggtaatcaagagtcaaaactgataattctcgcgtccggtggccctcaggccctggtcaatattatgagaacgtatacctacgaaaagctactgtggacgacgtcccgcgtactgaaggtcctttctgtgtgcagttcaaacaaacctgcaatcgtcgaagcagggggaatgcaagcacttggcttgcacttgaccgacccctctcagagacttgtccagaattgtctttggacactgcgcaacctgagtgatgctgctacaaaacaggagggaatggagggattactgggtacacttgtgcaactactaggcagcgatgacatcaatgtggttacttgcgccgcaggcatcctttcaaatctcacttgcaacaattacaagaacaagatgatggtgtgtcaagttgggggtatagaagctctcgtcaggactgtgctgcgggctggagatcgcgaagatataacggagccggctatatgcgcactccgacatctaacatcacgccatcaggaagccgaaatggcgcaaaacgctgttaggcttcactatggtttaccagtggtggtaaagctacttcacccgcctagtcattggccactcattaaggctaccgttggcctcattcgcaacctcgccctctgtccggctaatcacgcaccactgcgcgaacagggcgcaatccccaggctcgtccaactgttagtacgtgcccaccaggacacacaacgaagaactagcatgggaggcacacagcaacaattcgttgagggcgtcaggatggaagagattgtggagggctgtaccggggcattacatattttggctagggatgtgcacaataggatcgtgattaggggcctgaacaccattcctctgtttgttcaacttttgtactcccccattgaaaacatccagcgggttgctgctggtgttctttgtgagctcgcccaggacaaagaggctgctgaggccatagaagctgagggtgccacggctccgctgacagagttgctgcactctcgtaacgagggcgtggccacctacgccgctgccgtgttgttccggatgagtgaagataagccacaggactataagaagaggctatctgtggaactcacgagttctctgttccggacagaacctatggcctggaatgaaactgccgatctggggttagacataggcgcacagggggagccactcggctataggcaggacgatccctcttatagatcctttcatagcggcggatatggccaggacgcccttggcatggaccctatgatggaacatgagatgggcggtcatcatccaggcgctgactatccagtcgacggcttgcctgacctgggtcacgctcaagacctaatggacggtttgcctcccggtgattccaaccagttggcatggtttgataccgatttgtag

SEQ ID NO: 38691 - DNA, 2346 bp, Artificial Sequence
  derived and/or modified sequence
atggccacccaggcagacttgatggaattagacatggccatggagccggacagaaaagcagcagtgagtcactggcaacagcaaagctatctggattcaggaatacattccggagcaacaacaactgcaccatctttgagcggcaagggcaacccggaagaggaggatgtggatactagtcaagtgttgtacgaatgggaacagggcttctcccaatcattcacccaggagcaggtcgccgacatcgacggccagtatgcgatgacccgcgcacagagggtccgggcagcaatgtttccggagaccctggatgaagggatgcagattccatctactcagtttgatgccgctcatcctactaacgttcagcgtctggccgaaccttcccagatgctcaagcacgccgtggtcaacttaattaactaccaggacgatgccgagttggctacgcgggcaattcccgagttgactaagctcttgaacgacgaggatcaggtggtagtgaataaagccgctgtgatggtgcaccagttaagcaagaaagaagctagccggcatgctatcatgagatctccacagatggtttctgccattgttcgaactatgcagaatacgaacgatgtggaaacggcacgttgcacggctgggacactgcacaatctaagtcaccaccgcgagggcctgctagctatcttcaagtcaggtggcattcccgctctggtcaagatgctcggctcacccgtggacagcgtactcttctacgctatcactactctacataatctgctcctccatcaggagggagcaaaaatggccgtgcggctggccggaggcttgcagaagatggtcgctctcttaaataagacgaacgtgaagttcttagcaattacgactgactgcctacagatcctagcatacggaaaccaagagtccaagctcattattttggcctctggcggtccccaggccctggtcaatattatgcgcacctacacctacgagaagctcctctggaccaccagccgggtgttgaaggtattatccgtgtgtagttccaataaacccgctattgtcgaagccggtgggatgcaggctctcggtttgcacctgaccgacccgagccagaggctcgttcagaattgcttgtggaccttgagaaacttgtcggacgcggctaccaaacaggagggaatggagggtctgctaggcactctggtacagctactgggctctgatgacatcaacgtggtcacttgcgcagctggaatactgagcaatttgacttgcaacaactacaagaacaagatgatggtatgtcaagtgggtggcatagaggcactggtacgcactgtgttgcgggctggagaccgggaggatatcacggaaccggctatatgcgccctgagacatttgacaagcagacaccaagaggcagaaatggcccaaaacgctgtacgccttcactacggattgcccgttgtggttaagctcttacatcctcctagtcattggccgctgattaaggcgaccgtcggactcatccggaatctcgccctctgtcccgcaaaccacgcgcctctgagagagcagggagccattccgcgtctggttcaactgttggtaagggcccaccaagacactcagcgcagaaccagtatgggcggtacacagcagcagtttgttgagggcgtgcgtatggaagagattgttgagggttgcacgggtgccctccacatcctcgcccgagatgtgcataaccggattgtcatccgtgggttaaataccatcccactctttgtgcaactgctgtactcccccattgaaaacatccagcgggttgctgccggtgttctctgcgaactcgcccaggacaaagaggccgctgaggccattgaggcggaaggagccacggcccctctgaccgagctactgcatagtcgtaacgagggggttgcaacgtatgccgctgctgtactgtttaggatgtcagaggacaagccccaagattacaagaagagattgagcgtggagctaacttcatcccttttccgtacagagcctatggcgtggaacgagacagcggatctaggtctggatatcggtgcgcagggtgagcccctcggttacaggcaagatgacccttcctatcgctcctttcacagtgggggatacggccaagatgccctaggtatggaccccatgatggagcacgaaatgggaggtcatcatcctggtgctgattacccagtggatgggctacctgatctcggccatgcccaagaccttatggacgggcttccgcctggggatagtaatcagctggcgtggttcgacacggacttgtag

SEQ ID NO: 38692 - DNA, 2346 bp, Artificial Sequence
  derived and/or modified sequence
atggcgacacaggcggacttgatggagcttgacatggccatggagccagaccgcaaagctgcagtctcacattggcagcagcagtcttacctggatagcggcattcactctggcgctaccactaccgctcctagtttgagtggaaaaggcaaccccgaggaagaagatgtagataccagtcaagtgctgtacgaatgggaacagggcttttctcagtctttcacccaggaacaggtggcagacattgatggtcagtacgccatgactcgagcccaaagagttagagctgccatgttccccgaaaccctggacgaaggaatgcagatccccagcacacagtttgacgcagcacaccctaccaacgtccagagactcgcagagccatcccagatgctgaagcatgccgtagtaaacctcattaattatcaggacgatgctgagctcgctacaagggcaatccctgagcttaccaagctgcttaatgatgaagatcaggtggtagtcaacaaggccgctgttatggttcaccaactcagtaaaaaggaggctagtcgacacgccattatgcgatctccccagatggtgtcagccattgtccgcacaatgcagaacaccaatgacgtggagaccgcgagatgtactgccggaacgttacacaacctgtcccaccatcgcgagggcctgctggctatattcaagtccggcggaattcccgctttagtgaaaatgctgggatctccggttgactccgtgctcttctacgcaattactacgctgcacaacctcttgctgcatcaagagggagccaaaatggctgttcgcctggctggcggtctgcagaaaatggtggcattgttgaacaaaactaatgtgaagttcctggccatcaccaccgactgtctacagatactggcctatgggaaccaggagagcaaactgatcatcctcgcatctgggggaccacaggctctggtcaacataatgcgcacttatacgtatgagaaattgctgtggaccactagtagagtactaaaggtcctgtctgtatgctcaagtaataaacctgccatcgtggaagccggagggatgcaggcactagggctacacctaacagacccaagtcagcgacttgtgcagaactgtttgtggactctgagaaacctctccgatgcagccacgaagcaggagggtatggagggattgctgggcacgctggttcagctgctcgggtctgatgatattaacgtcgtcacatgcgcagcaggtatcctgtcaaatttaacgtgcaacaattataaaaacaagatgatggtttgccaagtgggaggaatcgaagcgctcgttcgcactgtgctacgcgcaggggatcgggaggatataactgaaccggcaatctgtgccttaaggcacttgacatcccgccaccaagaggcagagatggcccaaaatgccgtcagattgcattatgggctgccggtggtcgtgaaactcctgcaccccccatcacattggcctctgattaaggcaaccgttggacttatcaggaacctggcgctgtgccccgctaaccacgccccattgcgggagcaaggcgctatcccacggctcgtacagctgctagtgagagcacatcaggacacccagaggagaacatctatgggaggaacgcagcagcaattcgtggagggcgtgagaatggaggagatagtggaagggtgtaccggagccttgcatatcttggctagggatgttcacaatagaatcgtgatcaggggtttgaacaccattcccttattcgttcagctcttatactcccccatagagaatatccagcgagtggctgcaggcgtcctgtgtgagctcgcccaagacaaagaggctgccgaagccattgaagcagaaggcgcaactgcgcctctcaccgaactgttacatagtcgcaacgaaggggtagccacgtacgcagctgccgtgctttttcgaatgagcgaagataagccacaagactacaaaaaaagattatcggtggaactgacatccagtctatttcgaacagaacctatggcctggaacgaaaccgctgacctgggcttggacatcggagcccaaggtgagccactgggatacagacaagacgacccttcctacaggagttttcacagcggagggtacggccaagatgccttaggcatggatcccatgatggagcacgagatgggcggacatcaccccggtgctgattaccccgttgatggcctccccgatctggggcatgcgcaagacttgatggatggcctcccgccaggcgactccaaccagcttgcatggtttgatacagatctctag

SEQ ID NO: 38693 - DNA, 2346 bp, Artificial Sequence
  derived and/or modified sequence
atggccacgcaggctgatttaatggaactcgacatggccatggagccagaccgcaaagcagctgttagtcattggcaacagcaatcctatctcgatagcgggattcattctggggctactacaactgccccatccctgtccggtaagggtaatccggaagaggaggacgtggatacgtctcaggttctgtatgagtgggagcaggggttctctcagtcatttacccaggagcaggtcgctgacatcgacggccaatacgctatgacccgagcccaaagggttcgcgctgcgatgtttcctgaaacactggacgaaggcatgcagattccctctactcagtttgacgccgcacaccccactaacgtgcagcgacttgctgaaccctcacaaatgttgaagcatgccgttgtaaacctcatcaactatcaggatgacgccgagctggccacccgcgcaataccggaactgacaaaactccttaacgacgaggaccaggttgtcgtgaacaaggcagctgtcatggtacaccagctgagcaaaaaggaagcatctcgacacgcgatcatgaggtcaccccagatggtgtccgcaattgtgaggaccatgcagaataccaatgacgttgaaaccgcaaggtgtaccgcaggaacactgcacaatctcagtcaccacagagaagggctgctcgctattttcaagagtgggggaatcccagctcttgttaagatgctgggctctcccgtggacagtgtactattttacgccatcacgaccttacacaacctcttacttcatcaggaaggggcaaagatggccgtgcgcctggcaggcggtttgcaaaaaatggtggccctgctgaataaaacaaacgtaaagttcctagcgatcactaccgactgcttgcagatcttagcttatggcaaccaagagtcaaagctgattatcctagcgtccggaggccctcaggcgctcgttaacatcatgcgcacatatacttacgaaaagctcctttggacaacaagccgagtgctgaaggtgctttctgtgtgctcatctaataagccagctatcgttgaagcgggaggtatgcaagccctaggactgcacctgaccgacccatcccagcgccttgtgcagaactgtctgtggactctcagaaatctctcagacgccgcaacaaaacaggaagggatggaggggttgctcggcaccttggtgcagctcctggggtctgacgatatcaacgtagttacatgcgcggcagggattctgtcgaatttgacatgcaataactacaagaataagatgatggtgtgccaagtgggaggaattgaggcccttgtccgcaccgttttacgagcgggagaccgagaggatattaccgagcctgccatttgcgcccttcggcatcttacatctaggcaccaggaggcagagatggctcaaaacgcagtgcgtctacattatggattacccgttgttgtgaaactgctgcatccgcctagtcattggccactgattaaagccacagtagggctaattcgcaacctggcactttgccccgctaaccatgccccactccgggagcagggtgcaatacctagactcgtgcagctgctggtcagagcccatcaggatacgcagaggaggacctctatgggtggcacacaacaacagtttgtcgaaggcgtaagaatggaggaaatcgtcgaagggtgcaccggggctctgcacattttagccagagatgtgcacaatcggatagttatccgaggactgaatacaattccactctttgttcagctattgtacagtcctatagaaaatattcagagggtcgcggctggcgttctgtgcgaactcgcccaggataaggaggctgcagaagcaatcgaagccgaaggtgctaccgctcccctcaccgagctgttacattccagaaatgaaggcgttgccacatatgcagcagccgttttgtttcggatgtcagaggacaaacctcaggactataaaaaaaggctatctgttgaactcacttcctccttgttcaggactgaacctatggcatggaacgaaacagccgacttgggcctcgacattggagcgcagggagaaccgcttgggtatcgccaggacgacccttcttacagatcattccactccggtgggtacggccaggacgcccttggcatggatcctatgatggagcacgagatgggaggccaccaccctggtgcagattaccctgttgacggattgcctgatctcggccatgctcaggatttaatggatggccttccgcctggagacagtaaccagctcgcgtggtttgacactgacttatag

SEQ ID NO: 38694 - DNA, 42 bp, Artificial Sequence
  derived and/or modified sequence
atggcaacccaggcagatttaatggaactggatatggcttag

SEQ ID NO: 38695 - DNA, 2325 bp, Artificial Sequence
  derived and/or modified sequence
atggagctggacatggctatggagcccgacagaaaagcagcggtgtctcactggcagcagcagtcctatctcgattccggaatccacagcggcgcaaccacgactgcacccagtttgagcggcaagggtaatcccgaagaagaagatgtcgatacctcccaggtgctctacgaatgggagcagggattctctcagagctttacacaggaacaggtggccgacatcgatgggcagtatgcaatgactcgcgctcagcgcgtgagagcggcaatgttccctgaaaccctggatgagggaatgcagatcccctcaacgcagttcgacgcagcacatccgacgaacgttcagcggcttgccgagccttcccagatgcttaaacatgctgtggttaatctgatcaactaccaggacgacgccgaactcgcaacccgcgctattcctgaactcacgaagctattgaacgacgaagaccaggtggtggttaataaggctgcagtcatggttcatcaactgtcgaaaaaagaagcgtccagacacgcaatcatgcgatctccccagatggtttccgcaattgtgcggaccatgcagaatacaaacgacgtggaaacagccagatgcaccgctgggacactgcacaacctcagccatcaccgcgaaggacttttggcaatattcaagtccggaggtatacccgcattagttaaaatgctcggtagcccagtggactcggtcttgttctacgctattacaacactgcacaatttactgttacaccaagagggggctaaaatggccgtaagactggcgggagggctgcaaaagatggtggccctgctgaacaaaactaatgtcaagttcctggccatcactacagactgtttacaaatcctcgcctatggaaatcaagaatccaagcttattatcttggcctcaggtggacctcaagctcttgtcaatatcatgaggacatatacgtacgagaagctcttatggacgacaagtagagttttaaaagtgctcagcgtttgcagctctaataaaccagccatcgtcgaagccggagggatgcaggctcttggacttcatctcactgatccgtcccaacggctggtgcagaactgtttgtggacactgcgcaacttgtctgatgcggctaccaagcaggagggtatggagggtctcttgggaactctggtccaattgctgggaagcgacgacattaatgtggtgacttgcgcagcagggatcctctcaaacctaacctgcaacaattacaagaacaaaatgatggtctgtcaggtgggaggaatagaggcactcgtgcgcacagtcctgagagccggagatagggaggacatcaccgaaccagccatttgtgcgctgagacacctaacaagccgccatcaggaggccgagatggcacagaatgccgtcagattacactatggcctccctgtggtggtgaaacttctccaccctccttcccattggccgcttatcaaggctacagttggtctgatccgaaacttagccctgtgtcccgcaaatcatgcccctctgcgcgagcagggggctattcccaggctagtgcagctgctggtgcgtgcacaccaggatactcagcgacgaacatcaatgggcggtactcagcaacaatttgtggagggggtaagaatggaagagattgttgaaggctgcactggcgctctccatatcttagcgcgagacgtgcataataggatcgtgatccgaggcctgaatactatccctctattcgtccaactgctgtacagtccaatcgaaaatattcagagagtggctgccggagtgctctgcgaattggctcaggacaaagaagccgctgaggccattgaagccgaaggcgcaactgcccctctgaccgaactgctgcactcaagaaatgaaggagtggcgacttacgccgctgcggtgctcttccggatgagcgaagacaaaccgcaagattacaagaaacgcctttccgtggagctaactagctcactgtttcggaccgagcccatggcatggaatgagactgcggaccttggcttggacatcggggctcagggtgagccactgggttatcgacaagatgatccctcataccggtcattccactccggcggatacggccaggatgctctaggtatggatcctatgatggaacacgaaatgggtggacaccaccccggagccgattatcctgtggatggtctccccgacctggggcatgcacaggacctgatggatgggttgccccctggcgactcaaatcaacttgcatggttcgatacagacctctag

SEQ ID NO: 38696 - DNA, 3729 bp, Artificial Sequence
  derived and/or modified sequence
gccggtggcggcaggatacagcggcttctgcgcgacttataagagctccttgtgcggcgccattttaagcctctcggtctgtggcagcagcgttggcccggccccgggagcggagagcgaggggaggcggagacggaggaaggtctgaggagcagcttcagtccccgccgagccgccaccgcaggtcgaggacggtcggactcccgcggcgggaggagcctgttcccctgagggtatttgaagtataccatacaactgttttgaaaatccagcgtggacaatggctactcaagctgatttgatggagttggacatggccatggaaccagacagaaaagcggctgttagtcactggcagcaacagtcttacctggactctggaatccattctggtgccactaccacagctccttctctgagtggtaaaggcaatcctgaggaagaggatgtggatacctcccaagtcctgtatgagtgggaacagggattttctcagtccttcactcaagaacaagtagctgatattgatggacagtatgcaatgactcgagctcagagggtacgagctgctatgttccctgagacattagatgagggcatgcagatcccatctacacagtttgatgctgctcatcccactaatgtccagcgtttggctgaaccatcacagatgctgaaacatgcagttgtaaacttgattaactatcaagatgatgcagaacttgccacacgtgcaatccctgaactgacaaaactgctaaatgacgaggaccaggtggtggttaataaggctgcagttatggtccatcagctttctaaaaaggaagcttccagacacgctatcatgcgttctcctcagatggtgtctgctattgtacgtaccatgcagaatacaaatgatgtagaaacagctcgttgtaccgctgggaccttgcataacctttcccatcatcgtgagggcttactggccatctttaagtctggaggcattcctgccctggtgaaaatgcttggttcaccagtggattctgtgttgttttatgccattacaactctccacaaccttttattacatcaagaaggagctaaaatggcagtgcgtttagctggtgggctgcagaaaatggttgccttgctcaacaaaacaaatgttaaattcttggctattacgacagactgccttcaaattttagcttatggcaaccaagaaagcaagctcatcatactggctagtggtggaccccaagctttagtaaatataatgaggacctatacttacgaaaaactactgtggaccacaagcagagtgctgaaggtgctatctgtctgctctagtaataagccggctattgtagaagctggtggaatgcaagctttaggacttcacctgacagatccaagtcaacgtcttgttcagaactgtctttggactctcaggaatctttcagatgctgcaactaaacaggaagggatggaaggtctccttgggactcttgttcagcttctgggttcagatgatataaatgtggtcacctgtgcagctggaattctttctaacctcacttgcaataattataagaacaagatgatggtctgccaagtgggtggtatagaggctcttgtgcgtactgtccttcgggctggtgacagggaagacatcactgagcctgccatctgtgctcttcgtcatctgaccagccgacaccaagaagcagagatggcccagaatgcagttcgccttcactatggactaccagttgtggttaagctcttacacccaccatcccactggcctctgataaaggctactgttggattgattcgaaatcttgccctttgtcccgcaaatcatgcacctttgcgtgagcagggtgccattccacgactagttcagttgcttgttcgtgcacatcaggatacccagcgccgtacgtccatgggtgggacacagcagcaatttgtggagggggtccgcatggaagaaatagttgaaggttgtaccggagcccttcacatcctagctcgggatgttcacaaccgaattgttatcagaggactaaataccattccattgtttgtgcagctgctttattctcccattgaaaacatccaaagagtagctgcaggggtcctctgtgaacttgctcaggacaaggaagctgcagaagctattgaagctgagggagccacagctcctctgacagagttacttcactctaggaatgaaggtgtggcgacatatgcagctgctgttttgttccgaatgtctgaggacaagccacaagattacaagaaacggctttcagttgagctgaccagctctctcttcagaacagagccaatggcttggaatgagactgctgatcttggacttgatattggtgcccagggagaaccccttggatatcgccaggatgatcctagctatcgttcttttcactctggtggatatggccaggatgccttgggtatggaccccatgatggaacatgagatgggtggccaccaccctggtgctgactatccagttgatgggctgccagatctggggcatgcccaggacctcatggatgggctgcctccaggtgacagcaatcagctggcctggtttgatactgacctgtaaatcatcctttaggtaagaagttttaaaaagccagtttgggtaaaatacttttactctgcctacagaacttcagaaagacttggttggtagggtgggagtggtttaggctatttgtaaatctgccacaaaaacaggtatatactttgaaaggagatgtcttggaacattggaatgttctcagatttctggttgttatgtgatcatgtgtggaagttattaactttaatgttttttgccacagcttttgcaacttaatactcaaatgagtaacatttgctgttttaaacattaatagcagcctttctctctttatacagctgtattgtctgaacttgcattgtgattggcctgtagagttgctgagagggctcgaggggtgggctggtatctcagaaagtgcctgacacactaaccaagctgagtttcctatgggaacaattgaagtaaactttttgttctggtcctttttggtcgaggagtaacaatacaaatggattttgggagtgactcaagaagtgaagaatgcacaagaatggatcacaagatggaatttatcaaaccctagccttgcttgttaaatttttttttttttttttttaagaatatctgtaatggtactgactttgcttgctttgaagtagctctttttttttttttttttttttttttgcagtaactgttttttaagtctctcgtagtgttaagttatagtgaatactgctacagcaatttctaatttttaagaattgagtaatggtgtagaacactaattcataatcactctaattaattgtaatctgaataaagtgtaacaattgtgtagcctttttgtataaaatagacaaatagaaaatggtccaattagtttcctttttaatatgcttaaaataagcaggtggatctatttcatgtttttgatcaaaaactatttgggatatgtatgggtagggtaaatcagtaagaggtgttatttggaaccttgttttggacagtttaccagttgccttttatcccaaagttgttgtaacctgctgtgatacgatgcttcaagagaaaatgcggttataaaaaatggttcagaattaaacttttaattcattcga

SEQ ID NO: 38697 - DNA, 3268 bp, Artificial Sequence
  derived and/or modified sequence
gctgcgccggtggcggcaggatacagcggcttctgcgcgacttataagagctccttgtgcggcgccattttaagcctctcggtctgtggcagcagcgttggcccggccccgggagcggagagcgaggggaggcggagacggaggaaggtctgaggagcagcttcagtccccgccgagccgccaccgcaggtcgaggacggtcggactcccgcggcgggaggagcctgttcccctgagggtatttgaagtataccatacaactgttttgaaaatccagcgtggacaatggctactcaagctgatttgatggagttggacatggccatggaaccagacagaaaagcggctgttagtcactggcagcaacagtcttacctggactctggaatccattctggtgccactaccacagctccttctctgagtggtaaaggcaatcctgaggaagaggatgtggatacctcccaagtcctgtatgagtgggaacagggattttctcagtccttcactcaagaacaagtagctgatattgatggacagtatgcaatgactcgagctcagagggtacgagctgctatgttccctgagacattagatgagggcatgcagatcccatctacacagtttgatgctgctcatcccactaatgtccagcgtttggctgaaccatcacagatgctgaaacatgcagttgtaaacttgattaactatcaagatgatgcagaacttgccacacgtgcaatccctgaactgacaaaactgctaaatgacgaggaccaggtggtggttaataaggctgcagttatggtccatcagctttctaaaaaggaagcttccagacacgctatcatgcgttctcctcagatggtgtctgctattgtacgtaccatgcagaatacaaatgatgtagaaacagctcgttgtaccgctgggaccttgcataacctttcccatcatcgtgagggcttactggccatctttaagtctggaggcattcctgccctggtgaaaatgcttggttcaccagtggattctgtgttgttttatgccattacaactctccacaaccttttattacatcaagaaggagctaaaatggcagtgcgtttagctggtgggctgcagaaaatggttgccttgctcaacaaaacaaatgttaaattcttggctattacgacagactgccttcaaattttagcttatggcaaccaagaaagcaagctcatcatactggctagtggtggaccccaagctttagtaaatataatgaggacctatacttacgaaaaactactgtggaccacaagcagagtgctgaaggtgctatctgtctgctctagtaataagccggctattgtagaagctggtggaatgcaagctttaggacttcacctgacagatccaagtcaacgtcttgttcagaactgtctttggactctcaggaatctttcagatgctgcaactaaacaggaagggatggaaggtctccttgggactcttgttcagcttctgggttcagatgatataaatgtggtcacctgtgcagctggaattctttctaacctcacttgcaataattataagaacaagatgatggtctgccaagtgggtggtatagaggctcttgtgcgtactgtccttcgggctggtgacagggaagacatcactgagcctgccatctgtgctcttcgtcatctgaccagccgacaccaagaagcagagatggcccagaatgcagttcgccttcactatggactaccagttgtggttaagctcttacacccaccatcccactggcctctgataaaggctactgttggattgattcgaaatcttgccctttgtcccgcaaatcatgcacctttgcgtgagcagggtgccattccacgactagttcagttgcttgttcgtgcacatcaggatacccagcgccgtacgtccatgggtgggacacagcagcaatttgtggagggggtccgcatggaagaaatagttgaaggttgtaccggagcccttcacatcctagctcgggatgttcacaaccgaattgttatcagaggactaaataccattccattgtttgtgcagctgctttattctcccattgaaaacatccaaagagtagctgcaggggtcctctgtgaacttgctcaggacaaggaagctgcagaagctattgaagctgagggagccacagctcctctgacagagttacttcactctaggaatgaaggtgtggcgacatatgcagctgctgttttgttccgaatgtctgaggacaagccacaagattacaagaaacggctttcagttgagctgaccagctctctcttcagaacagagccaatggcttggaatgagactgctgatcttggacttgatattggtgcccagggagaaccccttggatatcgccaggatgatcctagctatcgttcttttcactctggtggatatggccaggatgccttgggtatggaccccatgatggaacatgagatgggtggccaccaccctggtgctgactatccagttgatgggctgccagatctggggcatgcccaggacctcatggatgggctgcctccaggtgacagcaatcagctggcctggtttgatactgacctgtaaatcatcctttaggagtaacaatacaaatggattttgggagtgactcaagaagtgaagaatgcacaagaatggatcacaagatggaatttatcaaaccctagccttgcttgttaaatttttttttttttttttttaagaatatctgtaatggtactgactttgcttgctttgaagtagctctttttttttttttttttttttttttgcagtaactgttttttaagtctctcgtagtgttaagttatagtgaatactgctacagcaatttctaatttttaagaattgagtaatggtgtagaacactaattcataatcactctaattaattgtaatctgaataaagtgtaacaattgtgtagcctttttgtataaaatagacaaatagaaaatggtccaattagtttcctttttaatatgcttaaaataagcaggtggatctatttcatgtttttgatcaaaaactatttgggatatgtatgggtagggtaaatcagtaagaggtgttatttggaaccttgttttggacagtttaccagttgccttttatcccaaagttgttgtaacctgctgtgatacgatgcttcaagagaaaatgcggttataaaaaatggttcagaattaaacttttaattcattc

SEQ ID NO: 38698 - DNA, 3356 bp, Artificial Sequence
  derived and/or modified sequence
aagcctctcggtctgtggcagcagcgttggcccggccccgggagcggagagcgaggggaggcggagacggaggaaggtctgaggagcagcttcagtccccgccgagccgccaccgcaggtcgaggacggtcggactcccgcggcgggaggagcctgttcccctgagggtatttgaagtataccatacaactgttttgaaaatccagcgtggacaatggctactcaagctgatttgatggagttggacatggccatggaaccagacagaaaagcggctgttagtcactggcagcaacagtcttacctggactctggaatccattctggtgccactaccacagctccttctctgagtggtaaaggcaatcctgaggaagaggatgtggatacctcccaagtcctgtatgagtgggaacagggattttctcagtccttcactcaagaacaagtagctgatattgatggacagtatgcaatgactcgagctcagagggtacgagctgctatgttccctgagacattagatgagggcatgcagatcccatctacacagtttgatgctgctcatcccactaatgtccagcgtttggctgaaccatcacagatgctgaaacatgcagttgtaaacttgattaactatcaagatgatgcagaacttgccacacgtgcaatccctgaactgacaaaactgctaaatgacgaggaccaggtggtggttaataaggctgcagttatggtccatcagctttctaaaaaggaagcttccagacacgctatcatgcgttctcctcagatggtgtctgctattgtacgtaccatgcagaatacaaatgatgtagaaacagctcgttgtaccgctgggaccttgcataacctttcccatcatcgtgagggcttactggccatctttaagtctggaggcattcctgccctggtgaaaatgcttggttcaccagtggattctgtgttgttttatgccattacaactctccacaaccttttattacatcaagaaggagctaaaatggcagtgcgtttagctggtgggctgcagaaaatggttgccttgctcaacaaaacaaatgttaaattcttggctattacgacagactgccttcaaattttagcttatggcaaccaagaaagcaagctcatcatactggctagtggtggaccccaagctttagtaaatataatgaggacctatacttacgaaaaactactgtggaccacaagcagagtgctgaaggtgctatctgtctgctctagtaataagccggctattgtagaagctggtggaatgcaagctttaggacttcacctgacagatccaagtcaacgtcttgttcagaactgtctttggactctcaggaatctttcagatgctgcaactaaacaggaagggatggaaggtctccttgggactcttgttcagcttctgggttcagatgatataaatgtggtcacctgtgcagctggaattctttctaacctcacttgcaataattataagaacaagatgatggtctgccaagtgggtggtatagaggctcttgtgcgtactgtccttcgggctggtgacagggaagacatcactgagcctgccatctgtgctcttcgtcatctgaccagccgacaccaagaagcagagatggcccagaatgcagttcgccttcactatggactaccagttgtggttaagctcttacacccaccatcccactggcctctgataaaggctactgttggattgattcgaaatcttgccctttgtcccgcaaatcatgcacctttgcgtgagcagggtgccattccacgactagttcagttgcttgttcgtgcacatcaggatacccagcgccgtacgtccatgggtgggacacagcagcaatttgtggagggggtccgcatggaagaaatagttgaaggttgtaccggagcccttcacatcctagctcgggatgttcacaaccgaattgttatcagaggactaaataccattccattgtttgtgcagctgctttattctcccattgaaaacatccaaagagtagctgcaggggtcctctgtgaacttgctcaggacaaggaagctgcagaagctattgaagctgagggagccacagctcctctgacagagttacttcactctaggaatgaaggtgtggcgacatatgcagctgctgttttgttccgaatgtctgaggacaagccacaagattacaagaaacggctttcagttgagctgaccagctctctcttcagaacagagccaatggcttggaatgagactgctgatcttggacttgatattggtgcccagggagaaccccttggatatcgccaggatgatcctagctatcgttcttttcactctggtggatatggccaggatgccttgggtatggaccccatgatggaacatgagatgggtggccaccaccctggtgctgactatccagttgatgggctgccagatctggggcatgcccaggacctcatggatgggctgcctccaggtgacagcaatcagctggcctggtttgatactgacctgtaaatcatcctttagctgtattgtctgaacttgcattgtgattggcctgtagagttgctgagagggctcgaggggtgggctggtatctcagaaagtgcctgacacactaaccaagctgagtttcctatgggaacaattgaagtaaactttttgttctggtcctttttggtcgaggagtaacaatacaaatggattttgggagtgactcaagaagtgaagaatgcacaagaatggatcacaagatggaatttatcaaaccctagccttgcttgttaaatttttttttttttttttttaagaatatctgtaatggtactgactttgcttgctttgaagtagctctttttttttttttttttttttttttgcagtaactgttttttaagtctctcgtagtgttaagttatagtgaatactgctacagcaatttctaatttttaagaattgagtaatggtgtagaacactaattcataatcactctaattaattgtaatctgaataaagtgtaacaattgtgtagcctttttgtataaaatagacaaatagaaaatggtccaattagtttcctttttaatatgcttaaaataagcaggtggatctatttcatgtttttgatcaaaaactatttgggatatgtatgggtagggtaaatcagtaagaggtgttatttggaaccttgttttggacagtttaccagttgccttttatcccaaagttgttgtaacctgctgtgatacgatgcttcaagagaaaatgcggttataaaaaatggttcagaattaaacttttaattcattc

SEQ ID NO: 38699 - DNA, 2513 bp, Artificial Sequence
  derived and/or modified sequence
aaagagggacggaatactgcagtgctagggtgctggagtccagaaatgattttttcgatgaatttaggattttgccgcagtatacatctgcagtcccagaatcctccgggtatttgaagtataccatacaactgttttgaaaatccagcgtggacaatggctactcaagctgatttgatggagttggacatggccatggaaccagacagaaaagcggctgttagtcactggcagcaacagtcttacctggactctggaatccattctggtgccactaccacagctccttctctgagtggtaaaggcaatcctgaggaagaggatgtggatacctcccaagtcctgtatgagtgggaacagggattttctcagtccttcactcaagaacaagtagctgatattgatggacagtatgcaatgactcgagctcagagggtacgagctgctatgttccctgagacattagatgagggcatgcagatcccatctacacagtttgatgctgctcatcccactaatgtccagcgtttggctgaaccatcacagatgctgaaacatgcagttgtaaacttgattaactatcaagatgatgcagaacttgccacacgtgcaatccctgaactgacaaaactgctaaatgacgaggaccaggtggtggttaataaggctgcagttatggtccatcagctttctaaaaaggaagcttccagacacgctatcatgcgttctcctcagatggtgtctgctattgtacgtaccatgcagaatacaaatgatgtagaaacagctcgttgtaccgctgggaccttgcataacctttcccatcatcgtgagggcttactggccatctttaagtctggaggcattcctgccctggtgaaaatgcttggttcaccagtggattctgtgttgttttatgccattacaactctccacaaccttttattacatcaagaaggagctaaaatggcagtgcgtttagctggtgggctgcagaaaatggttgccttgctcaacaaaacaaatgttaaattcttggctattacgacagactgccttcaaattttagcttatggcaaccaagaaagcaagctcatcatactggctagtggtggaccccaagctttagtaaatataatgaggacctatacttacgaaaaactactgtggaccacaagcagagtgctgaaggtgctatctgtctgctctagtaataagccggctattgtagaagctggtggaatgcaagctttaggacttcacctgacagatccaagtcaacgtcttgttcagaactgtctttggactctcaggaatctttcagatgctgcaactaaacaggaagggatggaaggtctccttgggactcttgttcagcttctgggttcagatgatataaatgtggtcacctgtgcagctggaattctttctaacctcacttgcaataattataagaacaagatgatggtctgccaagtgggtggtatagaggctcttgtgcgtactgtccttcgggctggtgacagggaagacatcactgagcctgccatctgtgctcttcgtcatctgaccagccgacaccaagaagcagagatggcccagaatgcagttcgccttcactatggactaccagttgtggttaagctcttacacccaccatcccactggcctctgataaaggctactgttggattgattcgaaatcttgccctttgtcccgcaaatcatgcacctttgcgtgagcagggtgccattccacgactagttcagttgcttgttcgtgcacatcaggatacccagcgccgtacgtccatgggtgggacacagcagcaatttgtggagggggtccgcatggaagaaatagttgaaggttgtaccggagcccttcacatcctagctcgggatgttcacaaccgaattgttatcagaggactaaataccattccattgtttgtgcagctgctttattctcccattgaaaacatccaaagagtagctgcaggggtcctctgtgaacttgctcaggacaaggaagctgcagaagctattgaagctgagggagccacagctcctctgacagagttacttcactctaggaatgaaggtgtggcgacatatgcagctgctgttttgttccgaatgtctgaggacaagccacaagattacaagaaacggctttcagttgagctgaccagctctctcttcagaacagagccaatggcttggaatgagactgctgatcttggacttgatattggtgcccagggagaaccccttggatatcgccaggatgatcctagctatcgttcttttcactctggtggatatggccaggatgccttgggtatggaccccatgatggaacatgagatgggtggccaccaccctggtgctgactatccagttgatgggctgccagatctggggcatgcccaggacctcatggatgggctgcctccaggtgacagcaatcagctggcctggtttgatactgacctgtaaatcatccttta

SEQ ID NO: 38700 - DNA, 2841 bp, Artificial Sequence
  derived and/or modified sequence
ggcggcaggatacagcggcttctgcgcgacttataagagctccttgtgcggcgccattttaagcctctcggtctgtggcagcagcgttggcccggccccgggagcggagagcgaggggaggcggagacggaggaaggtctgaggagcagcttcagtccccgccgagccgccaccgcaggtcgaggacggtcggactcccgcggcgggaggagcctgttcccctgagggtatttgaagtataccatacaactgttttgaaaatccagcgtggacaatggctactcaaggctaccttttgctccattttctgctcactcctcctaatggcttggtgaaatagcaaacaagccaccagcaggaatctagtctggatgactgcttctggagcctggatgcagtaccattcttccactgattcactgatttgatggagttggacatggccatggaaccagacagaaaagcggctgttagtcactggcagcaacagtcttacctggactctggaatccattctggtgccactaccacagctccttctctgagtggtaaaggcaatcctgaggaagaggatgtggatacctcccaagtcctgtatgagtgggaacagggattttctcagtccttcactcaagaacaagtagctgatattgatggacagtatgcaatgactcgagctcagagggtacgagctgctatgttccctgagacattagatgagggcatgcagatcccatctacacagtttgatgctgctcatcccactaatgtccagcgtttggctgaaccatcacagatgctgaaacatgcagttgtaaacttgattaactatcaagatgatgcagaacttgccacacgtgcaatccctgaactgacaaaactgctaaatgacgaggaccaggtggtggttaataaggctgcagttatggtccatcagctttctaaaaaggaagcttccagacacgctatcatgcgttctcctcagatggtgtctgctattgtacgtaccatgcagaatacaaatgatgtagaaacagctcgttgtaccgctgggaccttgcataacctttcccatcatcgtgagggcttactggccatctttaagtctggaggcattcctgccctggtgaaaatgcttggttcaccagtggattctgtgttgttttatgccattacaactctccacaaccttttattacatcaagaaggagctaaaatggcagtgcgtttagctggtgggctgcagaaaatggttgccttgctcaacaaaacaaatgttaaattcttggctattacgacagactgccttcaaattttagcttatggcaaccaagaaagcaagctcatcatactggctagtggtggaccccaagctttagtaaatataatgaggacctatacttacgaaaaactactgtggaccacaagcagagtgctgaaggtgctatctgtctgctctagtaataagccggctattgtagaagctggtggaatgcaagctttaggacttcacctgacagatccaagtcaacgtcttgttcagaactgtctttggactctcaggaatctttcagatgctgcaactaaacaggaagggatggaaggtctccttgggactcttgttcagcttctgggttcagatgatataaatgtggtcacctgtgcagctggaattctttctaacctcacttgcaataattataagaacaagatgatggtctgccaagtgggtggtatagaggctcttgtgcgtactgtccttcgggctggtgacagggaagacatcactgagcctgccatctgtgctcttcgtcatctgaccagccgacaccaagaagcagagatggcccagaatgcagttcgccttcactatggactaccagttgtggttaagctcttacacccaccatcccactggcctctgataaaggctactgttggattgattcgaaatcttgccctttgtcccgcaaatcatgcacctttgcgtgagcagggtgccattccacgactagttcagttgcttgttcgtgcacatcaggatacccagcgccgtacgtccatgggtgggacacagcagcaatttgtggagggggtccgcatggaagaaatagttgaaggttgtaccggagcccttcacatcctagctcgggatgttcacaaccgaattgttatcagaggactaaataccattccattgtttgtgcagctgctttattctcccattgaaaacatccaaagagtagctgcaggggtcctctgtgaacttgctcaggacaaggaagctgcagaagctattgaagctgagggagccacagctcctctgacagagttacttcactctaggaatgaaggtgtggcgacatatgcagctgctgttttgttccgaatgtctgaggacaagccacaagattacaagaaacggctttcagttgagctgaccagctctctcttcagaacagagccaatggcttggaatgagactgctgatcttggacttgatattggtgcccagggagaaccccttggatatcgccaggatgatcctagctatcgttcttttcactctggtggatatggccaggatgccttgggtatggaccccatgatggaacatgagatgggtggccaccaccctggtgctgactatccagttgatgggctgccagatctggggcatgcccaggacctcatggatgggctgcctccaggtgacagcaatcagctggcctggtttgatactgacctgtaaatcatcctttagctgtattgtctgaacttgcattgtgattggcctgtagagttgctgagagggctcgaggggtgggctggtatctcaga

SEQ ID NO: 38701 - DNA, 2346 bp, Artificial Sequence
  derived and/or modified sequence
atggccacccaggccgacctgatggagctggacatggccatggagcccgacagaaaggccgccgtgagccactggcagcagcagagctacctggacagcggcatccacagcggcgccaccaccaccgcccccagcctgagcggcaagggcaaccccgaggaggaggacgtggacaccagccaggtgctgtacgagtgggagcagggcttcagccagagcttcacccaggagcaggtggccgacatcgacggccagtacgccatgaccagagcccagagagtgagagccgccatgttccccgagaccctggacgagggcatgcagatccccagcacccagttcgacgccgcccaccccaccaacgtgcagagactggccgagcccagccagatgctgaagcacgccgtggtgaacctgatcaactaccaggacgacgccgagctggccaccagagccatccccgagctgaccaagctgctgaacgacgaggaccaggtggtggtgaacaaggccgccgtgatggtgcaccagctgagcaagaaggaggccagcagacacgccatcatgagaagcccccagatggtgagcgccatcgtgagaaccatgcagaacaccaacgacgtggagaccgccagatgcaccgccggcaccctgcacaacctgagccaccacagagagggcctgctggccatcttcaagagcggcggcatccccgccctggtgaagatgctgggcagccccgtggacagcgtgctgttctacgccatcaccaccctgcacaacctgctgctgcaccaggagggcgccaagatggccgtgagactggccggcggcctgcagaagatggtggccctgctgaacaagaccaacgtgaagttcctggccatcaccaccgactgcctgcagatcctggcctacggcaaccaggagagcaagctgatcatcctggccagcggcggcccccaggccctggtgaacatcatgagaacctacacctacgagaagctgctgtggaccaccagcagagtgctgaaggtgctgagcgtgtgcagcagcaacaagcccgccatcgtggaggccggcggcatgcaggccctgggcctgcacctgaccgaccccagccagagactggtgcagaactgcctgtggaccctgagaaacctgagcgacgccgccaccaagcaggagggcatggagggcctgctgggcaccctggtgcagctgctgggcagcgacgacatcaacgtggtgacctgcgccgccggcatcctgagcaacctgacctgcaacaactacaagaacaagatgatggtgtgccaggtgggcggcatcgaggccctggtgagaaccgtgctgagagccggcgacagagaggacatcaccgagcccgccatctgcgccctgagacacctgaccagcagacaccaggaggccgagatggcccagaacgccgtgagactgcactacggcctgcccgtggtggtgaagctgctgcacccccccagccactggcccctgatcaaggccaccgtgggcctgatcagaaacctggccctgtgccccgccaaccacgcccccctgagagagcagggcgccatccccagactggtgcagctgctggtgagagcccaccaggacacccagagaagaaccagcatgggcggcacccagcagcagttcgtggagggcgtgagaatggaggagatcgtggagggctgcaccggcgccctgcacatcctggccagagacgtgcacaacagaatcgtgatcagaggcctgaacaccatccccctgttcgtgcagctgctgtacagccccatcgagaacatccagagagtggccgccggcgtgctgtgcgagctggcccaggacaaggaggccgccgaggccatcgaggccgagggcgccaccgcccccctgaccgagctgctgcacagcagaaacgagggcgtggccacctacgccgccgccgtgctgttcagaatgagcgaggacaagccccaggactacaagaagagactgagcgtggagctgaccagcagcctgttcagaaccgagcccatggcctggaacgagaccgccgacctgggcctggacatcggcgcccagggcgagcccctgggctacagacaggacgaccccagctacagaagcttccacagcggcggctacggccaggacgccctgggcatggaccccatgatggagcacgagatgggcggccaccaccccggcgccgactaccccgtggacggcctgcccgacctgggccacgcccaggacctgatggacggcctgccccccggcgacagcaaccagctggcctggttcgacaccgacctgtag

SEQ ID NO: 38702 - DNA, 42 bp, Artificial Sequence
  derived and/or modified sequence
atggccacccaggccgacctgatggagctggacatggcctag

SEQ ID NO: 38703 - DNA, 2325 bp, Artificial Sequence
  derived and/or modified sequence
atggagctggacatggccatggagcccgacagaaaggccgccgtgagccactggcagcagcagagctacctggacagcggcatccacagcggcgccaccaccaccgcccccagcctgagcggcaagggcaaccccgaggaggaggacgtggacaccagccaggtgctgtacgagtgggagcagggcttcagccagagcttcacccaggagcaggtggccgacatcgacggccagtacgccatgaccagagcccagagagtgagagccgccatgttccccgagaccctggacgagggcatgcagatccccagcacccagttcgacgccgcccaccccaccaacgtgcagagactggccgagcccagccagatgctgaagcacgccgtggtgaacctgatcaactaccaggacgacgccgagctggccaccagagccatccccgagctgaccaagctgctgaacgacgaggaccaggtggtggtgaacaaggccgccgtgatggtgcaccagctgagcaagaaggaggccagcagacacgccatcatgagaagcccccagatggtgagcgccatcgtgagaaccatgcagaacaccaacgacgtggagaccgccagatgcaccgccggcaccctgcacaacctgagccaccacagagagggcctgctggccatcttcaagagcggcggcatccccgccctggtgaagatgctgggcagccccgtggacagcgtgctgttctacgccatcaccaccctgcacaacctgctgctgcaccaggagggcgccaagatggccgtgagactggccggcggcctgcagaagatggtggccctgctgaacaagaccaacgtgaagttcctggccatcaccaccgactgcctgcagatcctggcctacggcaaccaggagagcaagctgatcatcctggccagcggcggcccccaggccctggtgaacatcatgagaacctacacctacgagaagctgctgtggaccaccagcagagtgctgaaggtgctgagcgtgtgcagcagcaacaagcccgccatcgtggaggccggcggcatgcaggccctgggcctgcacctgaccgaccccagccagagactggtgcagaactgcctgtggaccctgagaaacctgagcgacgccgccaccaagcaggagggcatggagggcctgctgggcaccctggtgcagctgctgggcagcgacgacatcaacgtggtgacctgcgccgccggcatcctgagcaacctgacctgcaacaactacaagaacaagatgatggtgtgccaggtgggcggcatcgaggccctggtgagaaccgtgctgagagccggcgacagagaggacatcaccgagcccgccatctgcgccctgagacacctgaccagcagacaccaggaggccgagatggcccagaacgccgtgagactgcactacggcctgcccgtggtggtgaagctgctgcacccccccagccactggcccctgatcaaggccaccgtgggcctgatcagaaacctggccctgtgccccgccaaccacgcccccctgagagagcagggcgccatccccagactggtgcagctgctggtgagagcccaccaggacacccagagaagaaccagcatgggcggcacccagcagcagttcgtggagggcgtgagaatggaggagatcgtggagggctgcaccggcgccctgcacatcctggccagagacgtgcacaacagaatcgtgatcagaggcctgaacaccatccccctgttcgtgcagctgctgtacagccccatcgagaacatccagagagtggccgccggcgtgctgtgcgagctggcccaggacaaggaggccgccgaggccatcgaggccgagggcgccaccgcccccctgaccgagctgctgcacagcagaaacgagggcgtggccacctacgccgccgccgtgctgttcagaatgagcgaggacaagccccaggactacaagaagagactgagcgtggagctgaccagcagcctgttcagaaccgagcccatggcctggaacgagaccgccgacctgggcctggacatcggcgcccagggcgagcccctgggctacagacaggacgaccccagctacagaagcttccacagcggcggctacggccaggacgccctgggcatggaccccatgatggagcacgagatgggcggccaccaccccggcgccgactaccccgtggacggcctgcccgacctgggccacgcccaggacctgatggacggcctgccccccggcgacagcaaccagctggcctggttcgacaccgacctgtag

SEQ ID NO: 38704 - protein, 487 aa, Artificial Sequence
  derived and/or modified sequence
MSLPNSSCLLEDKMCEGNKTTMASPQLMPLVVVLSTICLVTVGLNLLVLYAVRSERKLHTVGNLYIVSLSVADLIVGAVVMPMNILYLLMSKWSLGRPLCLFWLSMDYVASTASIFSVFILCIDRYRSVQQPLRYLKYRTKTRASATILGAWFLSFLWVIPILGWNHFMQQTSVRREDKCETDFYDVTWFKVMTAIINFYLPTLLMLWFYAKIYKAVRQHCQHRELINRSLPSFSEIKLRPENPKGDAKKPGKESPWEVLKRKPKDAGGGSVLKSPSQTPKEMKSPVVFSQEDDREVDKLYCFPLDIVHMQAAAEGSSRDYVAVNRSHGQLKTDEQGLNTHGASEISEDQMLGDSQSFSRTDSDTTTETAPGKGKLRSGSNTGLDYIKFTWKRLRSHSRQYVSGLHMNRERKAAKQLGFIMAAFILCWIPYFIFFMVIAFCKNCCNEHLHMFTIWLGYINSTLNPLIYPLCNENFKKTFKRILHIRS

SEQ ID NO: 38705 - DNA, 1464 bp, Artificial Sequence
  derived and/or modified sequence
atgtccttgccgaattcatcttgtcttctggaggacaaaatgtgcgagggaaacaaaaccacgatggccagcccccagctcatgccactggtggtcgtattatccacgatatgcctggtgactgtggggcttaacctgctcgtgctgtacgcagtgcggtccgagcgtaagctccataccgtgggaaacctgtacatagtgtccctatccgtcgccgatctgattgtgggtgccgtcgtgatgccaatgaacattctctatctgctgatgagcaaatggtcccttggaagaccattgtgcttattttggttgagcatggactatgtggcttccactgcttcaattttctccgtatttatactgtgtatcgatcgttataggtccgtgcagcaaccactgagatacctcaagtaccgaacgaaaacccgagcttcagctaccatcctcggagcctggtttctgtcttttctctgggtgatcccgatattgggctggaatcacttcatgcagcagacttcagttcggcgcgaagacaaatgcgaaaccgacttttacgatgttacgtggtttaaggttatgacagctatcataaacttctatctccccactctcctcatgctgtggttctacgctaagatttacaaagctgtcaggcagcactgccagcaccgggagcttatcaacaggagcctccccagctttagcgagattaaattgagaccagagaatccaaagggcgatgccaagaagcctgggaaagagtctccatgggaggtactcaagcgcaaaccaaaggatgctgggggggggtccgtgcttaaaagcccttcgcagactccaaaggagatgaaatcacccgttgtgttctcccaagaagacgacagggaggtggacaagttgtactgctttcctcttgacatcgttcatatgcaggcggccgccgaagggtcttctcgtgattatgtggccgttaacaggtcccacggacagctgaagaccgatgagcagggcttgaatacacacggagcctcagagatcagcgaggatcaaatgcttggcgattcgcaatccttttcgagaacagacagtgacaccaccacggaaaccgctcccggaaagggtaagctaaggtcagggtcaaatacgggtctagattatatcaagttcacctggaaacggcttaggagtcacagtcgccagtatgtatctgggctgcatatgaaccgtgagcggaaagctgccaaacagctcggcttcatcatggcagcttttattctgtgctggataccgtatttcatattctttatggtcatagccttttgtaagaactgctgtaatgaacacctgcatatgttcactatttggcttggctacataaattccaccctgaatcctttaatatatccgctttgtaatgagaattttaaaaagactttcaagcgtatattgcacattcgaagctag

SEQ ID NO: 38706 - DNA, 39 bp, Artificial Sequence
  derived and/or modified sequence
atgtccttgccaaattcgagctgcctgctggaagactag

SEQ ID NO: 38707 - DNA, 1464 bp, Artificial Sequence
  derived and/or modified sequence
atgtcactgccaaattcaagttgtctccttgaagataagatgtgcgagggaaataagaccaccatggcatccccccagctaatgccgttggtagtggtgcttagtacaatttgcttagtcaccgttgggcttaacctgctagtgctctatgccgtgcgcagtgagcgcaagctacacaccgtcggcaacctgtacattgtctccttgagtgtcgccgatctgatcgtaggcgcagtcgtgatgcccatgaacattctgtacctgctgatgtctaaatggtcactggggcgtccactgtgccttttctggctgagtatggactatgtggctagtaccgcctctattttttctgtgttcatcctttgtattgacagatataggagtgtccaacaaccactgcgctaccttaagtatcgtaccaaaactcgggcctcagctaccatcctgggcgcatggttcctcagcttcctatgggtgatccctatccttggctggaaccatttcatgcaacagacttccgtgaggcgagaggataaatgcgaaaccgacttctatgacgtaacttggtttaaagtgatgacggccataataaatttctatctgcccaccctcttaatgttatggttttacgccaagatctataaagctgtgcggcaacattgccaacatcgggaattgataaatcggtccctgcccagcttcagcgagatcaagctgcgcccagagaacccaaaaggagacgctaagaaacctggcaaagagtctccttgggaagtgcttaagaggaaacctaaggatgcaggtggcgggtccgtactcaagagccccagccaaacacccaaggagatgaagtcaccggtcgtattttcccaagaggacgacagggaggttgataagctctattgtttcccgttggatatagtgcatatgcaggccgcagcagagggaagcagccgagactacgtggccgttaataggtcccatggccagcttaagaccgatgagcaaggactgaacactcacggagctagcgaaattagcgaagaccaaatgttgggcgatagccagtcattcagtcggacggattcagatacaactacagaaactgctccaggaaaaggaaaacttcgctccgggagcaacaccgggttggattatataaaatttacctggaagagactgcggagccacagtagacagtacgtatccggactacatatgaatcgggaaagaaaagctgctaagcagcttggatttatcatggcagccttcattttatgctggattccatacttcatcttcttcatggtgatcgcattctgcaagaactgttgcaatgagcacctgcatatgtttacaatttggctggggtatatcaacagcaccctaaacccgttaatctaccccttgtgcaacgagaacttcaaaaagacttttaaacggatcctccacatccgctcttag

SEQ ID NO: 38708 - DNA, 1464 bp, Artificial Sequence
  derived and/or modified sequence
atgtccttgcccaactcctcatgtctgctcgaagacaagatgtgcgagggcaataaaactaccatggcttctcctcaactcatgccattggtggtagttctgagcaccatctgtctggtcacggtgggcctcaatttacttgtgctgtacgctgtcagaagtgagagaaagttacacaccgtgggcaatctttatatagtgagtctgtctgttgctgacctgatcgtcggcgcagtcgtcatgcccatgaacatcctgtatctcctcatgtcgaagtggtctctggggcgccctctgtgtctgttctggttatctatggattacgtagcctctaccgcctcgatcttctcagtctttattctctgcatcgatagataccgcagtgtacagcagccacttcgttacctaaaataccgaacgaaaacacgtgcaagcgccactatcctgggtgcctggttccttagcttcctgtgggtgattcctatcctcggttggaatcatttcatgcagcagacaagcgtgcgccgggaggataagtgcgaaaccgatttttatgacgtaacatggttcaaagttatgacggccattattaacttttatctgccaactcttctcatgttgtggttctatgccaagatctacaaggcagtgcgacagcactgccagcaccgggaactgattaacaggtcccttccttctttctccgagatcaaattgcgacctgaaaacccaaagggcgatgctaaaaagccaggcaaggagagcccctgggaagtcttaaagaggaagcctaaggacgcgggcggaggcagcgtgctaaaatcacccagtcagacaccaaaggagatgaaatctccagtggtattttcccaggaggatgaccgtgaagtggacaagttgtactgctttccactcgatatagttcacatgcaggccgctgctgaggggagctctcgcgactacgttgcagtgaaccggagccacggacaactgaaaactgacgagcaggggctgaacactcacggggcatccgagatatcagaagatcagatgctcggggattcccagtcgttcagccggactgattcggatacaaccaccgagaccgcccctggtaagggaaagttaagatcagggagcaacacagggctggactacatcaagttcacatggaagcgcttgaggagtcatagccggcaatacgtttccggtttgcacatgaatcgggagcggaaggccgccaaacaactcggcttcattatggcggccttcatcctgtgctggatcccatattttatattttttatggtgattgcattctgtaaaaactgctgcaatgaacatcttcacatgtttaccatctggttgggctatatcaactctacactcaatcctctgatatacccgctgtgcaatgagaattttaaaaaaacttttaagcgcatattgcacatcaggagttag

SEQ ID NO: 38709 - DNA, 4711 bp, Artificial Sequence
  derived and/or modified sequence
agtattggagtgttacagggagacatacaggatttaagaagcccatcatggagaagaccttcaattacagagataaaaagtttttcttgtgaacaagttacactagatggaagataacagactgaggagtgagctgcttctgactcgattaaaaagggagtgagccataactggtggctgctcttgcgccaatgagcctccccaattcctcctgcctcttagaagacaagatgtgtgagggcaacaagaccactatggccagcccccagctgatgcccctggtggtggtcctgagcactatctgcttggtcacagtagggctcaacctgctggtgctgtatgccgtacggagtgagcggaagctccacactgtggggaacctgtacatcgtcagcctctcggtggcggacttgatcgtgggtgccgtcgtcatgcctatgaacatcctctacctgctcatgtccaagtggtcactgggccgtcctctctgcctcttttggctttccatggactatgtggccagcacagcgtccattttcagtgtcttcatcctgtgcattgatcgctaccgctctgtccagcagcccctcaggtaccttaagtatcgtaccaagacccgagcctcggccaccattctgggggcctggtttctctcttttctgtgggttattcccattctaggctggaatcacttcatgcagcagacctcggtgcgccgagaggacaagtgtgagacagacttctatgatgtcacctggttcaaggtcatgactgccatcatcaacttctacctgcccaccttgctcatgctctggttctatgccaagatctacaaggccgtacgacaacactgccagcaccgggagctcatcaataggtccctcccttccttctcagaaattaagctgaggccagagaaccccaagggggatgccaagaaaccagggaaggagtctccctgggaggttctgaaaaggaagccaaaagatgctggtggtggatctgtcttgaagtcaccatcccaaacccccaaggagatgaaatccccagttgtcttcagccaagaggatgatagagaagtagacaaactctactgctttccacttgatattgtgcacatgcaggctgcggcagaggggagtagcagggactatgtagccgtcaaccggagccatggccagctcaagacagatgagcagggcctgaacacacatggggccagcgagatatcagaggatcagatgttaggtgatagccaatccttctctcgaacggactcagataccaccacagagacagcaccaggcaaaggcaaattgaggagtgggtctaacacaggcctggattacatcaagtttacttggaagaggctccgctcgcattcaagacagtatgtatctgggttgcacatgaaccgcgaaaggaaggccgccaaacagttgggttttatcatggcagccttcatcctctgctggatcccttatttcatcttcttcatggtcattgccttctgcaagaactgttgcaatgaacatttgcacatgttcaccatctggctgggctacatcaactccacactgaaccccctcatctaccccttgtgcaatgagaacttcaagaagacattcaagagaattctgcatattcgctcctaagggaggctctgaggggatgcaacaaaatgatccttatgatgtccaacaaggaaatagaggacgaaggcctgtgtgttgccaggcaggcacctgggctttctggaatccaaaccacagtcttaggggcttggtagtttggaaagttcttaggcaccatagaagaacagcagatggcggtgatcagcagagagattgaactttgaggaggaagcagaatctttgcaagaaagtcagacctgtttcttgtaactgggttcaaaaagaaaaaaataataaaaataaaagagagagagaatcagacctgggtggaactctcctgctcctcaggaactatgggagcctcagactcattgtaattcaagctttccgagtcaagtgattgacaactgaagagacacgtggctagggttccactggagaattgaaaaggactcttgagccctcctggaatggagctgtataactgtgcagagactttatccatgccaatagttgctgtccccttccaggggtcaccttgagaggcatgacagctgttccacaggggctatcccttctcagaaaacttctcttctgagcctctttaacagctttctccagaaccagtgtctgaaccaccctggaaattctgccttattatttcttactcaaacatgtttagagtggatagaaaattatgcagcttgcacacccatcgtctttaaccccaaatttcctttggctattaaaaaagtggtggcaaaagacatcctcaaaagaaagagaaatgaaatatttttgaatggttgcacgttaaaaattaaaagaaggaatgggggcagaatgccatatttttgagggctgtactaggtttatctcatttaagccccacaacaccccacaggagggtaattttctaactctagtttgcagaggagcaaattgaggttcagcaaggtgagagaggtacccaaggtcacatagctagttatgtgagaaagttagagtacagatcctctggggtttcagcttattgtagcatattttctccgaaaggcaaaaatgtgcccttttggccgggcatggtagctcaagcctataatcccagcatgttgagaggctgaggtgggcagatcatttgaggccaggagttcaagaccagtctggccaatatggagaaaccttgtctctactaaaaacacaaaaattatctgggcatggtggggcatgcctgtagtcccacttacttgggaggccgaggcacgagaattgcttgaacccgggaggtggaggttgccgtgagccaagatcacgccactgcactccagcctgggcaacagagcaagactctgtctcaaaaaaaaaaatacaatattttaacaatgtgccctcttaagtgtgcacagatacacatacacggtattcccaagagtggtggcagctcaaaatgatatgtttgagtagacgaacagctgacatggagttcccgtgcacctacggaaggggacgctttgaaggaaccaagtgcatttttatctgtgagttctgttgtgtttgtcaaaaagtcattgtaatctttcatagccatacctggtaagcaaaaactagtaaagacataggaacatgtagttttacttggtgtttatgttgcaatctggttgtgatttatattttaaagcttggtgctaaaccacaatatgtatagcatatggagtgcctgtacaagctgatgttttgtattttgtgttcctctttgcatgatctgtcaaagtgagatatttttacctgcctaaaatatgatgtttaaaagcatactctatgtgatttatttatttctacctttctgagtctcttggactaagaagatgttttgaaatgtaccatcaaatgttaacagagtttgatatgggctttctctttggtttctcatcacatttgtaaatgtcttttcaaaaggatttactttttgtaaaaagcttcattctcactctgctttgcatcccccaaacttcttgttcaaaacggggggagtttaggagactttaatcccggtttcagaagctgcagctggtctgtttccaggtcagaaaccattgttcagaagacctccctgtgagagagttgctcctcagggtccctcaggaccaaagaacactcgaaaagagcacttcacacagacaagtggctaagtgtccattatttaccttgaacaatcaaggcaactagtggagagaactgattgtgagctctgcctctgggtcagagagacctggatttgagtctgacaagaacaagaaatggtcaataaatataaattaccagcgtctaaggaacaaggtctatgcattattgtatacagtgtctctagtgcttgtatagtgtctggtatacagagggcactcctatgcatttttaaaacatgctgagcacataccatgtgccaggctttgtgttttatctaatgttatctaatggtattggtgccattatgtaatgttgcctttacaacaacctcatgagggagatttccatctttacaaataggcaaactgaggcccagagagattgaggaactgctccgaggtctgattctggaatgtgcttcctttccactttatcaatctgctcttcgtactcctgtctgaacgatggaaattaatttttgaatgtataaaagacaacagactatgatacagaaatgtcagccccagcccactaagaaagccccagcccatcagtggctaatggctttaataaattggtcatttggctacttggcttgtggacaatctctgacctcttttgaagatgggcactgcatggacttccaggaggtggatttaatagtcttaactcagcatgaaaaagatgctgggatgctcctggctatttatgcaccctaagtgccatagagacatgctgttggcaaggcatggtggctcatgcctgtaatcccagcacactgggaggctgacgcgggcagatggctggagtccaggagttcgagacaagcctgggcaccatggtgaaatcctgtctctactaaaaataaaaaattagccaggggctgtgacgca

SEQ ID NO: 38710 - DNA, 4278 bp, Artificial Sequence
  derived and/or modified sequence
accaaactttccccggagccggcgccgggagtgagccataactggtggctgctcttgcgccaatgagcctccccaattcctcctgcctcttagaagacaagatgtgtgagggcaacaagaccactatggccagcccccagctgatgcccctggtggtggtcctgagcactatctgcttggtcacagtagggctcaacctgctggtgctgtatgccgtacggagtgagcggaagctccacactgtggggaacctgtacatcgtcagcctctcggtggcggacttgatcgtgggtgccgtcgtcatgcctatgaacatcctctacctgctcatgtccaagtggtcactgggccgtcctctctgcctcttttggctttccatggactatgtggccagcacagcgtccattttcagtgtcttcatcctgtgcattgatcgctaccgctctgtccagcagcccctcaggtaccttaagtatcgtaccaagacccgagcctcggccaccattctgggggcctggtttctctcttttctgtgggttattcccattctaggctggaatcacttcatgcagcagacctcggtgcgccgagaggacaagtgtgagacagacttctatgatgtcacctggttcaaggtcatgactgccatcatcaacttctacctgcccaccttgctcatgctctggttctatgccaagatctacaaggccgtacgacaacactgccagcaccgggagctcatcaataggtccctcccttccttctcagaaattaagctgaggccagagaaccccaagggggatgccaagaaaccagggaaggagtctccctgggaggttctgaaaaggaagccaaaagatgctggtggtggatctgtcttgaagtcaccatcccaaacccccaaggagatgaaatccccagttgtcttcagccaagaggatgatagagaagtagacaaactctactgctttccacttgatattgtgcacatgcaggctgcggcagaggggagtagcagggactatgtagccgtcaaccggagccatggccagctcaagacagatgagcagggcctgaacacacatggggccagcgagatatcagaggatcagatgttaggtgatagccaatccttctctcgaacggactcagataccaccacagagacagcaccaggcaaaggcaaattgaggagtgggtctaacacaggcctggattacatcaagtttacttggaagaggctccgctcgcattcaagacagtatgtatctgggttgcacatgaaccgcgaaaggaaggccgccaaacagttgggttttatcatggcagccttcatcctctgctggatcccttatttcatcttcttcatggtcattgccttctgcaagaactgttgcaatgaacatttgcacatgttcaccatctggctgggctacatcaactccacactgaaccccctcatctaccccttgtgcaatgagaacttcaagaagacattcaagagaattctgcatattcgctcctaagggaggctctgaggggatgcaacaaaatgatccttatgatgtccaacaaggaaatagaggacgaaggcctgtgtgttgccaggcaggcacctgggctttctggaatccaaaccacagtcttaggggcttggtagtttggaaagttcttaggcaccatagaagaacagcagatggcggtgatcagcagagagattgaactttgaggaggaagcagaatctttgcaagaaagtcagacctgtttcttgtaactgggttcaaaaagaaaaaaataataaaaataaaagagagagagaatcagacctgggtggaactctcctgctcctcaggaactatgggagcctcagactcattgtaattcaagctttccgagtcaagtgattgacaactgaagagacacgtggctagggttccactggagaattgaaaaggactcttgagccctcctggaatggagctgtataactgtgcagagactttatccatgccaatagttgctgtccccttccaggggtcaccttgagaggcatgacagctgttccacaggggctatcccttctcagaaaacttctcttctgagcctctttaacagctttctccagaaccagtgtctgaaccaccctggaaattctgccttattatttcttactcaaacatgtttagagtggatagaaaattatgcagcttgcacacccatcgtctttaaccccaaatttcctttggctattaaaaaagtggtggcaaaagacatcctcaaaagaaagagaaatgaaatatttttgaatggttgcacgttaaaaattaaaagaaggaatgggggcagaatgccatatttttgagggctgtactaggtttatctcatttaagccccacaacaccccacaggagggtaattttctaactctagtttgcagaggagcaaattgaggttcagcaaggtgagagaggtacccaaggtcacatagctagttatgtgagaaagttagagtacagatcctctggggtttcagcttattgtagcatattttctccgaaaggcaaaaatgtgcccttttggccgggcatggtagctcaagcctataatcccagcatgttgagaggctgaggtgggcagatcatttgaggccaggagttcaagaccagtctggccaatatggagaaaccttgtctctactaaaaacacaaaaattatctgggcatggtggggcatgcctgtagtcccacttacttgggaggccgaggcacgagaattgcttgaacccgggaggtggaggttgccgtgagccaagatcacgccactgcactccagcctgggcaacagagcaagactctgtctcaaaaaaaaaaatacaatattttaacaatgtgccctcttaagtgtgcacagatacacatacacggtattcccaagagtggtggcagctcaaaatgatatgtttgagtagacgaacagctgacatggagttcccgtgcacctacggaaggggacgctttgaaggaaccaagtgcatttttatctgtgagttctgttgtgtttgtcaaaaagtcattgtaatctttcatagccatacctggtaagcaaaaactagtaaagacataggaacatgtagttttacttggtgtttatgttgcaatctggttgtgatttatattttaaagcttggtgctaaaccacaatatgtatagcatatggagtgcctgtacaagctgatgttttgtattttgtgttcctctttgcatgatctgtcaaagtgagatatttttacctgcctaaaatatgatgtttaaaagcatactctatgtgatttatttatttctacctttctgagtctcttggactaagaagatgttttgaaatgtaccatcaaatgttaacagagtttgatatgggctttctctttggtttctcatcacatttgtaaatgtcttttcaaaaggatttactttttgtaaaaagcttcattctcactctgctttgcatcccccaaacttcttgttcaaaacggggggagtttaggagactttaatcccggtttcagaagctgcagctggtctgtttccaggtcagaaaccattgttcagaagacctccctgtgagagagttgctcctcagggtccctcaggaccaaagaacactcgaaaagagcacttcacacagacaagtggctaagtgtccattatttaccttgaacaatcaaggcaactagtggagagaactgattgtgagctctgcctctgggtcagagagacctggatttgagtctgacaagaacaagaaatggtcaataaatataaattaccagcgtctaaggaacaaggtctatgcattattgtatacagtgtctctagtgcttgtatagtgtctggtatacagagggcactcctatgcatttttaaaacatgctgagcacataccatgtgccaggctttgtgttttatctaatgttatctaatggtattggtgccattatgtaatgttgcctttacaacaacctcatgagggagatttccatctttacaaataggcaaactgaggcccagagagattgaggaactgctccgaggtctgattctggaatgtgcttcctttccactttatcaatctgctcttcgtactcctgtctgaacgatggaaattaatttttgaatgtataaaagacaacagactatgatacagaaatgtcagccccagcccactaagaaagccccagcccatcagtggctaatggctttaataaattggtcatttggcta

SEQ ID NO: 38711 - DNA, 2080 bp, Artificial Sequence
  derived and/or modified sequence
atttcaaagcacaccatgccggcagcacttggaggtggtatgtgctgggaaactgaccaacagtttagtcagactgagtcacttcaaggaggggagtggagacagcagtgggtgccagatgacacggagctgtcggcttccgtgtgcattttcttttgatagtagccgtagagaagttgtccgccaggcagccctcaatgggatttttcatttaagaaaaatcactctgctcgtgcactgatggagaaatgaactacaagaagcaagccctgaggtctggagacaggaagctactgaaaccagccagggagtgagccataactggtggctgctcttgcgccaatgagcctccccaattcctcctgcctcttagaagacaagatgtgtgagggcaacaagaccactatggccagcccccagctgatgcccctggtggtggtcctgagcactatctgcttggtcacagtagggctcaacctgctggtgctgtatgccgtacggagtgagcggaagctccacactgtggggaacctgtacatcgtcagcctctcggtggcggacttgatcgtgggtgccgtcgtcatgcctatgaacatcctctacctgctcatgtccaagtggtcactgggccgtcctctctgcctcttttggctttccatggactatgtggccagcacagcgtccattttcagtgtcttcatcctgtgcattgatcgctaccgctctgtccagcagcccctcaggtaccttaagtatcgtaccaagacccgagcctcggccaccattctgggggcctggtttctctcttttctgtgggttattcccattctaggctggaatcacttcatgcagcagacctcggtgcgccgagaggacaagtgtgagacagacttctatgatgtcacctggttcaaggtcatgactgccatcatcaacttctacctgcccaccttgctcatgctctggttctatgccaagatctacaaggccgtacgacaacactgccagcaccgggagctcatcaataggtccctcccttccttctcagaaattaagctgaggccagagaaccccaagggggatgccaagaaaccagggaaggagtctccctgggaggttctgaaaaggaagccaaaagatgctggtggtggatctgtcttgaagtcaccatcccaaacccccaaggagatgaaatccccagttgtcttcagccaagaggatgatagagaagtagacaaactctactgctttccacttgatattgtgcacatgcaggctgcggcagaggggagtagcagggactatgtagccgtcaaccggagccatggccagctcaagacagatgagcagggcctgaacacacatggggccagcgagatatcagaggatcagatgttaggtgatagccaatccttctctcgaacggactcagataccaccacagagacagcaccaggcaaaggcaaattgaggagtgggtctaacacaggcctggattacatcaagtttacttggaagaggctccgctcgcattcaagacagtatgtatctgggttgcacatgaaccgcgaaaggaaggccgccaaacagttgggttttatcatggcagccttcatcctctgctggatcccttatttcatcttcttcatggtcattgccttctgcaagaactgttgcaatgaacatttgcacatgttcaccatctggctgggctacatcaactccacactgaaccccctcatctaccccttgtgcaatgagaacttcaagaagacattcaagagaattctgcatattcgctcctaagggaggctctgaggggatgcaacaaaatgatccttatgatgtccaacaaggaaatagaggacgaaggcctgtgtgttgccaggcaggcacctgggctttctggaatccaaaccacagtcttaggggcttggtagtttggaaagttcttaggcaccatagaagaacagcagatggcggtgatcagcagagagattgaactttgaggaggaagcagaatctttgcaagaaagtcagacctgtttcttgtaactgggttcaaaaagaaaaaaataat

SEQ ID NO: 38712 - DNA, 1464 bp, Artificial Sequence
  derived and/or modified sequence
atgagcctgcccaacagcagctgcctgctggaggacaagatgtgtgagggcaacaagaccaccatggccagcccccagctgatgcccctggtggtggtgctgagcaccatctgcctggtgacagtgggcctgaacctgctggtgctgtatgctgtgcgctctgagaggaagctgcacacagtgggcaacctgtacatcgtgtccctgtctgtggccgacctgattgtgggcgctgtggtgatgcccatgaacatcctgtacctgctgatgagcaagtggagcctgggccggcccctgtgcctcttctggctgtccatggactatgtggccagcacagccagcatcttctctgtgttcatcctgtgcatcgaccgctacagatctgtgcagcagcccctgcgctacctgaagtaccgcaccaagacccgggccagcgccaccatcctgggcgcctggttcctgtccttcctgtgggtgatccccatcctgggctggaaccacttcatgcagcagacctctgtgagaagagaagataaatgtgaaacagacttctatgatgtgacctggttcaaggtgatgacagccatcatcaacttctacctgcccaccctgctgatgctgtggttctacgccaagatctacaaggctgtgcggcagcactgccagcaccgggagctgatcaacagaagcctgcccagcttcagcgagatcaagctgcggcctgagaaccccaagggagatgccaagaagccaggcaaggagagcccctgggaggtgctgaagaggaagcccaaggatgctgggggcggctctgtgctgaagagccccagccagacccccaaggagatgaagagccctgtggtgttcagccaggaggatgaccgggaggtggacaagctgtactgcttccccctggacatcgtgcacatgcaggccgctgctgagggcagcagccgggactatgtggccgtgaacagaagccacggccagctgaagacagatgagcagggcctgaacacccatggagccagcgagatcagcgaggaccagatgctgggggacagccagagcttcagcaggacagacagcgacaccaccacagaaacagcccctgggaagggcaagctgcggagcggcagcaacacaggcctggactacatcaagttcacctggaagaggctgcggagccacagccggcagtatgtgtctggcctgcacatgaaccgggagaggaaggccgccaagcagctgggcttcatcatggccgccttcatcctgtgctggatcccctacttcatcttcttcatggtgattgccttctgcaagaactgctgcaatgagcacctgcacatgttcaccatctggctgggctacatcaacagcaccctgaaccccctcatctaccccctgtgcaatgaaaacttcaagaagaccttcaagaggatcctgcacatccgctcctag

SEQ ID NO: 38713 - DNA, 1464 bp, Artificial Sequence
  derived and/or modified sequence
atgagcctgcccaacagcagctgcctgctggaggacaagatgtgcgagggcaataagactaccatggcttccccgcagctcatgcccctggtggtcgtcctgagcacaatctgtcttgtcaccgtggggctcaatctccttgtgctgtacgccgtgcggagcgaacgcaagcttcacactgtgggaaatctttacatagtgtctttatccgtggcagatctcattgtcggtgccgtagtaatgccaatgaacatcctgtacctactgatgagtaagtggtcccttggtcggccattgtgcctgttctggctgtctatggattacgtcgcttctacagcatccattttctccgtgttcattttatgtattgaccgatatcgaagtgtgcagcagccattgaggtatctgaagtacaggacaaagacccgggcctccgcgactatactgggggcttggtttttgtcgtttttgtgggttatcccaatccttggatggaatcattttatgcagcaaaccagcgtccgaagagaggataagtgtgaaacagacttttacgatgtcacttggttcaaggtcatgaccgctatcatcaatttctatctgccgacactcttaatgctttggttctacgccaagatctacaaagcagtgcgacagcactgccagcatagggagctcatcaataggagtctccccagcttttccgaaataaaacttcggcccgagaatccaaagggcgacgcgaaaaagccaggcaaagagtcgccgtgggaagtcctgaagcgcaagcctaaggatgccggaggggggagtgtgctaaagtcaccatcccaaacgcccaaggaaatgaaaagtcctgtcgtgttcagccaggaggacgaccgcgaggtagacaaactctattgtttccctttggatatagtgcacatgcaggccgcagctgaaggaagtagtcgcgattacgtagccgtgaatcgatcgcatggacaactgaagacggatgagcagggtctcaatacccacggtgcctccgaaattagtgaggaccagatgctgggagatagccagtctttctctcgcaccgattccgacaccaccaccgaaacggcccccggaaaaggcaagctgagaagcggttccaatacagggctcgactatatcaagtttacatggaagcggctgcggtcacacagccggcagtacgtgtctggactacacatgaatagggagcgaaaggccgcaaagcagctgggctttatcatggccgcatttatactgtgctggataccgtactttatattttttatggtgattgccttttgcaagaactgttgcaacgagcatctgcacatgttcaccatctggctgggctacattaactcgaccctgaacccactaatctatcccctctgtaatgagaactttaagaagacctttaagcgaatcctgcacataagatcttag

SEQ ID NO: 38714 - DNA, 1464 bp, Artificial Sequence
  derived and/or modified sequence
atgagcctgcccaacagcagctgcctgctggaggacaagatgtgcgaagggaataaaacaactatggctagcccgcagttaatgcccctcgtggtggtcctgagcaccatctgtctcgttactgttgggctgaatttgctggtgctgtacgctgtaaggtctgaacggaaactgcacaccgtcgggaacctgtacatagtctcacttagcgtggcagacctgatagttggcgctgttgtgatgccaatgaacattctgtatctgttgatgagcaagtggtcactcggtcgtcctctctgcttgttttggctgtcaatggattatgtggctagcaccgcttcaatattctcagtgttcatcttatgtatcgacagataccgctctgtgcagcagccgctccgttacctcaagtacagaaccaagacacgtgcgtcagcaactattcttggtgcatggttcctgtccttcctgtgggtgatcccaattctcggctggaaccacttcatgcagcagacgagcgtaagaagagaagacaagtgtgagaccgatttttacgacgtgacatggttcaaggtaatgactgccattatcaatttctacctgcccacattgctcatgctttggttctatgctaagatttataaggctgtgcgtcagcattgccagcacagggaactaatcaacagatctctgccctcattttcggagattaagctgcggccggaaaatcccaagggagatgctaaaaagcctggtaaagaaagcccttgggaagttctcaagagaaagccaaaagacgccggtggagggtccgttctgaaaagtccttcccaaaccccgaaggagatgaaaagtcctgtagtctttagtcaggaggacgatcgggaggttgacaagttatattgctttccccttgatatcgttcatatgcaagcagccgccgaaggatcatcacgtgactatgttgccgttaataggagtcacggtcagctgaaaactgacgaacagggactgaatacccacggagcttctgaaatttctgaggaccagatgctcggcgacagccagagtttttctcggacagacagcgacaccacaactgagactgctccggggaaaggtaaactccgctccgggagcaataccgggttagattatattaaatttacctggaagcggttgcgcagccacagccgccaatacgtgagtggactacacatgaaccgcgaacgcaaggccgcaaagcagcttggctttatcatggccgcgttcatcctgtgctggattccctactttatattctttatggttatagctttctgcaagaactgctgcaatgaacacttgcacatgtttaccatctggctgggctatataaatagcacactcaatcccctcatctatcccctctgtaatgaaaatttcaagaagacctttaagcgcatcctgcatatcagaagctag

SEQ ID NO: 38715 - DNA, 1464 bp, Artificial Sequence
  derived and/or modified sequence
atgagcctgcccaacagcagctgcctgctggaggacaagatgtgcgaaggcaacaaaaccaccatggcctccccgcagctcatgccccttgttgttgtgttatccacaatctgtcttgtgactgttgggcttaatttgctcgtgttgtacgccgtgagatcagaaagaaagctgcatacagtgggtaacctgtatattgtgagcctttctgtagccgatctaatagtcggcgccgtcgtgatgccgatgaatattctctatttactgatgtccaaatggtctctcggtcgccccctttgcttgttctggctgagtatggattacgtggcgagtacagcaagtattttctccgtgttcatcttatgcattgatcgctacaggagtgtgcagcaaccacttaggtacttgaagtaccgaacaaaaactcgggcgagcgccaccatcctgggggcatggttcctgtcattcctgtgggtgataccaatccttggctggaatcatttcatgcagcagaccagtgtgagaagagaagacaagtgcgaaaccgatttctatgacgttacctggtttaaggtcatgactgccatcataaatttttaccttccaacacttctgatgttatggttttatgctaaaatttataaggccgtcagacagcattgtcagcaccgcgaactcattaacagatcgctgccatccttctcagagatcaagctcaggccggaaaatcccaagggcgatgccaaaaagcctgggaaggagagcccctgggaggtgttaaagaggaagccaaaggacgcaggcggcggttcggttttaaagtctccttcgcagactccaaaggagatgaaaagccccgtggtgttcagccaagaagatgatcgtgaagtagataagttatattgctttccgctggatatcgtgcatatgcaagctgcagcagaggggagtagtcgtgactatgtcgctgtcaaccgctcacacgggcagctcaagactgatgagcagggcttgaacacacatggggcaagcgaaatttccgaggaccagatgctgggagacagtcagtcgttttctagaaccgacagtgacaccactacagaaacggcccccggtaagggtaaactgagaagcggatcaaatactgggctcgactatatcaagttcacctggaaacggttacgatcccacagccggcagtatgtatctgggctgcacatgaaccgcgagagaaaagccgcaaaacaattgggattcatcatggccgctttcattctgtgttggattccctacttcatcttctttatggtgatcgcattctgtaaaaactgctgcaacgaacaccttcatatgtttacaatatggctcggatacattaacagcaccttgaatccactaatataccccctttgcaatgagaacttcaagaaaacctttaagcgcattcttcacattcgcagttag

SEQ ID NO: 38716 - DNA, 1464 bp, Artificial Sequence
  derived and/or modified sequence
atgtctctgccaaacagctcttgccttctggaagataaaatgtgcgaagggaataaaactacaatggccagcccacagctgatgcccctagtcgtagtgctgtctactatatgtttagttacggtgggactgaaccttctggtcctgtacgctgtgaggagtgagaggaagttgcatacagtgggtaacctgtatattgtgagtttgtcagttgccgacttaattgtcggagccgttgttatgccaatgaacatcttgtatcttctgatgtccaaatggagcctggggaggcccctttgtttgttctggctgagtatggactacgttgctagtaccgcttcaatcttttcagtgttcattctctgcatcgacaggtacagatccgtacagcagcccctgcggtatctaaaatatcgcactaagacccgggcatccgccactattctcggtgcgtggttcctgtccttcctctgggttattcccattctgggctggaatcacttcatgcagcaaacgtcagtgcgcagagaggataagtgcgaaacagacttttatgacgtcacctggttcaaggtgatgaccgcaattatcaacttctacctgcccacgcttctcatgctgtggttttacgccaagatctataaggctgttaggcagcattgccaacatcgtgagctcatcaaccgaagcctcccttcattttctgagatcaaactgagacctgagaatcctaagggagatgccaaaaagccgggtaaagaaagtccatgggaagtgcttaaacgcaagcctaaagacgctggcggaggttctgtgctgaagagccccagtcagacaccaaaggaaatgaagtcccccgtggtattcagccaggaggatgacagggaggtggacaagctctactgctttcccctggatatagtccacatgcaggccgctgctgagggctcttctcgcgattatgtggcagtgaacagatctcacgggcagctgaagaccgatgagcaagggctgaatacccacggcgcatcagagatttccgaggatcaaatgctgggagacagtcagtctttctctagaacagacagtgacacgaccactgaaaccgccccaggcaaaggtaagctaagatcagggagcaatactggcctcgactacataaaattcacctggaaaagactaagatcacactcaaggcagtacgtgtccggattgcatatgaaccgggaacgcaaggccgcaaaacaactgggtttcatcatggcagcatttatactgtgctggatcccttattttatcttctttatggtgatcgccttctgtaaaaactgttgcaacgagcatctgcatatgttcaccatatggttaggatatattaattccactcttaacccattgatctacccactgtgcaatgagaacttcaaaaaaaccttcaagagaattctccacattaggtcttag

SEQ ID NO: 38717 - DNA, 39 bp, Artificial Sequence
  derived and/or modified sequence
atgagcttacccaattcatcatgcttactcgaggactag

SEQ ID NO: 38718 - DNA, 1464 bp, Artificial Sequence
  derived and/or modified sequence
atgtccctacctaacagttcatgtctgctggaggacaaaatgtgtgaaggaaacaagaccaccatggcatcacctcaattaatgcctctggtggtagtgctgtcgacaatttgcctcgtcacagttggattaaatttattggtgctgtatgcggtacgcagtgaacgcaaactgcacacggtcgggaacctttacatcgtgagcctatccgtagcagacttgattgtgggagccgttgtgatgccaatgaatatattgtacctgctgatgagtaaatggtcactagggagacccctgtgtctattttggttatctatggactacgttgcgtccactgcatccatattttcagtctttatcctgtgcatcgacaggtatagatcagttcagcagcctctaagatacttaaaatatcgaaccaagaccagagcttcggcaacaattctgggggcttggttcctgtctttcctctgggtaattccgatcctgggatggaaccattttatgcaacagaccagcgtccggagagaagataagtgtgagacggatttctacgatgttacctggttcaaggtgatgacagctatcatcaatttttatctgcccacgctgctcatgctgtggttctacgcaaaaatttacaaagccgtacgacagcattgccagcacagggagctgatcaatcgtagtctaccctccttctctgaaatcaaacttaggcctgagaatcccaagggagatgcaaagaagcctgggaaggagtcgccatgggaggtgcttaaacggaaaccgaaagacgcgggaggtggatctgtgctcaaaagcccctcccagactcccaaagaaatgaagtcgccggtggttttctctcaggaggacgatcgagaagtcgacaaactgtattgttttccactggacattgtccacatgcaggcagctgccgagggctcttctagggattatgtggcagtgaatagatctcacgggcagctgaagacagacgagcaggggctgaacactcatggtgcttccgaaatcagtgaagatcagatgctgggagactcccagtcattctcacgcaccgattccgacactacaaccgaaactgccccaggaaaaggcaaactgcggtctggcagtaatacagggcttgattatattaagtttacatggaagcggttgaggagccatagccgacagtatgtatcaggcctccatatgaatcgagaaagaaaggccgcaaaacagctcgggttcattatggcggcttttatcctgtgttggatcccctactttatcttttttatggtcattgccttttgtaaaaactgctgtaatgaacatctccatatgttcacaatctggctgggatatattaactcaacacttaaccccctgatttacccactgtgtaatgagaattttaagaagacttttaaaaggattttgcacattagaagttag

SEQ ID NO: 38719 - DNA, 1464 bp, Artificial Sequence
  derived and/or modified sequence
atgtcgcttccgaacagcagttgtcttctcgaggacaagatgtgcgaaggaaacaaaaccaccatggcgagtccgcagctcatgcccttagtcgtggtgttgagtaccatctgtctagtaactgtcggtttgaatctcttggtgctgtacgctgtcagaagcgagcggaagctacacactgtggggaacctttacattgtgtccctatctgtggctgatctcatcgtgggagcggttgttatgcctatgaacattctgtatctcctgatgagcaaatggtctctgggcaggcccctatgcctgttctggctgagcatggattacgtcgcctctacagcaagcatattctcagtcttcattctgtgcattgatagataccggagtgtgcaacaaccactcagatacttgaaatacagaaccaaaacgcgggcatcagccacaattctgggcgcttggttcctcagtttcctgtgggttatcccaatcttgggatggaaccactttatgcagcagacgagcgtacggcgagaggataagtgcgaaaccgatttttacgatgtgacctggttcaaggtcatgacagccattatcaatttttacctgcctactcttttgatgctttggttctacgccaagatctataaggccgtcaggcagcactgccagcaccgcgaactcatcaacaggtccctccctagtttttctgagataaagctgcggccagaaaaccccaaaggtgacgcgaaaaagccaggcaaggaaagcccatgggaggtgctgaagcggaagcctaaggatgccggaggaggcagcgttctcaaaagccctagccagacgcctaaggaaatgaagtctccggtggtgttttcacaggaggatgatagagaggtggataagttgtactgctttccacttgacattgtccatatgcaggccgcagctgagggaagttcaagagattacgtagcagtgaaccgatcacatgggcaacttaaaactgatgaacaaggattgaatacacacggggcatccgagatctctgaagaccagatgttaggggactctcagagcttctcacgtacagatagtgacaccactactgaaaccgcccctggcaagggcaagctacgttccggctctaacacaggcctcgattacatcaagttcacctggaagaggttgcgatctcacagtaggcagtatgtgagtggattacatatgaatcgagagaggaaggcggcaaaacaactcggctttatcatggcagctttcattctttgctggattccctactttatcttttttatggtaatcgccttctgtaagaattgctgtaacgagcacctccatatgtttaccatttggttaggctatatcaactctaccttaaaccccctcatctatccgctgtgcaacgaaaacttcaagaaaacgtttaagcgaatacttcacattcggagttag

SEQ ID NO: 38720 - DNA, 1464 bp, Artificial Sequence
  derived and/or modified sequence
atgagcctgcccaacagcagctgcctgctggaggacaagatgtgcgagggcaacaagaccaccatggccagcccccagctgatgcccctggtggtggtgctgagcaccatctgcctggtgaccgtgggcctgaacctgctggtgctgtacgccgtgagaagcgagagaaagctgcacaccgtgggcaacctgtacatcgtgagcctgagcgtggccgacctgatcgtgggcgccgtggtgatgcccatgaacatcctgtacctgctgatgagcaagtggagcctgggcagacccctgtgcctgttctggctgagcatggactacgtggccagcaccgccagcatcttcagcgtgttcatcctgtgcatcgacagatacagaagcgtgcagcagcccctgagatacctgaagtacagaaccaagaccagagccagcgccaccatcctgggcgcctggttcctgagcttcctgtgggtgatccccatcctgggctggaaccacttcatgcagcagaccagcgtgagaagagaggacaagtgcgagaccgacttctacgacgtgacctggttcaaggtgatgaccgccatcatcaacttctacctgcccaccctgctgatgctgtggttctacgccaagatctacaaggccgtgagacagcactgccagcacagagagctgatcaacagaagcctgcccagcttcagcgagatcaagctgagacccgagaaccccaagggcgacgccaagaagcccggcaaggagagcccctgggaggtgctgaagagaaagcccaaggacgccggcggcggcagcgtgctgaagagccccagccagacccccaaggagatgaagagccccgtggtgttcagccaggaggacgacagagaggtggacaagctgtactgcttccccctggacatcgtgcacatgcaggccgccgccgagggcagcagcagagactacgtggccgtgaacagaagccacggccagctgaagaccgacgagcagggcctgaacacccacggcgccagcgagatcagcgaggaccagatgctgggcgacagccagagcttcagcagaaccgacagcgacaccaccaccgagaccgcccccggcaagggcaagctgagaagcggcagcaacaccggcctggactacatcaagttcacctggaagagactgagaagccacagcagacagtacgtgagcggcctgcacatgaacagagagagaaaggccgccaagcagctgggcttcatcatggccgccttcatcctgtgctggatcccctacttcatcttcttcatggtgatcgccttctgcaagaactgctgcaacgagcacctgcacatgttcaccatctggctgggctacatcaacagcaccctgaaccccctgatctaccccctgtgcaacgagaacttcaagaagaccttcaagagaatcctgcacatcagaagctag

SEQ ID NO: 38721 - DNA, 39 bp, Artificial Sequence
  derived and/or modified sequence
atgagcctgcccaacagcagctgcctgctggaggactag

SEQ ID NO: 38722 - protein, 161 aa, Artificial Sequence
  derived and/or modified sequence
MKMRRYKLFLMFCMAGLCLISFLHFFKTLSYVTFPRELASLSPNLVSSFFWNNAPVTPQASPEPGGPDLLRTPLYSHSPLLQPLPPSKAAEELHRVDLVLPEDTTEYFVRTKAGGVCFKPGTKMLERPPPGRPEEKPEGANGSSARRPPRYLLSARERTGG

SEQ ID NO: 38723 - DNA, 1602 bp, Artificial Sequence
  derived and/or modified sequence
atgaagatgcggcgctataaacttttcctgatgttctgtatggccgggctgtgcttgataagcttccttcacttctttaagactctgagctacgttacgttcccgagagagctggcgagtctgtctccgaatctggtgagctcttttttttggaacaatgctcctgtcaccccccaggcgtctccagagccaggagggccggatttgctgcggacccccctgtactctcacagtcccctgcttcagccactccctccctcaaaggccgctgaggagttgcatagggtggatctagtcctgccggaggacacaacagagtattttgttcgtaccaaggccggcggagtgtgcttcaagccgggaacgaaaatgttggaacgtccccccccaggacggccggaggaaaagcccgaaggagctaacgggagctcagccagaagaccaccccgctacctgcttagtgcgcgtgaacgtaccggcgggagaggcgcacgtcgcaaatgggtcgaatgcgtgtgtttacccggttggcatgggccttcctgtggagttcctactgtcgtgcagtacagtaacctacccaccaaagaaaggctggtgccacgagaggtaccccgacgtgtaatcaacgccataaacgtcaaccacgaattcgacttgttagacgtgcggttccacgagctgggggatgtggtcgatgctttcgtcgtttgtgagagtaatttcaccgcatacggggagcctcgacctctgaagttccgcgaaatgctgaccaacggtaccttcgagtatattcggcataaggtgctatacgttttcttggaccacttcccaccgggtggccggcaagacggttggatcgccgacgattatctcaggacgttcctcacacaggacggagtgtcgcgtcttagaaacctcaggcctgacgacgtcttcattatcgatgacgcggacgaaatccccgccagggacggtgtgttgttcctgaaactgtacgatgggtggacagagccctttgcttttcatatgcgtaaatccctgtacggattcttctggaagcaacctggcacgctggaggtggttagtggctgtaccgtcgacatgctacaggccgtttacgggctggatggcatccggctccgacggcgacagtactataccatgccaaactttcgccagtacgagaataggaccgggcacattctggtgcagtggtccctcggaagccccctccattttgctggatggcactgctcctggtgcttcactccggagggcatctatttcaaactggtatcagcccaaaatggcgatttccctcgttggggggattacgaagataagcgggatcttaattatatccggggtctgattcgaaccggagggtggttcgatggaacccagcaggagtacccccctgcagatccttcagagcacatgtatgcgcctaaatatcttctcaagaactacgatcgatttcattatctgttggacaatccttatcaggagccacggagtacagcggctggaggatggcgacatagagggccggaagggaggccacctgcgcgaggtaaattggacgaggcagaagtctag

SEQ ID NO: 38724 - DNA, 486 bp, Artificial Sequence
  derived and/or modified sequence
atgaagatgagaagatacaagctcttcctgatgttttgcatggcagggctatgcctcattagcttccttcacttctttaagactctctcatacgtcacattcccccgggagctggcctctttaagccctaaccttgtcagttcattcttttggaataacgcccctgtgaccccccaggctagccctgagcccgggggccctgacttactgcggactcccctgtactcacacagccctctcctccagcctctgccgccttctaaggccgccgaggagctgcacagggtggacctggtcctgcccgaggatacaacagagtattttgttagaactaaggctgggggagtttgtttcaaaccaggcacgaagatgttggagagaccgcccccagggcggcctgaggagaaacctgagggagctaacgggtcaagtgcccgcaggccacctcggtatctcctgagcgctcgggaaaggaccgggggatag

SEQ ID NO: 38725 - DNA, 1602 bp, Artificial Sequence
  derived and/or modified sequence
atgaagatgaggcgctacaagctgttcctgatgttctgcatggccggcctgtgcctgatctccttcctgcacttcttcaagaccctgtcctatgtgaccttcccccgggagctggccagcctgagccccaacctggtgagcagcttcttctggaacaatgcccctgtgaccccccaggccagccctgagcccggcggccctgacctgctgcggacccccctgtacagccacagccccctgctgcagcccctgccccccagcaaggctgctgaggagctgcaccgggtggacctggtgctgcctgaggacaccacagagtactttgtgaggaccaaggccggcggcgtgtgcttcaagccaggcaccaagatgctggagcggcccccacctggccggcctgaggagaagccagagggcgccaacggcagcagcgcccggcggcccccacgctacctgctgagcgcccgggagaggactggaggccgcggggcccggaggaagtgggtggagtgtgtgtgcctgcccggctggcacggccccagctgtggggtgcccaccgtggtgcagtacagcaacctgcccaccaaggagcggctggtgccccgggaggtgccccggcgggtcatcaatgccatcaacgtgaaccacgagtttgacctgctggatgtgcgcttccacgagctgggagatgtggtggatgcctttgtggtgtgtgagagcaacttcaccgcctatggagagccccggcccctgaagttccgggagatgctgaccaacggcacctttgagtacatccgccacaaggtgctgtatgtgttcctggaccacttccccccaggcggccggcaggacggctggattgctgatgactacctgcggaccttcctgacccaggatggagtgtcccggctgaggaacctgcggccagatgatgtgttcatcattgatgatgctgatgagatcccagccagagatggagtgctcttcctgaagctgtatgatggctggacagagccctttgccttccacatgaggaagagcctgtatggcttcttctggaagcagcccggcaccctggaggtggtgtctggctgcaccgtggacatgctgcaggccgtgtatggcctggatggcatccggctgcggcggcggcagtactacaccatgcccaacttccggcagtatgagaacagaacaggccacatcctggtgcagtggagcctgggcagccccctgcactttgctggctggcactgctcctggtgcttcaccccagagggcatctacttcaagctggtgtctgcccagaatggagacttcccccgctggggagactatgaggacaagagggacctgaactacatccggggcctcatcagaactggaggctggtttgatggcacccagcaggagtacccacctgctgaccccagcgagcacatgtatgcccccaagtacctgctgaagaactatgaccgcttccactacctgctggacaacccctaccaggagcccaggagcacagctgctgggggctggaggcaccggggccctgagggccggcccccagcccggggcaagctggatgaagctgaggtgtag

SEQ ID NO: 38726 - DNA, 486 bp, Artificial Sequence
  derived and/or modified sequence
atgaagatgaggcgctacaagctgttcctgatgttctgcatggccggcctgtgcctgatctccttcctgcacttcttcaagaccctgtcctatgtgaccttcccccgggagctggccagcctgagccccaacctggtgagcagcttcttctggaacaatgcccctgtgaccccccaggccagccctgagcccggcggccctgacctgctgcggacccccctgtacagccacagccccctgctgcagcccctgccccccagcaaggctgctgaggagctgcaccgggtggacctggtgctgcctgaggacaccacagagtactttgtgaggaccaaggccggcggcgtgtgcttcaagccaggcaccaagatgctggagcggcccccacctggccggcctgaggagaagccagagggcgccaacggcagcagcgcccggcggcccccacgctacctgctgagcgcccgggagaggactggaggatag

SEQ ID NO: 38727 - DNA, 5062 bp, Artificial Sequence
  derived and/or modified sequence
acggggtggaagtgggggtggggggaggggatcggggccgggccggggccgcgctgcctgcgatgccgggcgcccgccgcagccgctgccgccggagcccgggatggggcgagaggctgcggcggacgccagcatctccccgccggggaccccgggggccgcggagccgccgccgccgctgctgccgccgttgctgagacccagcgggcgatgggatgaagatgagacgctacaagctctttctcatgttctgtatggccggcctgtgcctcatctccttcctgcacttcttcaagaccctgtcctatgtcaccttcccccgagaactggcctccctcagccctaacctggtgtccagctttttctggaacaatgccccggtcacgccccaggccagccccgagccaggaggccctgacctgctgcgtaccccactctactcccactcgcccctgctgcagccgctgccgcccagcaaggcggccgaggagctccaccgggtggacttggtgctgcccgaggacaccaccgagtatttcgtgcgcaccaaggccggcggcgtctgcttcaaacccggcaccaagatgctggagaggccgcccccgggacggccggaggagaagcctgagggggccaacggctcctcggcccggcggccaccccggtacctcctgagcgcccgggagcgcacggggggccgaggcgcccggcgcaagtgggtggagtgcgtgtgcctgcccggctggcacggacccagctgcggcgtgcccactgtggtgcagtactccaacctgcccaccaaggagcggctggtgcccagggaggtgccgcgccgcgtcatcaacgccatcaacgtcaaccacgagttcgacctgctggacgtgcgcttccacgagctgggcgacgtggtggacgcctttgtggtgtgcgagtccaacttcacggcttatggggagccgcggccgctcaagttccgggagatgctgaccaatggcaccttcgagtacatccgccacaaggtgctctatgtcttcctggaccacttcccgcccggcggccggcaggacggctggatcgccgacgactacctgcgcaccttcctcacccaggacggcgtctcgcggctgcgcaacctgcggcccgacgacgtcttcatcattgacgatgcggacgagatcccggcccgtgacggcgtccttttcctcaagctctacgatggctggaccgagcccttcgccttccacatgcgcaagtcgctctacggcttcttctggaagcagccgggcaccctggaggtggtgtcaggctgcacggtggacatgctgcaggcagtgtatgggctggacggcatccgcctgcgccgccgccagtactacaccatgcccaacttcagacagtatgagaaccgcaccggccacatcctggtgcagtggtcgctgggcagccccctgcacttcgccggctggcactgctcctggtgcttcacgcccgagggcatctacttcaagctcgtgtccgcccagaatggcgacttcccacgctggggtgactacgaggacaagcgggacctgaactacatccgcggcctgatccgcaccgggggctggttcgacggcacgcagcaggagtacccgcctgcagaccccagcgagcacatgtatgcgcccaagtacctgctgaagaactacgaccggttccactacctgctggacaacccctaccaggagcccaggagcacggcggcgggcgggtggcgccacaggggtcccgagggaaggccgcccgcccggggcaaactggacgaggcggaagtctagagctgcatgatctgatagggtttgtgacagggcgggggtggcggcggcccctagcgctatctccctgcctcctgccggctccttggttcttgaggggaccaggagtgggtggggagtgggggtgggggtagggtttccctactgaagcccttgtgaatcaagggtcaggcctttgagctcagaaaatatccctcctgttgggagagggcgcaggccgtgacgtctgggtggcccttatgactgccaagactgctgtggccaggaggtgccactggagtgtgcgtggtggtccctgggtagcgggggagggtaggcaggattggggaagagagcctgcaggatctcaccaggcagcctctggggggtggccaggccgggaaaaagcccaccatttggcatccctgggccttgggctccgtgtgggagaccggcctgccaggaggacccagggctctgtaagtagatgcatttgggtccaggaggaagcgtggacacctcgtagggaagagatgaaaaagccacatcctaccaagaggaggtgctgagggatgctttgcagtgtagtcagaagtgctgggccagatggagacagaactccaccccctgccgcaaaggacaggacctggctgccctgggatgctggtgcctgagtctgtctctgtgcacccctcaggctgtcgtgagccaacacaggggcctggagaaccctgaggagctttccttttggttctaaacccggcgttgacgttccttctccctttcacattgctgtcttgtggactgtgcactcagtccttgcaaggccaagagtccagttgtaggtgtggccttgagggggaagtggggaggagaagactgacatgagtcctctgcacggatccgtctctccctccccatcaccccttccttctgacacccagtcccagctgtccactgtcccaggtgcagtcactgttgtgcccttccttggggcaggctggctgggggccagaaaggggccatgaggctgtcttgggcccaaaaagggacaataaggccagttgtatgcttcctgttcctcatagcttgccttggtggggatgtctttgttggagttgattctgagctgctgtgattaggagaccctgaaatacagtggtttaagcaagatggaagcttgtttctaattagtctagattgagatggcccagagctggtagggcagctctgcgtttcttcatacgcaccttccaattctgggtacacagcggctgctccagcgcccaccctcctgtgtgcatccaagcctgggggaagcagaaatagacaagagggcacacccactttttgctaaaggcatgagccagaattggcaggctcacctctgctggcctctcattggctgggactcagtcacatggccacaagcagctgctagggaacctgggaagtgtagtcttcagcggggccgccatgtgcctggcctcaccttgggagttatcttattgatggaggagaagagaatggatatgggggaccagtagcatctctgggagagggggagggagcagcaataactcagtcgtcggatccagctctcattgtcagagtttccggaacagcttgctcctgtttccctcactgtgcagcccagggctgggggcagtgaggagcttgcagctctgtgggaaggggaaacaccccctcccctcggcccctcagacgctacccaatgatgccggtttgcagagttggcctgtggaatggctcatgtttgtgcgtgtgtgtgtgtatatttatgggcatgggtgcatgcttggtgtgtatttgtacatgtctgtattgctgtgtccctgtaaatacatgcttgtgtatggatggaagaggccaggcccaggcctggcctcttcctcgggcctgtggccacacctcctgcagctccccaaaatgactgaggcagaaagcccttggggagcctagaaagcaaagctaaaggggatgcagggtctgtctgtctgtctgtctttcagtctgaggaatgagaatcctgacctgagggctgtgcagctgagagcccactacctccccagcccctctcggccccagccgcatcatcccacctgtcccctcccccccacctccagtggggctttctccagatgtcttatggttgggggtttcctgatgggccaggagaggagggcatcttcttgcgacagcactgtctgggttaagtgcccagtgagggcatggtgtggggagctggcctcagaggagccgctggtgggcaagcgtgaagtgggctgaggggctctgagccactttgctcccatctaggggactgccccccatggaactcctttgaagtcacagcagccttcctttctgtttgctcttggggctgagaggtggctcaaacactcggggtccctatggctctgggtcaatctaggccaggctgcaccccatggacagggagtctcagggctcctgatcatgcccaggccctggcctggggcctccctccttggcagctttcccacccccacgcccctggcatcctcagttgctatgggatgcccctccagggcaccagctcagggctaagcgaaggaagataggagcagctcagagctgccaggctctgccttcctcacagacctggtggggcaggtcctgttcacagcagcaggagtgaaggcctggccatcggtggagagggcagctgtcagagggctgggggccagggcacaggattgaagagtttcacatatcatcacagcatacactgggaatttggtgggggcagaagaacccagggccactccctcaatatgaagggaaaccaagctgaatgtgaccaccggcacactgctgccatgtcccatgtccacctttctccccgggaataactggccctgagacccctagacccaaggaggcctgtccatgccaagcatccgggaagcatggctggccttatccacccatgggtcacgtcggttcccaggggcagcatgggagatctttgggggcaacagggagagtctgggtggggagacgggacttgtccaagcagaaggcaggaccctgggaaatgcataatgtaaggacatcaataatagtattattttttttgtaagggaaaatcaatatgtacattctgaaatcattttctctgtaaatggttggatttcatttcacccttaaagggatgcttaaaggagaagataatattaataataaaaacagctacaaagtctgaa

SEQ ID NO: 38728 - DNA, 1602 bp, Artificial Sequence
  derived and/or modified sequence
atgaagatgcggcggtacaagctgttcctgatgttctgcatggccggactgtgtctgattagctttttgcactttttcaagaccctcagttacgtaactttccctcgcgagcttgcgagcctgtctcctaatctggtgagtagctttttctggaacaatgctcccgtgactccccaagcaagccccgagcccggcggacccgacctgttaagaacgcccctctacagtcactcaccgctgctccaaccactacctccatctaaagccgccgaggagcttcaccgcgttgacctcgtgctgcctgaggatactactgaatacttcgttagaaccaaagccgggggcgtgtgttttaagccaggaaccaagatgctcgagaggccacccccaggcaggccggaggaaaaacccgagggagcgaatgggtcctccgcccgccggccaccccgttacctactcagtgcaagggagcgaaccggcggccgtggcgctagacgcaaatgggttgagtgtgtgtgtctgccaggctggcatggccctagctgcggcgtccctaccgtagttcaatacagcaatttgcccaccaaagaacggctggttccccgggaagtgccacgccgagttattaatgcgattaatgttaaccacgagttcgacttgctcgacgtgaggttccacgagctcggtgacgtggtcgatgcctttgtagtgtgtgagtctaattttaccgcatacggagagcctcggcctctgaaattccgtgagatgctaactaatggaaccttcgaatatatccgacataaagtgctgtacgtgttcctggatcactttcctcccggaggcagacaggatggatggatcgccgatgattatctgcgaactttcctgacacaggatggggtcagcaggctccggaatctgcgtcctgatgatgtgttcatcatcgacgacgccgacgagatccccgctcgggatggggtgctgtttcttaagttatatgacgggtggaccgagccgtttgcctttcacatgaggaagagtctctacggattcttttggaagcagcccggtacactggaagttgtaagtggatgtactgtggacatgctccaagccgtctacggcttggacggaatacggctgcgccgccgtcagtactatacgatgcctaattttcggcagtacgaaaataggaccggccatatcctcgttcagtggagtctcggatcccccctgcactttgcaggttggcattgctcttggtgtttcacaccagaagggatatactttaagctggtatcagctcagaatggagacttcccacgatggggcgattacgaagacaagcgggatttgaactatatccgggggctcataagaactggcggttggttcgacggcacccagcaagagtatcccccagcagatccctctgagcatatgtatgctccaaagtatctgctgaagaattatgatcgtttccactatctgttagataacccttaccaggaacctcggtccacagctgcaggaggctggaggcaccggggccctgaaggtaggcccccagcccgcggaaaactggacgaggcagaggtctag

SEQ ID NO: 38729 - DNA, 486 bp, Artificial Sequence
  derived and/or modified sequence
atgaagatgcggcggtacaagctgttcctgatgttctgcatggccggtttatgtctcatctcattcctgcattttttcaaaacattgagctatgtaaccttccctagggagctcgctagcctctctccaaacctggtgagctccttcttctggaacaatgcacctgtgacaccacaggcatcgccggaaccaggaggccccgatctcttgaggacacctctgtatagtcacagccctctgcttcagcccctaccacccagcaaagctgcagaggaactgcatagagtcgacttggtcctgcctgaagatacaacagaatactttgttaggaccaaagcaggaggcgtgtgctttaagccgggaacaaagatgctcgaaaggcctcctcctggtaggccagaggaaaagccagaaggcgcgaacggctcctctgccaggcggccaccccgttacctcctgagcgctagggaacggaccggggggtag

SEQ ID NO: 38730 - DNA, 1602 bp, Artificial Sequence
  derived and/or modified sequence
atgaagatgcgtaggtacaagctgttcctgatgttttgtatggcagggctatgtctcatcagctttttacatttcttcaagacactgtcttacgtgacttttccccgagaactagctagtctgagtccgaatcttgtgtccagtttcttctggaataacgcacccgtgacgcctcaggcgtccccagagccagggggtcctgatctgctgagaacgccgctttactcgcattcacccctactccagccattgcccccttccaaggctgccgaagagttgcatcgagtggatctggtcttgcctgaggataccactgaatacttcgttcgaaccaaggccggaggcgtgtgctttaaacctgggacaaaaatgctggaacggcctccacccggacgcccagaagagaagcctgagggggcaaacggctctagcgcccgtcgcccacctcgatacttactttcggccagagagcggactggaggacgcggagcgaggcgaaaatgggtggaatgtgtgtgcctgcctggatggcacggaccatcctgtggggtgcctactgtagttcaatacagcaatctgcccactaaggagcggctggtgccccgtgaagtgcctcgacgggtcatcaacgcgatcaacgtgaatcatgagtttgacctcctagacgtgaggtttcacgaattgggcgacgttgtggatgcgttcgtggtttgcgagagtaatttcacagcctacggagagccgaggcctctgaaattccgcgagatgttaacaaacggaaccttcgaatacatccggcacaaggtgctgtatgttttcctcgaccatttcccgcctggaggccgacaggatggttggattgcagatgattacctgagaactttccttactcaggacggggtttcaagattacggaatcttagaccagatgacgtttttatcatcgacgacgcagacgagattccggctagagatggcgtgctttttctcaagttgtatgacggctggactgagcccttcgcatttcacatgcgtaaatccctctacgggtttttctggaaacagccgggtactctagaggttgtgagcggttgcaccgtcgatatgttacaggcagtttatgggttggacgggataagactaagacgcaggcaatactatactatgcccaactttcgtcagtacgagaaccgcaccggacacattcttgtgcagtggtccttaggcagtcctctccacttcgctggttggcactgctcctggtgttttacgcctgaggggatttacttcaagttggtgtccgcacagaatggggattttccaaggtggggggactatgaggataagcgagatctaaattacattcgaggcctaatccgtaccggagggtggttcgacggcactcagcaggaataccctcccgcagatccatctgaacacatgtacgctcctaagtatctcctgaaaaactacgacagatttcactatcttctcgacaacccctaccaggaaccacggtctactgctgctggtggttggaggcaccgaggtcccgaaggccgaccacccgcaaggggaaaactggacgaggccgaagtgtag

SEQ ID NO: 38731 - DNA, 486 bp, Artificial Sequence
  derived and/or modified sequence
atgaaaatgaggaggtacaaactgttcctgatgttttgtatggcaggcctctgtcttatatcgttccttcatttctttaagaccctttcctatgtgactttccccagggagctggccagtttaagcccgaatctggtgtcatcctttttctggaataacgcacctgtaaccccccaggcttctcctgagccgggagggcctgatttgttgcggacaccgctttattctcacagtcccctcctgcagcccctgcctcccagtaaagccgcagaagagctgcatcgcgtggacctggtcctccctgaagatactactgagtattttgtcagaaccaaggccggaggggtttgtttcaagcccggtaccaagatgctcgagcgcccacccccagggcgaccagaggagaaacctgaaggagctaatggctctagtgcacggaggccaccccgttacctgctgtcagcacgggagcgcactggcggatag

SEQ ID NO: 38732 - DNA, 1602 bp, Artificial Sequence
  derived and/or modified sequence
atgaagatgagaagatacaagctgttcctgatgttctgcatggccggcctgtgcctgatcagcttcctgcacttcttcaagaccctgagctacgtgaccttccccagagagctggccagcctgagccccaacctggtgagcagcttcttctggaacaacgcccccgtgaccccccaggccagccccgagcccggcggccccgacctgctgagaacccccctgtacagccacagccccctgctgcagcccctgccccccagcaaggccgccgaggagctgcacagagtggacctggtgctgcccgaggacaccaccgagtacttcgtgagaaccaaggccggcggcgtgtgcttcaagcccggcaccaagatgctggagagacccccccccggcagacccgaggagaagcccgagggcgccaacggcagcagcgccagaagaccccccagatacctgctgagcgccagagagagaaccggcggcagaggcgccagaagaaagtgggtggagtgcgtgtgcctgcccggctggcacggccccagctgcggcgtgcccaccgtggtgcagtacagcaacctgcccaccaaggagagactggtgcccagagaggtgcccagaagagtgatcaacgccatcaacgtgaaccacgagttcgacctgctggacgtgagattccacgagctgggcgacgtggtggacgccttcgtggtgtgcgagagcaacttcaccgcctacggcgagcccagacccctgaagttcagagagatgctgaccaacggcaccttcgagtacatcagacacaaggtgctgtacgtgttcctggaccacttcccccccggcggcagacaggacggctggatcgccgacgactacctgagaaccttcctgacccaggacggcgtgagcagactgagaaacctgagacccgacgacgtgttcatcatcgacgacgccgacgagatccccgccagagacggcgtgctgttcctgaagctgtacgacggctggaccgagcccttcgccttccacatgagaaagagcctgtacggcttcttctggaagcagcccggcaccctggaggtggtgagcggctgcaccgtggacatgctgcaggccgtgtacggcctggacggcatcagactgagaagaagacagtactacaccatgcccaacttcagacagtacgagaacagaaccggccacatcctggtgcagtggagcctgggcagccccctgcacttcgccggctggcactgcagctggtgcttcacccccgagggcatctacttcaagctggtgagcgcccagaacggcgacttccccagatggggcgactacgaggacaagagagacctgaactacatcagaggcctgatcagaaccggcggctggttcgacggcacccagcaggagtacccccccgccgaccccagcgagcacatgtacgcccccaagtacctgctgaagaactacgacagattccactacctgctggacaacccctaccaggagcccagaagcaccgccgccggcggctggagacacagaggccccgagggcagaccccccgccagaggcaagctggacgaggccgaggtgtag

SEQ ID NO: 38733 - DNA, 486 bp, Artificial Sequence
  derived and/or modified sequence
atgaagatgagaagatacaagctgttcctgatgttctgcatggccggcctgtgcctgatcagcttcctgcacttcttcaagaccctgagctacgtgaccttccccagagagctggccagcctgagccccaacctggtgagcagcttcttctggaacaacgcccccgtgaccccccaggccagccccgagcccggcggccccgacctgctgagaacccccctgtacagccacagccccctgctgcagcccctgccccccagcaaggccgccgaggagctgcacagagtggacctggtgctgcccgaggacaccaccgagtacttcgtgagaaccaaggccggcggcgtgtgcttcaagcccggcaccaagatgctggagagacccccccccggcagacccgaggagaagcccgagggcgccaacggcagcagcgccagaagaccccccagatacctgctgagcgccagagagagaaccggcggctag

SEQ ID NO: 38734 - protein, 1233 aa, Artificial Sequence
  derived and/or modified sequence
MLTKFETKSARVKGLSFHPKRPWILTSLHNGVIQLWDYRMCTLIDKFDEHDGPVRGIDFHKQQPLFVSGGDDYKIKVWNYKLRRCLFTLLGHLDYIRTTFFHHEYPWILSASDDQTIRVWNWQSRTCVCVLTGHNHYVMCAQFHPTEDLVVSASLDQTVRVWDISGLRKKNLSPGAVESDVRGITGVDLFGTTDAVVKHVLEGHDRGVNWAAFHPTMPLIVSGADDRQVKIWRMNESKAWEVDTCRGHYNNVSCAVFHPRQELILSNSEDKSIRVWDMSKRTGVQTFRRDHDRFWVLAAHPNLNLFAAGHDGGMIVFKLERERPAYAVHGNMLHYVKDRFLRQLDFNSSKDVAVMQLRSGSKFPVFNMSYNPAENAVLLCTRASNLENSTYDLYTIPKDADSQNPDAPEGKRSSGLTAVWVARNRFAVLDRMHSLLIKNLKNEITKKVQVPNCDEIFYAGTGNLLLRDADSITLFDVQQKRTLASVKISKVKYVIWSADMSHVALLAKHEHSCPLPLTAIVICNRKLDALCNIHENIRVKSGAWDESGVFIYTTSNHIKYAVTTGDHGIIRTLDLPIYVTRVKGNNVYCLDRECRPRVLTIDPTEFKFKLALINRKYDEVLHMVRNAKLVGQSIIAYLQKKGYPEVALHFVKDEKTRFSLALECGNIEIALEAAKALDDKNCWEKLGEVALLQGNHQIVEMCYQRTKNFDKLSFLYLITGNLEKLRKMMKIAEIRKDMSGHYQNALYLGDVSERVRILKNCGQKSLAYLTAATHGLDEEAESLKETFDPEKETIPDIDPNAKLLQPPAPIMPLDTNWPLLTVSKGFFEGTIASKGKGGALAADIDIDTVGTEGWGEDAELQLDEDGFVEATEGLGDDALGKGQEEGGGWDVEEDLELPPELDISPGAAGGAEDGFFVPPTKGTSPTQIWCNNSQLPVDHILAGSFETAMRLLHDQVGVIQFGPYKQLFLQTYARGRTTYQALPCLPSMYGYPNRNWKDAGLKNGVPAVGLKLNDLIQRLQLCYQLTTVGKFEEAVEKFRSILLSVPLLVVDNKQEIAEAQQLITICREYIVGLSVETERKKLPKETLEQQKRICEMAAYFTHSNLQPVHMILVLRTALNLFFKLKNFKTAATFARRLLELGPKPEVAQQTRKILSACEKNPTDAYQLNYDMHNPFDICAASYRPIYRGKPVEKCPLSGACYSPEFKGQICRVTTVTEIGKDVIGLRISPLQFR

SEQ ID NO: 38735 - DNA, 3702 bp, Artificial Sequence
  derived and/or modified sequence
atgttaaccaaatttgagactaagtccgcccgcgtaaagggtctgtcgtttcatccaaagcgcccatggattctcacctccttacacaacggtgtcatacagttgtgggactatcggatgtgcaccctgatcgataagttcgacgaacatgatggccctgtgagaggcattgacttccacaagcagcagcccctgtttgtaagcggtggggacgactataaaatcaaagtctggaactacaagcttaggcgatgcctgttcaccttactgggtcacctcgattatatccggaccacctttttccatcacgaatacccctggatcctgtcagcctctgatgatcagacgatacgggtttggaattggcagagccgcacatgtgtatgtgtgctgaccggacataatcactacgtcatgtgtgctcagtttcatcctaccgaggacctagttgtgtcagcttcccttgaccagaccgttcgtgtgtgggatatttccggtttacggaagaaaaatttatctcccggggccgtggaatccgacgttcgcggcatcaccggggtggatcttttcggaacaacagatgccgtggtgaagcacgtgttggaagggcacgatagaggcgtcaattgggctgccttccaccctacgatgccactcatcgtgagtggcgcagacgatcggcaggtgaaaatatggagaatgaacgagagcaaggcttgggaagtggatacttgccgtggacactataacaatgtctcctgtgccgtctttcaccccaggcaggaattgattctgagcaactctgaggataaatctattagagtgtgggatatgtctaagcggactggggtccagaccttccgacgggaccatgacaggttttgggtgctggccgcacaccctaatttgaacctcttcgcagcaggtcacgatggcgggatgattgtctttaaactagaacgggagcggccagcatacgccgtccacggcaacatgctccactacgtcaaagacagattcttgcgtcagctagacttcaatagctccaaggatgttgcggtgatgcagctgcggagcggctctaaattccccgttttcaacatgtcctataaccctgctgagaacgctgtactcctttgcacgcgggctagcaatctggaaaatagcacctacgatctgtacacaatcccaaaggacgcagatagccagaacccggacgcgccagagggaaagcgctcctccggactcacagcggtctgggtggccaggaaccggttcgcagtgctggacagaatgcacagcttgcttatcaagaatctgaagaacgaaatcactaagaaagttcaggtgcccaactgcgatgaaatcttctacgcaggcactggcaacctgcttctgcgggacgcggactcaatcactctgttcgacgtgcagcagaaacggacactagctagtgtgaaaatcagtaaggttaaatacgttatttggtctgcagatatgtcacacgtggccttgctcgccaaacacgaacatagctgccctctgccccttacggctattgtgatctgcaataggaagctggacgctctgtgcaacattcacgagaatattcgggtgaaaagtggagcgtgggacgagagcggcgtcttcatttataccactagtaaccatataaagtatgcagtgaccacaggggatcatggaatcataagaactctcgacctgccaatttatgtaactcgagttaagggcaacaacgtttattgcttagatagagaatgcagaccgagggtgctcacaattgacccaacagagtttaagtttaagctcgccctgatcaatcgcaagtacgatgaggtccttcatatggtgcggaatgcgaagttggtcggtcagtctatcatcgcctacttgcagaagaaaggctacccggaagtcgctcttcattttgttaaggacgaaaaaaccagattttcactggccctcgaatgtggaaacattgagattgccctggaggcagcgaaagccctcgacgataagaattgttgggagaaactgggtgaggtggccctcctgcaaggtaatcaccagatagttgaaatgtgttatcagcggaccaagaactttgacaagctctctttcctgtatttaattaccggaaatttggagaaactgagaaaaatgatgaaaattgccgagatccgcaaggatatgagcggacactaccagaacgcattgtacctcggcgatgtgtccgaaagagtgaggatcctgaaaaactgcggccagaaatctttagcttatttgacggcggcaacccatggcttagacgaagaagccgaaagtctcaaggagacgttcgaccccgaaaaagaaactatacccgacattgacccaaatgctaaactattgcagcctccagcccccattatgcctctcgacacgaattggccactcctaacggtctcaaaagggttcttcgagggcacaattgcctccaagggaaaaggcggcgccctggcagccgatattgatattgacaccgtgggcaccgagggctggggtgaagacgctgaactccagcttgacgaggacggattcgtagaagctactgaaggccttggagacgatgctctgggaaaaggtcaagaggagggaggcggctgggacgtggaagaagacttagaattgccacccgaactggacatttctcccggggccgccggaggcgccgaggacgggttttttgtcccccctaccaaaggaacctccccaacgcagatctggtgtaataatagtcagttgccagtcgaccacatcttggctggatcatttgagactgccatgcggttactgcatgatcaggtcggggtaattcaatttggtccctataagcagctgttcctgcagacatacgcccggggacgcaccacctaccaggccttgccatgcctgccgagcatgtatggatatccgaacagaaattggaaagatgctgggcttaagaacggagtgcccgccgtcgggttaaaacttaatgaccttattcagaggctacagctgtgctaccagctgaccacggtgggaaagtttgaagaagccgtggaaaaatttcgctctatattgttaagcgttcccctgttggtggttgataacaagcaggaaattgcagaggcccagcagcttataacaatctgtcgtgaatacatcgtgggcctgtctgttgagactgagcggaagaagctgcctaaggaaactctggagcagcagaagcggatttgcgaaatggcggcatactttacccactcaaacctccagcctgttcacatgatactcgttttgcggactgccctgaatctgttttttaagctgaaaaatttcaaaactgcagccaccttcgctcggcggctcctcgaactgggacccaagcccgaagtggctcagcagacccggaaaatactgagtgcctgtgaaaagaatccgaccgatgcataccagctgaactatgacatgcataatccctttgacatctgcgcagcctcctatcgacccatttacagaggaaagcctgttgagaagtgcccactgtccggggcctgttatagccctgagttcaaaggccagatctgtagggtcaccaccgtgactgagatcggtaaagatgtcattggcctacgcatctcaccactgcaatttcgatag

SEQ ID NO: 38736 - DNA, 3702 bp, Artificial Sequence
  derived and/or modified sequence
atgctgaccaagtttgagaccaagagcgcccgggtgaagggcctgtccttccaccccaagaggccctggatcctgaccagcctgcacaacggggtcatccagctgtgggactacaggatgtgcaccctgattgacaagtttgatgaacatgatggccctgtgcggggcatcgacttccacaagcagcagcccctgtttgtgtctggaggagatgactacaagatcaaggtgtggaactacaagctgcggcgctgcctcttcaccctgctgggccacctggactacatccgcaccaccttcttccaccacgagtacccctggatcctgagcgccagtgatgaccagaccatccgggtgtggaactggcagagcaggacctgtgtgtgtgtgctgaccggccacaaccactacgtgatgtgtgcccagttccaccccacagaggacctggtggtgtctgccagcctggaccagacagtgcgggtgtgggacatcagcggcctgaggaagaagaacctgagccctggagctgtggagagtgatgtgcggggcatcactggagtggacctgtttggcaccacagatgctgtggtgaagcacgtgctggagggccatgacagaggagtgaactgggccgccttccaccccaccatgcccctcatcgtgtctggagcagatgaccggcaggtgaagatctggaggatgaatgaaagcaaggcctgggaggtggacacctgccggggccactacaacaacgtgtcctgtgctgtgttccacccccggcaggagctgatcctgagcaacagcgaggacaagagcatccgggtgtgggacatgagcaagaggactggagtgcagaccttccggcgggaccatgaccgcttctgggtgctggccgcccaccccaacctgaacctgtttgctgctggccatgatggcggcatgattgtgttcaagctggagcgggagaggcctgcctatgctgtgcacggcaacatgctgcactacgtgaaggaccgcttcctgcggcagctggacttcaacagcagcaaggatgtggccgtgatgcagctgcggagcggcagcaagtttcctgtgttcaacatgagctacaacccagcagaaaatgctgtgctgctgtgcacccgggccagcaacctggagaacagcacctatgacctgtacaccatccccaaggatgctgacagccagaacccagatgcccctgagggcaagaggagcagcggcctgacagctgtgtgggtggccaggaacagatttgctgtgctggacaggatgcacagcctgctgatcaagaacctgaagaatgagatcaccaagaaggtgcaggtgcccaactgtgatgagatcttctacgccggcactggaaacctgctgctgagagatgctgacagcatcaccctgtttgatgtgcagcagaagaggaccctggcctctgtgaagatcagcaaggtgaagtatgtgatctggagcgctgacatgagccacgtggccctgctggccaagcatgagcacagctgccccctgcccctgacagccatcgtcatctgcaacaggaagctggatgccctgtgcaacatccacgagaacatccgggtgaagagcggggcctgggatgaaagtggagtcttcatctacaccaccagcaaccacatcaagtatgctgtgaccaccggggaccacggcatcatccgcaccctggacctgcccatctacgtgaccagggtgaagggcaacaacgtgtactgcctggacagagaatgtcggccccgggtgctgaccatcgaccccacagagttcaagttcaagctggccctgatcaacagaaaatatgatgaggtgctgcacatggtgagaaatgccaagctggtgggccagagcatcatcgcctacctgcagaagaagggctacccagaggtggccctgcactttgtgaaggatgagaagacccgcttcagcctggccctggagtgtggcaacattgaaattgccctggaggccgccaaggccctggatgacaagaactgctgggagaagctgggggaggtggccctgctgcagggcaaccaccagatcgtggagatgtgctaccagaggaccaagaactttgacaagctgtccttcctgtacctgatcactggaaacctggagaagctgaggaagatgatgaagattgctgagatcaggaaggacatgagcggccactaccagaatgccctgtacctgggagatgtgtctgagcgggtgcgcatcctgaagaactgtggccagaagagcctggcctacctgacagctgccacccacggcctggatgaggaggccgagagcctgaaggagacctttgatcctgagaaggagaccatcccagacatcgaccccaatgccaagctgctgcagcccccagcccccatcatgcccctggacaccaactggcccctgctgactgtgtccaagggcttctttgagggcaccatcgccagcaagggcaagggcggggccctggccgctgacatcgacatcgacacagtgggcacagagggctggggagaagatgctgagctgcagctggatgaagatggctttgtggaggccacagagggcctgggagatgatgccctgggcaagggccaggaggagggcggcggctgggatgtggaggaggacctggagctgcccccagagctggacatcagccctggagctgctgggggcgcagaagatggcttctttgtgccccccaccaagggcaccagccccacccagatctggtgcaacaacagccagctgcctgtggaccacatcctggccggcagctttgaaacagccatgaggctgctgcatgaccaggtgggcgtcatccagtttggcccctacaagcagctgttcctgcagacctacgcccggggccgcaccacctaccaggccctgccctgcctgcccagcatgtatggctaccccaacagaaactggaaggatgctggcctgaagaatggagtgcctgctgtgggcctgaagctgaatgacctgatccagaggctgcagctgtgctaccagctgaccaccgtgggcaagtttgaggaggccgtggagaagttccgcagcatcctgctgtctgtgcccctgctggtggtggacaacaagcaggagattgctgaggcccagcagctgatcaccatctgccgggagtacatcgtgggcctgtctgtggagacagagaggaagaagctgcccaaggagaccctggagcagcagaagaggatctgtgagatggccgcctacttcacccacagcaacctgcagcctgtgcacatgatcctggtgctgaggacagccctgaacctcttcttcaagctgaagaacttcaagacagctgccacctttgcccggcggctgctggagctgggccccaagccagaggtggcccagcagaccaggaagatcctgagcgcctgtgagaagaaccccacagatgcctaccagctgaactatgacatgcacaacccctttgacatctgtgccgccagctaccggcccatctaccggggcaagcctgtggagaagtgccccctgagcggggcctgctacagccctgagttcaagggccagatctgccgggtgaccaccgtgacagagatcggcaaggatgtgattggcctgcgcatcagccccctgcagttcagatag

SEQ ID NO: 38737 - DNA, 3702 bp, Artificial Sequence
  derived and/or modified sequence
atgctgaccaagttcgagaccaagagcgcccgggtgaagggcctgtcctttcaccccaagcggccatggatcctcacctcattgcacaacggcgtgattcagctgtgggactaccgtatgtgtacactgatcgacaaatttgatgagcatgatggtcctgttcgcgggattgattttcacaaacagcaacccctgttcgtgtccggcggagacgattacaagatcaaagtgtggaattataagttgcgtaggtgtcttttcactctcctggggcacctcgactacataagaacaacgtttttccaccatgaatatccttggatactgagcgcttccgatgatcaaaccatcagggtgtggaactggcagtcccgtacttgtgtgtgtgtgctgacaggacacaatcactacgtgatgtgtgctcagttccaccccaccgaggacttggtggtaagcgctagccttgaccagaccgtcagagtgtgggatatttcaggattgaggaagaaaaatctgtctccaggagcggtagagagtgacgtgcgcggaattacaggggtcgacctcttcggtactactgacgcggtggtgaaacatgtattggaaggccacgacagaggagttaactgggctgcatttcatcccaccatgcctttaatcgtgagtggggctgatgatcggcaggtcaagatctggaggatgaacgagtccaaggcatgggaagttgacacttgcagagggcattacaacaacgtatcctgcgcagtattccacccgcgacaggagttgattctgtccaacagcgaggataaaagcattcgcgtatgggatatgtcaaaaaggactggtgtacagacctttcgcagagatcacgatcgtttctgggttctggcagcccaccctaaccttaatctttttgccgcagggcatgatggagggatgatagtctttaagcttgagagggaacggccagcttatgccgtgcatggaaatatgctccattacgtgaaggatagatttctccggcagctggacttcaactcctcgaaagacgtggccgtgatgcagttgcggtcaggatccaaatttcccgtgttcaatatgagctacaaccctgcggagaatgccgtgctcctgtgtacccgggcatctaatctggagaacagtacctatgatttgtacaccatccccaaggacgcagactctcagaacccagatgcaccggagggtaaaaggtcaagcggcttgactgccgtttgggttgcgagaaatcgattcgctgttttggataggatgcacagcctgctgattaagaaccttaaaaacgagatcactaagaaagtgcaggtccctaattgcgacgagatcttctatgccgggaccggcaatcttcttctgcgtgatgccgacagcattaccctgtttgatgttcagcagaaacgcaccctggcttccgtgaagatctcaaaggttaagtatgttatctggtcggctgatatgtcccacgtggcactgctcgcgaaacacgaacatagttgcccgttacccttgacagccatagttatctgcaatcggaagcttgatgccctgtgtaacattcatgagaacatacgcgtgaagtctggggcctgggatgagtctggcgttttcatttacaccacctccaatcatataaagtatgccgtgaccactggggatcatgggatcatccggaccctcgacctgcccatttacgtgactagagttaaggggaacaacgtatactgtctggatagagaatgccgtcccagagtgctgaccatcgatcctaccgagtttaaattcaagctggctcttatcaatcgaaaatacgatgaggtcctgcacatggttcggaacgcgaagctggtcggacagagcatcattgcctacctccagaagaaaggctaccccgaggtcgctttacattttgttaaggatgaaaagacgagattctccctggccttagaatgtggcaatattgagattgcactggaggctgctaaggcactggatgataaaaattgttgggaaaagctgggagaggtggccctgttgcagggcaatcaccaaatagtggagatgtgctatcagcggaccaagaacttcgacaaactgtcattcctctatttaattacagggaatttagagaagcttagaaagatgatgaaaattgccgagattcggaaggacatgagtggacactaccagaacgccctgtacctcggggacgtgtccgaacgtgtacggatcttaaagaactgtggtcagaagtctctggcatacctcacagcggccacccatggcttggatgaggaagcagagtctctcaaagagacttttgaccccgagaaagagacaattcccgacatagaccctaacgccaagctgctgcagcctccggcgccaattatgccgttagataccaactggcccttgttgaccgtaagtaagggtttttttgaaggaaccatagcaagtaagggcaaaggaggagctctggctgctgatatcgatatcgacactgtggggacagagggatggggagaggatgctgagcttcaactagatgaagacggattcgtcgaggccaccgaaggactgggtgatgatgccctggggaaaggacaggaggaaggcggaggctgggacgttgaagaggatctcgaactgccccctgagctcgatatctctcccggggcagctgggggtgcagaggacggctttttcgtgccccccactaaaggcactagccccactcaaatctggtgcaataacagccaattaccggtcgaccatattctcgctgggtcatttgagaccgccatgcgcctgttacatgaccaggtgggtgttatacagttcggcccctacaagcaactcttcttacagacctacgcacgggggcgtacaacataccaggctcttccttgcctgcccagcatgtacggttaccccaaccgaaattggaaagacgcgggtctgaaaaatggtgtcccggcagttggcctgaaattaaacgatctgattcagcgcctgcaactttgttatcagctcaccactgtgggaaaattcgaggaggctgtagagaaattccggagcatcctgttatcagtcccactcctggtcgtcgacaacaaacaggaaattgccgaggcacagcagttaatcacaatctgcagagagtacatcgtaggcctttccgtggagactgagcgaaaaaaattgccaaaggaaaccctagaacaacaaaagcggatctgtgagatggccgcttactttacacacagcaacctgcagcccgtgcatatgatcctggtcttacgcacagcactcaatctcttctttaagctgaagaatttcaaaacagccgctacgttcgctcgcaggttgcttgaattgggacctaaacctgaggtggctcagcagaccagaaaaatcctcagcgcatgtgaaaaaaacccgactgacgcctaccagctgaattatgacatgcataacccctttgacatttgcgccgctagctatagacccatttaccggggcaagccagtggaaaaatgtcctcttagcggtgcctgctattcacccgagtttaagggccagatctgtcgtgtcaccactgtgacagagataggaaaggacgttataggactgaggatcagtccactgcaatttcgctag

SEQ ID NO: 38738 - DNA, 3702 bp, Artificial Sequence
  derived and/or modified sequence
atgttaaccaaattcgaaactaagagtgcacgcgttaagggactgagctttcaccctaagcggccttggatcttgacgtccctgcacaatggggtgatacaactgtgggactatcggatgtgtactttgatagacaagttcgacgagcatgatggacctgtgagggggattgactttcacaaacaacagccactattcgtgagtggaggcgatgattacaagattaaggtctggaattacaaactgaggagatgtttgtttactttgctgggacacctggattatattaggacaacgtttttccaccacgagtacccatggatcctaagcgcttccgacgaccagaccattagggtctggaattggcaatcgcggacttgtgtatgcgtgctcaccggccataaccactacgtgatgtgtgcccagttccatcctactgaagacctggtggtctccgcatctcttgatcagacggttcgggtatgggacataagtggacttcgtaaaaagaacttatcacccggtgcggtggagtctgacgtcagaggcattacaggagtagacctctttggcaccaccgatgcagttgtcaagcacgtgctggaaggccacgatcggggtgtcaattgggccgcttttcacccaactatgcctcttatcgtgtctggggctgacgatcggcaggtcaaaatatggcgcatgaatgaaagtaaggcctgggaggttgacacttgccgcggacattataataatgtaagctgtgcagtgttccacccgcgtcaggagttgattttgtctaacagcgaagacaagtccatccgggtgtgggatatgagtaagcggactggggtgcagaccttccgaagagatcatgatcgattctgggtgctcgctgcccaccctaacctgaatctgttcgcggctggccacgatggtggtatgatcgtgtttaagctcgaacgcgaaagaccagcttacgccgtgcacgggaacatgctgcactacgtaaaggatcgtttcctcaggcagctggattttaattcaagcaaagatgtggccgttatgcaactacgttcggggtcaaagtttccagtgttcaatatgtcttataaccctgccgaaaacgcggttctgctgtgtactcgggcatccaaccttgagaatagcacttatgacttgtacacgatacctaaggatgccgacagccagaatcccgacgcgccagagggaaaacgttcaagcggcctgaccgccgtttgggtggctcggaacagattcgccgtgttggataggatgcattccctgctgatcaagaatttgaagaatgaaatcaccaagaaggttcaggtgcccaattgtgacgaaatcttttatgctgggacaggaaatttactcctccgagacgcagattccatcaccctgtttgatgtgcagcagaagcgcacattagcttcagtgaagattagcaaagtgaaatacgtcatttggagtgccgacatgtcccatgtagcattgcttgcgaagcacgagcatagctgccccttacccctcactgccattgtcatctgcaacagaaagctcgatgccctgtgcaacatccacgaaaacattagagtgaagagtggcgcttgggatgagagcggtgttttcatctacactacaagtaaccatatcaaatacgccgtcaccacaggagaccatggtataatacgcacactggacctccccatctatgtgaccagagtaaaaggaaacaacgtttactgcttggatcgagaatgccgacccagagttctcaccatcgaccccactgaattcaaattcaaacttgccttgatcaaccgtaaatacgatgaggtgcttcacatggtgcgcaatgctaagctcgtcggccagagtattatcgcctatctgcagaaaaagggttatcccgaagtggcattgcatttcgttaaggacgagaaaactagatttagcctggccttggagtgcgggaatattgagattgctttggaagccgcaaaagcgcttgatgacaagaactgttgggagaagctcggcgaggttgccctcctgcagggcaaccaccagatagtggagatgtgttatcaaaggacgaaaaactttgataagctgtctttcttgtacttgatcaccggaaacctggagaaattacgcaagatgatgaagatcgctgaaataaggaaagatatgtccggacactatcaaaatgccctgtatctgggggacgttagcgagcgggtccgaattctgaagaattgcggccaaaagtccctggcttacctaacagccgcaactcacggtctcgatgaggaggcggagtctctgaaagaaaccttcgatccggaaaaggagacgatacctgacatcgaccctaatgccaagctcctccagcctcccgctcccattatgccgttggatactaattggccacttctgacagtgtctaaggggttctttgagggaactattgcctcgaaaggaaaaggaggcgcactcgccgcagacatcgacattgatactgttggcaccgaaggctggggagaagatgccgagctccagctggacgaagacggtttcgtggaggctactgagggcctgggagatgacgcgttggggaagggccaggaggagggcggtggatgggatgtcgaggaagatctggagctccctcccgagctcgatattagccctggcgctgctggcggtgctgaagatggatttttcgtgccccctacgaagggaacatctccaactcaaatctggtgcaacaactcccagctgcccgtggatcacatcctggcgggaagcttcgagacggcaatgaggctactacatgatcaagtgggcgtaatacagtttggtccgtataaacagctgtttctacagacctatgcacgcggaaggactacttaccaggcactgccctgcctgccgtccatgtatggttacccaaacagaaattggaaggacgcaggcctgaagaatggcgttccagcggtagggctgaagttgaacgacctcatccagcggcttcaactgtgttatcaactgactacggtggggaagttcgaagaggcagttgaaaaattccgttctattctcctgtccgtacctctgttggtggtcgataacaagcaggaaatcgctgaggctcagcagctcatcactatctgtcgagaatacatcgtgggcctgagtgtggagacagagcgcaaaaagttgcctaaggagacactggagcagcagaaaagaatttgcgaaatggccgcatactttacacattctaatttgcagccagtgcacatgatcctagtcctccggaccgctctgaacctttttttcaagttaaagaattttaagaccgctgccactttcgccagacgactgctggagctgggacccaagccagaagttgctcaacagactagaaagatcctatcggcatgcgaaaaaaatcctactgacgcctaccagttaaattacgatatgcacaacccctttgacatttgtgcagcctcatacagaccgatttatcgcggaaaaccagtggaaaaatgtcccctctctggggcttgctattccccggaatttaaggggcagatttgtcgggtcactacagtgacagaaattggcaaggatgtgatcggcctgagaattagccccctgcagttccggtag

SEQ ID NO: 38739 - DNA, 4664 bp, Artificial Sequence
  derived and/or modified sequence
cgctgacgtggaggcgtccgaagggcagcagggtgtgtcggggctcggattaagacatcggagtcggagacctgagagatgttaaccaaattcgagaccaagagcgcgcgggtcaaagggctcagctttcaccccaaaagaccttggatcctgactagtttacataatggggtcatccagttatgggactatcggatgtgcactctcattgacaagtttgatgaacatgatggtccagtgcgaggcattgacttccataagcagcagccactgttcgtctctggaggagatgactataagattaaggtttggaattacaagcttcggcgctgtcttttcacattgcttgggcacttagattatattcgcaccacgttttttcatcatgaatatccctggattctgagtgcctccgatgatcagaccatccgagtgtggaactggcaatctagaacctgtgtttgtgtgttaacagggcacaaccattatgtgatgtgtgctcagttccaccccacagaagacttggtagtatcagccagcctggaccagactgtgcgcgtttgggatatttctggtctgaggaaaaaaaacctgtcccctggtgcggtggaatcggatgtgagaggaataactggggttgatctatttggaactacagatgcagtggtgaagcatgtactagagggtcacgatcgtggagtaaactgggctgccttccaccccactatgccccttattgtatctggggcagatgatcgtcaagtgaagatctggcgcatgaatgaatcaaaggcatgggaggttgatacctgccggggccattacaacaatgtatcttgtgccgtcttccaccctcgccaagagttgatcctcagcaattctgaggacaagagtattcgagtctgggatatgtctaagcggactggggttcagactttccgcagagaccatgatcgtttctgggtcctagctgctcaccctaaccttaacctctttgcagcaggccatgatggtggtatgattgtgtttaagctggaacgggaacggccagcctatgctgttcatggcaatatgctacactatgtcaaggaccgattcttacgacagctggatttcaacagctccaaagatgtagctgtgatgcagttgcggagtggttccaagtttccagtattcaatatgtcatacaatccagcagaaaatgcagtcctgctttgtacaagagctagcaatctagagaatagtacctatgacctgtacaccatccctaaagatgctgactcccagaatcctgatgcgcctgaagggaaacgatcctcaggcctgacagccgtttgggtcgctcgaaatcggtttgctgtcctagatcggatgcattcgcttctgatcaagaatctgaagaatgagatcaccaaaaaggtacaggtgcccaactgtgatgagatcttctatgctggcacaggcaatctcctgcttcgagatgcggactctatcacactctttgacgtacagcagaagcggactctggcatctgtgaagatttctaaagtgaaatacgttatctggtcagcagacatgtcacatgtagcactactagccaaacacgaacactcatgccctttgcctcttacagccattgtgatctgtaaccgcaaactggatgctttatgtaacattcatgagaacattcgtgtcaagagtggggcctgggatgagagtggggtatttatctataccacaagcaaccacatcaaatatgctgtcaccactggggaccacgggatcattcgaactctggatttacccatctatgtcacacgggtgaagggcaacaatgtatactgcctagacagggagtgtcgtccccgggtactcaccattgatcccactgagttcaaattcaagctggccctgatcaacagaaaatatgatgaggtactgcacatggtgaggaatgccaaactagttggccagtctattattgcttatctccagaagaagggctatcctgaagtggcactgcattttgtcaaggatgagaaaactcgctttagtctggcactggagtgtggaaacattgagattgctctggaagcagccaaagcactggatgacaagaactgctgggaaaagctgggagaagtggccctgctgcaggggaaccaccagattgtggaaatgtgctatcagcgtaccaaaaactttgacaaactttccttcctgtatcttatcactggcaacttagaaaaacttcgcaagatgatgaagattgctgagatcagaaaggacatgagtggccactatcagaatgccctatacctgggtgatgtgtcagagcgtgtgcggatcctgaagaactgtggacagaagtccctggcctatctcacagctgctacccatggcttagatgaagaagctgagagcctaaaggagacatttgacccagagaaggagacaatcccagacattgaccctaatgccaagctgctccagccacctgcacctatcatgccattggataccaattggcctttattgactgtatccaaaggattttttgaaggcaccattgccagcaaagggaagggaggagcactggctgctgacattgacattgacactgttggtacagagggctggggagaggatgcagagctgcagttggatgaagatgggtttgtggaggctacagaaggtttgggggatgatgctcttggcaagggacaggaagaaggaggtggctgggatgtagaagaagatctggagctccctcctgagctggatatatcccctggggcagctggtggggctgaagatggtttctttgtgcccccaaccaagggaacaagtccaactcagatctggtgtaataactctcagcttccagttgatcacatcctggcaggctctttcgaaacagccatgcggctccttcatgaccaagtaggggtaatccagtttggcccctacaagcaactgttcctacagacatacgcccgaggccgcacaacctatcaggctctgccctgcctaccctccatgtatggctatcctaatcgcaactggaaggatgcagggctgaagaatggtgtaccagctgtgggcctgaagcttaatgacctcatccaacggttgcagctgtgctaccagctcaccacagttggcaaatttgaggaggctgtggaaaaattccgttccatccttctcagtgtgccacttcttgttgtggacaataaacaagagattgcagaggcccagcagctcatcaccatttgccgtgagtacattgtgggtttgtccgtggagacagaaaggaagaagctgcccaaagagactctagaacagcagaagcgcatctgtgagatggcagcctatttcacccactcaaacctgcagcctgtgcacatgatcctggtgctgcgtacagccctcaatctgttcttcaagctcaagaacttcaagacagctgccacctttgctcggcgcctactagaactcgggcccaagcctgaggtggcccaacagacccgaaaaatcctgtctgcctgtgagaagaatcccacagatgcctaccagctcaattatgacatgcacaacccctttgacatttgtgctgcatcatatcggcccatctaccgtggaaagccagtagaaaagtgtccactcagtggggcctgctattcccctgagttcaaaggtcaaatctgcagggtcaccacagtgacagagattggcaaagatgtgattggtttaaggatcagtcctctgcagtttcgctaaggccccctttgtgtgcatgggtcagtcaccatatgttccccccagagaatgtgtctatatcctccttctaacagcaccttccccctgcagctactcttcagatctggctctctgtaccctaaaacctagtatctttttctcttctatggaaaatccgaaggtctaaacttgacttttttgaggtcttctcaacttgactacagttgtgctcataattgtccttgcctttccagcttaattattttaaggaacaaatgaaaactctgggctgggtggagtggctcatacctgtaatcccagcactttgggaggctacggtgggcagatcatctgaggccaggagttcgagacctgcctggccaacatggcaacaccccgtctctaataaaaatataaaaattagcctggcatggtagcatgcgcctatagtcccagctgctcaggaggctgaggcatgagaatcgcttgaacctaggaggtggaggttgcattcaactgagatcataccacttcattccagcctgggtgacagagcaagactctgtctcaaaaaaaaaaaaaaggaaaactctgtgatggacatttgtttagtaaatcccttcagtatttatccctcctttccccacagcagctttctttcctgtcaactagaaaggagcaggatgtaataaatacattttggtgtgactaggccacaccaactcttaatcatctcccattttccttagacatttaaatttcaaggcaggtaccctctgtgtactcagaaatttgaagaagttatttggttttccaaaatgcacactgcgggttattgatttgttctttacaactattgttctcatatttctcacactaaataaatctctatgagagcttcttga

SEQ ID NO: 38740 - DNA, 3702 bp, Artificial Sequence
  derived and/or modified sequence
atgctgaccaagttcgagaccaagagcgccagagtgaagggcctgagcttccaccccaagagaccctggatcctgaccagcctgcacaacggcgtgatccagctgtgggactacagaatgtgcaccctgatcgacaagttcgacgagcacgacggccccgtgagaggcatcgacttccacaagcagcagcccctgttcgtgagcggcggcgacgactacaagatcaaggtgtggaactacaagctgagaagatgcctgttcaccctgctgggccacctggactacatcagaaccaccttcttccaccacgagtacccctggatcctgagcgccagcgacgaccagaccatcagagtgtggaactggcagagcagaacctgcgtgtgcgtgctgaccggccacaaccactacgtgatgtgcgcccagttccaccccaccgaggacctggtggtgagcgccagcctggaccagaccgtgagagtgtgggacatcagcggcctgagaaagaagaacctgagccccggcgccgtggagagcgacgtgagaggcatcaccggcgtggacctgttcggcaccaccgacgccgtggtgaagcacgtgctggagggccacgacagaggcgtgaactgggccgccttccaccccaccatgcccctgatcgtgagcggcgccgacgacagacaggtgaagatctggagaatgaacgagagcaaggcctgggaggtggacacctgcagaggccactacaacaacgtgagctgcgccgtgttccaccccagacaggagctgatcctgagcaacagcgaggacaagagcatcagagtgtgggacatgagcaagagaaccggcgtgcagaccttcagaagagaccacgacagattctgggtgctggccgcccaccccaacctgaacctgttcgccgccggccacgacggcggcatgatcgtgttcaagctggagagagagagacccgcctacgccgtgcacggcaacatgctgcactacgtgaaggacagattcctgagacagctggacttcaacagcagcaaggacgtggccgtgatgcagctgagaagcggcagcaagttccccgtgttcaacatgagctacaaccccgccgagaacgccgtgctgctgtgcaccagagccagcaacctggagaacagcacctacgacctgtacaccatccccaaggacgccgacagccagaaccccgacgcccccgagggcaagagaagcagcggcctgaccgccgtgtgggtggccagaaacagattcgccgtgctggacagaatgcacagcctgctgatcaagaacctgaagaacgagatcaccaagaaggtgcaggtgcccaactgcgacgagatcttctacgccggcaccggcaacctgctgctgagagacgccgacagcatcaccctgttcgacgtgcagcagaagagaaccctggccagcgtgaagatcagcaaggtgaagtacgtgatctggagcgccgacatgagccacgtggccctgctggccaagcacgagcacagctgccccctgcccctgaccgccatcgtgatctgcaacagaaagctggacgccctgtgcaacatccacgagaacatcagagtgaagagcggcgcctgggacgagagcggcgtgttcatctacaccaccagcaaccacatcaagtacgccgtgaccaccggcgaccacggcatcatcagaaccctggacctgcccatctacgtgaccagagtgaagggcaacaacgtgtactgcctggacagagagtgcagacccagagtgctgaccatcgaccccaccgagttcaagttcaagctggccctgatcaacagaaagtacgacgaggtgctgcacatggtgagaaacgccaagctggtgggccagagcatcatcgcctacctgcagaagaagggctaccccgaggtggccctgcacttcgtgaaggacgagaagaccagattcagcctggccctggagtgcggcaacatcgagatcgccctggaggccgccaaggccctggacgacaagaactgctgggagaagctgggcgaggtggccctgctgcagggcaaccaccagatcgtggagatgtgctaccagagaaccaagaacttcgacaagctgagcttcctgtacctgatcaccggcaacctggagaagctgagaaagatgatgaagatcgccgagatcagaaaggacatgagcggccactaccagaacgccctgtacctgggcgacgtgagcgagagagtgagaatcctgaagaactgcggccagaagagcctggcctacctgaccgccgccacccacggcctggacgaggaggccgagagcctgaaggagaccttcgaccccgagaaggagaccatccccgacatcgaccccaacgccaagctgctgcagccccccgcccccatcatgcccctggacaccaactggcccctgctgaccgtgagcaagggcttcttcgagggcaccatcgccagcaagggcaagggcggcgccctggccgccgacatcgacatcgacaccgtgggcaccgagggctggggcgaggacgccgagctgcagctggacgaggacggcttcgtggaggccaccgagggcctgggcgacgacgccctgggcaagggccaggaggagggcggcggctgggacgtggaggaggacctggagctgccccccgagctggacatcagccccggcgccgccggcggcgccgaggacggcttcttcgtgccccccaccaagggcaccagccccacccagatctggtgcaacaacagccagctgcccgtggaccacatcctggccggcagcttcgagaccgccatgagactgctgcacgaccaggtgggcgtgatccagttcggcccctacaagcagctgttcctgcagacctacgccagaggcagaaccacctaccaggccctgccctgcctgcccagcatgtacggctaccccaacagaaactggaaggacgccggcctgaagaacggcgtgcccgccgtgggcctgaagctgaacgacctgatccagagactgcagctgtgctaccagctgaccaccgtgggcaagttcgaggaggccgtggagaagttcagaagcatcctgctgagcgtgcccctgctggtggtggacaacaagcaggagatcgccgaggcccagcagctgatcaccatctgcagagagtacatcgtgggcctgagcgtggagaccgagagaaagaagctgcccaaggagaccctggagcagcagaagagaatctgcgagatggccgcctacttcacccacagcaacctgcagcccgtgcacatgatcctggtgctgagaaccgccctgaacctgttcttcaagctgaagaacttcaagaccgccgccaccttcgccagaagactgctggagctgggccccaagcccgaggtggcccagcagaccagaaagatcctgagcgcctgcgagaagaaccccaccgacgcctaccagctgaactacgacatgcacaaccccttcgacatctgcgccgccagctacagacccatctacagaggcaagcccgtggagaagtgccccctgagcggcgcctgctacagccccgagttcaagggccagatctgcagagtgaccaccgtgaccgagatcggcaaggacgtgatcggcctgagaatcagccccctgcagttcagatag

SEQ ID NO: 38741 - protein, 1066 aa, Artificial Sequence
  derived and/or modified sequence
MEGLLHYINPAHAISLLSALNEERLKGQLCDVLLIVGDQKFRAHKNVLAASSEYFQSLFTNKENESQTVFQLDFCEPDAFDNVLNYIYSSSLFVEKSSLAAVQELGYSLGISFLTNIVSKTPQAPFPTCPNRKKVFVEDDENSSQKRSVIVCQSRNEAQGKTVSQNQPDVSHTSRPSPSIAVKANTNKPHVPKPIEPLHNLSLTEKSWPKDSSVVYAKSLEHSGSLDDPNRISLVKRNAVLPSKPLQDREAMDDKPGVSGQLPKGKALELALKRPRPPVLSVCSSSETPYLLKETNKGNGQGEDRNLLYYSKLGLVIPSSGSGSGNQSIDRSGPLVKSLLRRSLSMDSQVPVYSPSIDLKSSQGSSSVSSDAPGNVLCALSQKSSLKDCSEKTALDDRPQVLQPHRLRSFSASQSTDREGASPVTEVRIKTEPSSPLSDPSDIIRVTVGDAATTAAASSSSVTRDLSLKTEDDQKDMSRLPAKRRFQADRRLPFKKLKVNEHGSPVSEDNFEEGSSPTLLDADFPDSDLNKDEFGELEGTRPNKKFKCKHCLKIFRSTAGLHRHVNMYHNPEKPYACDICHKRFHTNFKVWTHCQTQHGIVKNPSPASSSHAVLDEKFQRKLIDIVREREIKKALIIKLRRGKPGFQGQSSSQAQQVIKRNLRSRAKGAYICTYCGKAYRFLSQFKQHIKMHPGEKPLGVNKVAKPKEHAPLASPVENKEVYQCRLCNAKLSSLLEQGSHERLCRNAAVCPYCSLRFFSPELKQEHESKCEYKKLTCLECMRTFKSSFSIWRHQVEVHNQNNMAPTENFSLPVLDHNGDVTGSSRPQSQPEPNKVNHIVTTKDDNVFSDSSEQVNFDSEDSSCLPEDLSLSKQLKIQVKEEPVEEAEEEAPEASTAPKEAGPSKEASLWPCEKCGKMFTVHKQLERHQELLCSVKPFICHVCNKAFRTNFRLWSHFQSHMSQASEESAHKESEVCPVPTNSPSPPPLPPPPPLPKIQPLEPDSPTGLSENPTPATEKLFVPQESDTLFYHAPPLSAITFKRQFMCKLCHRTFKTAFSLWSHEQTHN

SEQ ID NO: 38742 - protein, 49 aa, Artificial Sequence
  derived and/or modified sequence
MEGLLHYINPAHAISLLSALNEERLKGQLCDVLLIVGDQKFRAHKNVLA

SEQ ID NO: 38743 - DNA, 7414 bp, Artificial Sequence
  derived and/or modified sequence
gcgatgacctcatccctggtgtgggatgacgtcaaattcaagatggatggaatcacagcggcagcggcggctgcggcgcgcgcgagccgagtgtgagcggaaaggggcccggcgtctgcctcgagactgaagaccgataaactcaagccatggagggattactgcattacatcaaccctgcacacgccatttctctcctaagtgccctgaatgaggagcgtctcaaaggacagctgtgtgatgtgctgctgattgttggagaccaaaagttccgagctcataaaaacgtcttggctgccagcagcgaatactttcagagtttattcacaaataaggaaaatgagtcacaaactgtatttcagcttgacttctgtgagccagatgcttttgataatgttttaaactacatttattcttcctctctatttgttgagaagagcagccttgctgctgtgcaagaacttggctatagtcttgggatttcctttctgactaacatcgtttctaaaacacctcaagccccctttccaacgtgtcctaatagaaaaaaagtgtttgtagaagatgatgaaaacagttctcaaaagagaagtgtcattgtttgtcaaagtagaaacgaagcgcaaggaaaaactgttagtcaaaatcaacccgatgtaagccatacttcccggccctctcctagcattgcagtcaaggccaataccaataagccacatgtcccaaaaccaatagaaccacttcataatttgtcattaactgaaaagagttggccgaaagatagttctgtggtatatgcaaagtctcttgagcattctggatctttggatgatcctaatagaatcagtttggtgaaaagaaatgcagtgttgccttcaaagcctctgcaagacagagaagctatggatgataaaccaggtgtgagtggtcagcttccaaaaggaaaagctctagagctggctttgaagagaccacggccacctgttttgtctgtttgtagctcatcagagactccctatctattaaaagaaactaacaaaggaaatggtcaaggtgaagatagaaacttgttgtactattcaaagttaggcttagtgatcccatccagtggatctggttctggaaaccaaagcattgacaggagtggcccacttgttaagagtctcctcagacggtcattgtcgatggatagccaggttcctgtctattcaccttccatagatttgaaatcttcccagggatcatcttcggtgtccagtgatgcaccagggaatgtgttgtgtgctttatctcagaagtcatctttaaaagattgtagtgaaaaaacagccctagatgacaggcctcaagtgctacaaccgcatcgcctcaggtcctttagtgcttctcagtcaacagacagggagggagcttcccctgtgactgaggtgcgcataaagactgagcccagcagcccgctgtcggacccctcggacatcatccgcgtcactgtgggagatgcggcaacaacagcagctgcctcatcttcgtcggtcacaagagacctgtctctgaaaacagaagatgaccaaaaagacatgagcagactcccagcaaaaaggaggttccaagcggaccgaagattgccgtttaagaagttaaaggtgaatgagcacgggtctcctgtgtcagaagataattttgaggaaggctcaagccctactctccttgatgcagattttccagattctgatttgaataaagacgaatttggtgagttggaggggacgagaccaaacaaaaaatttaaatgcaaacattgccttaagatctttagatcaacagcaggtcttcaccgtcatgttaacatgtaccataacccagaaaagccctacgcttgtgacatctgtcacaagaggtttcacaccaacttcaaagtgtggacacactgtcagacccaacacggcatagtgaagaacccatcaccagcctctagttcacatgctgttttggatgaaaaattccaaagaaagctgattgacatagtgagagagagagaaattaagaaggccctgatcattaagttaaggcgcggcaagcctggttttcagggacagagtagctcccaagcacagcaagtcatcaagaggaacttgagatctcgagccaaaggagcttacatttgtacttactgcggaaaagcgtaccgctttctctctcaatttaagcagcatataaaaatgcatccaggagaaaaaccccttggagtaaataaagttgctaaaccaaaagagcatgctcctcttgcaagtccagtagaaaacaaggaggtttaccagtgccgcctctgtaatgctaagctctcttctctcctagagcaaggaagccacgagcggctgtgccggaacgcggccgtctgcccttactgcagcctcaggtttttctcgcccgagctgaagcaagaacacgagagcaagtgtgagtataagaagctgacctgcctcgagtgcatgcgcaccttcaagtcctctttcagcatctggcggcaccaggttgaagtccataatcagaacaacatggcacccaccgaaaacttttctttgcccgttttggaccacaatggtgatgtgactggttcttcaaggccccaatcccagcctgagcccaacaaagtaaaccacatcgtcaccacaaaagacgacaacgtgttcagtgattcttcagaacaagttaacttcgactcggaagattcctcttgtcttcccgaagaccttagtctttccaagcaactgaaaatccaagtcaaagaggagcctgtggaggaggctgaagaagaggcacccgaggccagcacagcccccaaagaagcgggtcctagcaaagaagccagcctgtggccctgcgagaagtgtgggaagatgttcacggtgcataagcagctggagcgtcaccaggagcttctgtgctctgtgaaaccatttatttgtcacgtgtgcaacaaagcttttcgcactaattttcgactctggagtcacttccaatcgcacatgtctcaggcttcagaggaatcggcacataaggaatctgaggtgtgccctgttcccacaaactctccctctccaccacctctgccaccgccaccaccactgcccaagatccagcctctggagcctgacagccccacaggcctgtccgaaaacccaactccagccacagaaaaactgtttgtgccccaagaatcagacacccttttttaccatgccccacccctttcagcaatcacatttaaaagacagtttatgtgtaaactttgccacaggacattcaagactgcatttagtctttggagtcacgaacaaacacacaattgaaagaccaacactttttacctatgggaggcagtccccagatttcaacctgaattgtgaaatgtgtcataagaaacaaaatattttttaaacaagaataataaaggttggagattgttacgcttgaaattaagttggaggcaaattgataattacttagtaatgtccttaactttagaaatacagcttttaaaatattgtggttctggaccttacaagaacaagatggtttgatttcattaatgttgaaattggattagtcttgattgtgtgcatggttcctcattccatggtgtcagtataatcatttaattgaggtttttggttttttattgattagtggaatactgtcgaagtattccttcttttaattattttagacacttgagttctagttaaatcttaaccatgttcttaagtccaaaataggaagaagtggagtagtttgcagtattgatttatatcttagactactttagcaataaaagataaatctcaactttaataagttatcctgacacttgataaaaataaatatttggtattttgtggtcatgtaaaacttctttttgtatgaaaattgtgagaaatttaaatcagcaatagtaacacttagatttttataaactaacaaaaacttgctctcagtcaatataataaatgatagttaaactctaaggaagacctgggaaatgaaaacaatttatggaagtcccctacagtcagtttataagggcttcagtagtgatagacattgttataaaaacttgtaccatgttacatgtacactgcaccacagtctaaattcagaccagcatttgaaggactgcacatatttcatttcctctgatttatgctgtcacaaattgaaaatctgagtgtagttaggacaaaaaacaaagctaaccatatggcactaattttgattttaacattagtgtaacaaataaggtcgggacatatatttacatagatcccagacactcaagaattagcacagctgatgtaaaattctaaattaccatttacttccagatagagcagaggagaaacacctcactgcagtttcaacatgctttccaagaacaatatatacgacatatacattttcctgcctctctcttgtgacaatttctgttagaatttgttgggggtctgatggttaaaatcatgggcaaggccattctctacatcattgcttaatatttcaaaaataggtattagagcactatcagtggtccaaaattagttttagctacttattttgctccatgggttttgggcttttcaaagaatactatgtataatttgtaattgaaagcctttcagtaggatatccaaagttcaatgtgtttcaaaagggaaaacttttacttgtgggggtgggagttagatgtattaaaaaaacgaaactacaaaatccttttaagaaagtaataccaatttagactctagtttgtgttacgaggtattctttcaaattttttttaaaagccaactactgtcattaagaaataattttagatttgtgctctagcagaaaataactctgtacccatcaatcttattgccaacattccataccagtggtaggaaagatattctcattttttttattgaaccagacatttttataaaatactgattgactttgtacattatggatattatatatgaaattttgccttgtattctttcacttgaaaaaactccaaaattccacaatattttagtagttaacttcctattctttcttaaatttgatggagaagggaaaataaattgcagttattgattcttgccatctttgttttcttaaagaaatctatgcattttaaggataaaactaaagcatatgggtttacatgaaacatcaggatggattattgtacattgaattcattccgcgtataatgtggtatttcttactctgtccatcttggtagctgtcacttcaaaagaagacagtttccctgagtaatcatcacctacatggccattagagtatctatcggtgataattccatgatacagagtatcttggcattataaattcagtatcccaggacctaaacctttatgctacattttcgaagattttttaaaaataatattgttaatcagtaaaaaaaaaaaatatttttgatctaaacataggttctgcatatctgttagattttaaaaatgactggtgttttgtcttcacatttttgtctaagcaaggaatataagatttcaaataaaattttgaaccaaaaacatttataatgccgttctggtttttctattactttttatactgtactttaaaagcattaggctgaaagagtttattttggtggtcaaaaaaaatatgcttccactcatgtaactattttaaatgttaagaagtaaaataatgaaagatatgttaattactttattcagtaaagttttttaagaatgtttatctcagccagtaggcaaatacttggtgtaaaacaagttggtcttaaattgttgcaactcattagctagtgaagatattcatgtaaatatattttaggattgtaattaattttgaaaatgtagaaagctctttattccatgtaagtatgcaggatgcctgcttttttatgcagttgtggaaagaatgtaaaatgttttaatatattctttgttaatctgagaacttgatactgaatcgtttatgtgggagaaggaaggagtaacataaaacatgtttttatcactcaaagtaagcaatggaggtaacaaatattgtgcattttaacagtaatatttgaagatttgtagaatattcacctttaaaactagttagtatgcatttataattttaccagaatatacaactaacaattcaacagtgatgttctttgcatttgtggggagatgtgtgatgttcttggttttctggtttggaatggaacgtttatagccttgcctgtaaaaatgtgccccagcacttaatgagtgaccgtttgaatccatatgtagtcccattggtgctaatgagagtagctgctgtgaaacaggaataaaatgtgtctgttcacggaggtgcggtgtggatgcacctacaaggccaactctctgatcagggtgagggagagatggaagaattaacagatctaaagttggcctttgttgtctcaaattgggtttgtacacacatgcatgcatgtgtgtatacaactgtaatctggaacttcaggaagtaaaattatttgaagtttcttagtaaaaagtaattaggtataattccaaatagatttctgtataaattgtatctaactggattacaagtcagtttgacaatttacgatgtctcagtgatgtttctgcaataattgtgaaatgcattattgatttaaataatgctgacacgtactctttaaaagtgttctttaacactgactactaaactttaagttttaaaaaataggttttcatttatggctttttgtggttttagcactttaagaagtttaattttttgtaatttttaatatgctctttcagtgtatctcagcgggtactccagcttgtggcattcccatgtgactggggagaagacaaaattggtgtttagattctggaggagaaaaaatgagttacaatgtcaggtgtttttaaaaattccttttagagacagtcttttgggaaccaaagtattttactgtaaatctttaaaataacagaattcagtgctctttcatttgttaatgctgtccagatttttcacacagttatactcagttaatactagttttcagaacattagtccaaggctatttcaagttttccattgaatatatgcttatggttaaaagaaaaacgaatggttttataattctgtgtattttgtcatatgccttagcagagtaagtcatttttccattttacttaggaataagctttttcgaactgaaaattcatggtaaaataggatttctatctaatgttaatccattgcttatttgtattcaattccattgtctacagtttgcttaaatgttgactaagaatgattggagtcaataaatttgtactgtattttgcttcga

SEQ ID NO: 38744 - DNA, 3201 bp, Artificial Sequence
  derived and/or modified sequence
atggagggcctgctgcactacatcaaccccgcccacgccatcagcctgctgagcgccctgaacgaggagagactgaagggccagctgtgcgacgtgctgctgatcgtgggcgaccagaagttcagagcccacaagaacgtgctggccgccagcagcgagtacttccagagcctgttcaccaacaaggagaacgagagccagaccgtgttccagctggacttctgcgagcccgacgccttcgacaacgtgctgaactacatctacagcagcagcctgttcgtggagaagagcagcctggccgccgtgcaggagctgggctacagcctgggcatcagcttcctgaccaacatcgtgagcaagaccccccaggcccccttccccacctgccccaacagaaagaaggtgttcgtggaggacgacgagaacagcagccagaagagaagcgtgatcgtgtgccagagcagaaacgaggcccagggcaagaccgtgagccagaaccagcccgacgtgagccacaccagcagacccagccccagcatcgccgtgaaggccaacaccaacaagccccacgtgcccaagcccatcgagcccctgcacaacctgagcctgaccgagaagagctggcccaaggacagcagcgtggtgtacgccaagagcctggagcacagcggcagcctggacgaccccaacagaatcagcctggtgaagagaaacgccgtgctgcccagcaagcccctgcaggacagagaggccatggacgacaagcccggcgtgagcggccagctgcccaagggcaaggccctggagctggccctgaagagacccagaccccccgtgctgagcgtgtgcagcagcagcgagaccccctacctgctgaaggagaccaacaagggcaacggccagggcgaggacagaaacctgctgtactacagcaagctgggcctggtgatccccagcagcggcagcggcagcggcaaccagagcatcgacagaagcggccccctggtgaagagcctgctgagaagaagcctgagcatggacagccaggtgcccgtgtacagccccagcatcgacctgaagagcagccagggcagcagcagcgtgagcagcgacgcccccggcaacgtgctgtgcgccctgagccagaagagcagcctgaaggactgcagcgagaagaccgccctggacgacagaccccaggtgctgcagccccacagactgagaagcttcagcgccagccagagcaccgacagagagggcgccagccccgtgaccgaggtgagaatcaagaccgagcccagcagccccctgagcgaccccagcgacatcatcagagtgaccgtgggcgacgccgccaccaccgccgccgccagcagcagcagcgtgaccagagacctgagcctgaagaccgaggacgaccagaaggacatgagcagactgcccgccaagagaagattccaggccgacagaagactgcccttcaagaagctgaaggtgaacgagcacggcagccccgtgagcgaggacaacttcgaggagggcagcagccccaccctgctggacgccgacttccccgacagcgacctgaacaaggacgagttcggcgagctggagggcaccagacccaacaagaagttcaagtgcaagcactgcctgaagatcttcagaagcaccgccggcctgcacagacacgtgaacatgtaccacaaccccgagaagccctacgcctgcgacatctgccacaagagattccacaccaacttcaaggtgtggacccactgccagacccagcacggcatcgtgaagaaccccagccccgccagcagcagccacgccgtgctggacgagaagttccagagaaagctgatcgacatcgtgagagagagagagatcaagaaggccctgatcatcaagctgagaagaggcaagcccggcttccagggccagagcagcagccaggcccagcaggtgatcaagagaaacctgagaagcagagccaagggcgcctacatctgcacctactgcggcaaggcctacagattcctgagccagttcaagcagcacatcaagatgcaccccggcgagaagcccctgggcgtgaacaaggtggccaagcccaaggagcacgcccccctggccagccccgtggagaacaaggaggtgtaccagtgcagactgtgcaacgccaagctgagcagcctgctggagcagggcagccacgagagactgtgcagaaacgccgccgtgtgcccctactgcagcctgagattcttcagccccgagctgaagcaggagcacgagagcaagtgcgagtacaagaagctgacctgcctggagtgcatgagaaccttcaagagcagcttcagcatctggagacaccaggtggaggtgcacaaccagaacaacatggcccccaccgagaacttcagcctgcccgtgctggaccacaacggcgacgtgaccggcagcagcagaccccagagccagcccgagcccaacaaggtgaaccacatcgtgaccaccaaggacgacaacgtgttcagcgacagcagcgagcaggtgaacttcgacagcgaggacagcagctgcctgcccgaggacctgagcctgagcaagcagctgaagatccaggtgaaggaggagcccgtggaggaggccgaggaggaggcccccgaggccagcaccgcccccaaggaggccggccccagcaaggaggccagcctgtggccctgcgagaagtgcggcaagatgttcaccgtgcacaagcagctggagagacaccaggagctgctgtgcagcgtgaagcccttcatctgccacgtgtgcaacaaggccttcagaaccaacttcagactgtggagccacttccagagccacatgagccaggccagcgaggagagcgcccacaaggagagcgaggtgtgccccgtgcccaccaacagccccagccccccccccctgcccccccccccccccctgcccaagatccagcccctggagcccgacagccccaccggcctgagcgagaaccccacccccgccaccgagaagctgttcgtgccccaggagagcgacaccctgttctaccacgccccccccctgagcgccatcaccttcaagagacagttcatgtgcaagctgtgccacagaaccttcaagaccgccttcagcctgtggagccacgagcagacccacaactag

SEQ ID NO: 38745 - DNA, 150 bp, Artificial Sequence
  derived and/or modified sequence
atggagggcctgctgcactacatcaaccccgcccacgccatcagcctgctgagcgccctgaacgaggagagactgaagggccagctgtgcgacgtgctgctgatcgtgggcgaccagaagttcagagcccacaagaacgtgctggcctag

SEQ ID NO: 38746 - DNA, 3201 bp, Artificial Sequence
  derived and/or modified sequence
atggaaggcctgttgcactacattaatcctgcacacgctatcagcctgctttcagccttgaatgaggagcgccttaaaggccagctttgtgatgtcctcctaatagtcggcgaccagaagttccgcgctcataagaacgtacttgcagcctcatctgaatacttccagagccttttcactaataaggagaatgagagccagacagtgttccagttggatttctgcgagcctgacgcattcgacaacgtgctcaactacatatattccagcagcttatttgtggagaaaagcagccttgccgcagtacaggagctcggatacagcctgggtatctcatttctcacgaatattgtgtctaagactccccaggccccgtttcccacctgtcccaatcgtaaaaaagtattcgtggaagacgacgaaaattccagtcaaaagaggagcgtcattgtgtgtcagagcaggaatgaagcccaaggaaagacggtgagccagaaccaacccgatgtcagtcatactagtcgtccatctccttccatcgcagttaaggctaatactaataagcctcatgtaccaaagcccatcgaaccgctgcacaatttgagcctgaccgaaaaatcatggcctaaggacagctcggtggtttacgcaaaatccttagaacactctggctctctcgacgaccctaaccggatttccctcgtcaagagaaatgctgtgctccctagcaagcctttgcaagatcgcgaggccatggatgataagccaggtgtgtccgggcaactaccaaagggaaaggccctcgaattagcgctaaaacgcccacgtccccctgtcctctctgtatgctcaagtagcgagaccccgtacctgctgaaagagacaaacaagggtaacggacagggcgaggatagaaacttactgtattattccaaactgggcttagtgataccatcctctgggtcaggatctggcaatcagtctatcgatcgctctggacctctggtgaagtcgttgctgaggcggtctttgagcatggattcacaagtgcccgtatattccccctccatcgacctcaagtccagtcagggctctagttcggtgagtagtgatgctcctggaaatgtgctttgtgcgttatcccaaaaatctagcctgaaagattgctctgagaagactgctctagacgatcgtccccaggtgctgcagcctcaccgcttgagatcattctcagccagccaatctactgatagggagggagccagccccgttacagaggtgcgaatcaaaactgagcctagtagtccccttagcgatcccagcgatattatccgagtgacagtcggcgacgccgctaccaccgctgctgcttcgtcctcctcagtgactcgtgacttatccttgaagactgaggacgatcagaaagacatgagcagacttcccgctaagaggagatttcaggctgacagacgactcccttttaaaaagcttaaggtcaatgaacatggcagccccgtgagtgaggacaacttcgaggagggctcgtctcccactctgctggatgcagattttcccgactccgatctgaataaagacgagtttggcgagcttgagggaacgaggcctaacaagaagttcaaatgcaagcactgcttgaaaatcttcaggtcaactgctggattacaccgtcacgtgaatatgtaccacaatccagagaagccttacgcgtgtgacatttgtcacaaacggtttcatacaaattttaaggtatggactcattgccaaactcagcacggtattgtcaagaaccctagccctgccagtagctctcacgcagtgcttgacgaaaagttccagaggaagctgatcgatattgtaagggaaagagaaatcaagaaagccctgatcattaaactgcggagagggaagccagggtttcagggccagagttcatctcaggcccagcaagtgatcaaacggaacctgcgctcccgcgccaagggagcttatatttgtacttattgcggcaaggcctaccgtttcctgtcccaattcaaacagcatatcaaaatgcaccccggagagaagccccttggggtgaataaagtggcgaagcctaaagagcacgcccctcttgccagtcccgttgagaataaggaggtataccagtgcagactgtgtaacgccaaattaagtagtctgctggaacagggttcccatgagaggctgtgtcggaatgctgctgtgtgtccatactgcagtcttcgattcttcagccccgagctaaagcaggaacacgagtctaagtgcgagtacaagaaattgacctgtctggaatgtatgagaacattcaagtctagtttttcaatctggcgccaccaagtggaagtgcacaatcagaataacatggcccccaccgaaaacttcagtctgcccgtgttggaccataacggagatgttacagggtcgagcagaccacagagtcagcccgaaccaaacaaggtgaatcacatcgtgactaccaaagacgacaatgtattctcagacagcagcgagcaagtcaacttcgactctgaggactcctcatgcctgcccgaagacttgtcactgtctaagcagctgaaaatccaggttaaggaagaaccagtggaagaggccgaagaagaggcccccgaagcatccacggccccaaaggaggcagggccaagcaaagaggcctcgctgtggccctgcgagaaatgtggtaaaatgtttacagttcacaaacagttggagcgacaccaagagttactctgcagcgtgaagccattcatctgccacgtgtgcaataaagcttttcgaactaacttccggctttggtcgcacttccagtcccatatgtcccaggcctccgaagaaagtgcacacaaggagagcgaagtgtgtcctgtccccacaaattcaccaagccccccacctctgccaccaccacctccactcccaaagatccaacctctggagccagactcccccaccggcctttcagaaaatcctacacctgccaccgaaaaactattcgtaccacaggaaagcgacacactcttctatcatgcaccacccctgtctgccataaccttcaagcggcagttcatgtgtaagctatgccatcgcacgtttaaaactgcattttcactgtggtcccatgagcagacccataactag

SEQ ID NO: 38747 - DNA, 150 bp, Artificial Sequence
  derived and/or modified sequence
atggagggcctgctgcactatattaaccccgcacacgccatcagcctgcttagtgcattaaatgaggaaaggttaaaaggacagctttgcgatgtgcttttgattgtgggtgatcaaaagttccgagcacataaaaacgtcctggcctag

SEQ ID NO: 38748 - DNA, 3201 bp, Artificial Sequence
  derived and/or modified sequence
atggaggggctcctgcattacattaacccagcccatgccatttctttactgagcgcactgaatgaggagcgtctaaagggacaactgtgcgacgtgttactgatcgtcggagaccagaaattccgtgctcacaagaacgtattggccgctagctccgaatactttcagtctcttttcaccaataaagaaaacgagtcacaaacagtgttccaattggacttttgcgagcccgatgcctttgataatgtactgaattatatttactcaagctccctctttgtcgagaaatcatctctggctgctgtccaggagttgggatacagcctcgggatatccttcctcacgaatatagtaagcaaaacccctcaggccccatttcccacttgccctaataggaaaaaggtattcgtagaagatgatgagaactcttcccaaaagcgcagtgtgatcgtctgtcagtcacgcaatgaagcccagggcaagacagtgtcgcaaaaccagcctgatgtttcacacacatcccggccttccccatccatcgccgtgaaagccaatacaaacaagccacatgtgccgaaacccatcgaaccgctgcacaatttgtcactgacggagaagagctggccaaaggacagcagcgttgtgtacgcgaaatccttagagcacagcgggtcattagatgatcccaatcgtataagcctggttaagcggaatgccgtcctgccttcaaagcctcttcaggacagggaagcaatggatgacaaacccggtgtgagtggccagttgcctaagggcaaggctctggagctggccctgaaacggcctcggcctcctgttctctctgtgtgtagctctagtgaaaccccttatctcttgaaagaaactaacaagggcaatggacagggagaagatcggaacctactttattattcaaagttaggactggtgatcccatctagtggatccggatcaggcaatcagtctatcgatcggagtggtccactcgtgaagtctctgctcagaaggtcactgtccatggatagccaggtgccagtgtatagtccctctatcgacctaaaaagttcccaagggtcatcaagcgtgtcctcggacgctccaggaaacgtgctttgcgccttaagccagaagtctagtctgaaggactgttctgaaaaaacagccctggatgaccggccacaggtcttgcagcctcatcgcctgcgaagtttctctgctagccagtcaactgacagggaaggcgcttctccagtcactgaagttcggattaagaccgaaccatcttctccgctcagtgatccgtcagatatcatccgcgtaacggtgggcgacgctgccacaaccgccgcagcatcatcatcaagtgtgacacgcgacctatcccttaagacagaggatgaccaaaaagacatgagtagactgcccgccaaacgtcgcttccaggccgaccggcgccttccctttaaaaagctgaaagtaaacgaacacggctcgcctgtgtccgaggacaattttgaagaaggctcctctccaacactcctcgatgcagacttccctgactccgacctcaacaaggacgagttcggggaacttgagggtacaagaccgaataagaagttcaaatgtaaacattgcctcaaaatctttcggtcaactgcgggattgcatcggcacgtgaatatgtatcataacccagagaagccatacgcctgcgatatctgccataaacgattccatactaacttcaaagtgtggacccactgccagacacaacatggcatcgtgaagaatcctagtcccgcaagttcatcacacgcggtactcgatgagaaatttcagcgcaagctgattgacatcgtcagggagcgggaaattaaaaaggccttgataatcaagctgaggcgcgggaagccaggcttccaggggcagtcatctagtcaagcacagcaggtcattaaaagaaatttgcggtccagggcaaaaggtgcatacatttgcacctattgcggcaaagcctacaggttcctttcccagttcaagcagcacattaaaatgcacccgggagaaaaacccctgggcgttaacaaggtcgccaaacctaaagagcacgcgcctctcgctagcccagttgaaaacaaggaagtgtaccagtgccggctgtgtaacgcgaaactctcctcgctactcgagcaggggtctcacgaaagattatgtcgtaatgcggccgtgtgcccatattgctctctgcgcttcttctcccctgaactgaagcaggaacatgaatccaaatgcgagtacaaaaaactcacttgtctcgagtgtatgcgaaccttcaagtcttctttcagcatctggcgacaccaggtcgaagttcataaccagaacaacatggctcccactgagaacttctctctcccagtgcttgatcacaatggagatgttacgggtagcagtagacctcagtctcagccagagcccaataaggtgaaccacatcgtgaccacgaaagacgataacgtgtttagcgattcttcagaacaggtgaatttcgattcagaggatagctcttgccttccagaagacctctctctctccaagcagcttaagatccaggttaaagaggaacccgttgaggaggcagaggaggaggcacccgaggcatctaccgctccaaaggaagcaggcccttcgaaagaggcctcactttggccttgtgagaaatgcggcaagatgtttacggtgcacaaacagctcgaacgccatcaggaattgctttgttcagtcaaacctttcatttgtcacgtgtgcaataaggctttccgcaccaactttaggctttggtcccacttccagagccacatgtcccaggccagcgaggaaagcgcacacaaggagagcgaggtgtgccctgtccctacaaacagcccaagcccaccaccattgccacccccacctccccttccaaaaattcagcctttggaaccggactcgccaaccggtctgtcagaaaaccccacccctgcgaccgaaaagctctttgtgccccaagagtcggacacactattctaccacgcccccccactttcagctattacattcaagcggcaatttatgtgcaagttgtgtcatcgtactttcaaaaccgcgttcagcctctggagtcatgaacaaacacacaactag

SEQ ID NO: 38749 - DNA, 3201 bp, Artificial Sequence
  derived and/or modified sequence
atggagggcctgctccactacatcaatcccgctcacgccatctccttactcagcgccttgaacgaggagcggctgaagggccagctatgtgacgtgctcctgatcgtcggggatcagaaatttcgtgctcacaaaaatgttctggccgccagcagtgaatactttcaatccctgttcactaataaggaaaatgagtcccaaaccgttttccaacttgatttttgcgagcctgatgcctttgacaatgtccttaactatatatattcatcctccttgtttgtggagaagtcctctcttgcagcagtgcaggagctgggctactcccttggcatctcgtttctgactaatattgttagcaagacaccccaggctccgttcccaacctgtccaaatcggaaaaaagtcttcgttgaggacgacgagaactcaagccagaagcggtcagtcatagtctgtcagtcgcgaaatgaagctcagggaaagaccgtgagccaaaatcagcctgatgttagtcatacttcgagaccttccccgtctatcgcagtgaaggccaatacaaacaagccccatgtcccgaaaccaatagaacctctgcacaatctgtcacttactgaaaagagctggcccaaagacagctccgtcgtctatgctaaatctctggagcactcaggtagcctagacgacccaaaccgcatttctctagtgaagaggaacgccgtgctcccttctaagccactccaggatcgcgaagccatggatgacaagcccggggtgtccggccagttgcctaagggaaaggctttagaattggcgctcaaaaggccccggccgcctgtgttgtccgtctgctcttcctctgaaacaccatacctattaaaggaaaccaacaaggggaatgggcagggcgaggaccgcaacctcctctactactctaaattgggactcgtgatcccttcctccggctctggtagtggcaatcaatccatcgacagaagcggtccgctcgtaaagtccctccttaggagatctttgtctatggactcccaggtcccggtctattcaccctcaattgacctgaagagctcccagggatccagctccgtttcatcggatgcgcccggcaatgtgctttgcgcactctcacaaaagtcaagtctgaaggattgttcagaaaagacggcattggacgataggccacaagtgctgcagccccatcgcttacggagtttttctgcaagtcagagcactgaccgagaaggcgcctccccagtgacagaggtgagaatcaagactgagcctagttctcctctgagcgatccttcagacattatccgtgtaactgttggagacgctgccaccacagcagcggcctcttcatccagcgttacacgggacctgagccttaaaactgaggacgatcagaaagatatgagtagacttcctgctaagcgccgtttccaagcggaccgacgcttaccattcaagaagctcaaagtgaatgagcatggaagccccgtctccgaagacaacttcgaagaaggaagtagccctacattattggatgctgacttccccgacagtgatctcaataaggacgagtttggcgaactggagggcacgcggcctaataagaaattcaagtgcaaacactgtctcaagatattcagatctactgccggtctacaccggcatgtcaacatgtatcacaatcctgaaaagccatatgcttgcgatatctgccataagcggtttcacaccaattttaaagtttggactcactgccagacgcagcatggaatagtgaagaatccatccccagccagtagctctcacgccgtactcgacgaaaagttccagcggaaattgatagacatagtgcgggagagagagatcaagaaagcgctgatcatcaagttgcgtagaggcaaaccaggatttcaggggcagagctcttcacaggcccagcaggtgatcaagagaaacctgaggtctagggcgaagggagcctatatttgtacctattgcggtaaagcttaccgatttttgtctcagtttaaacagcatattaaaatgcaccccggagaaaaaccacttggggtgaataaggtggctaagccaaaagagcatgcacccctggcatctcccgtggaaaacaaggaagtatatcaatgccgcctgtgcaatgctaaactctcaagtttgctggaacagggaagtcacgagagactgtgtcggaacgcagctgtgtgcccctactgtagtcttcggttctttagtccagaactgaaacaggagcacgagagcaagtgtgagtacaagaaattaacctgcctggaatgtatgagaacctttaagagctccttctcgatttggaggcaccaggtggaggtgcacaatcaaaacaacatggctccaaccgaaaatttcagtttgcctgtgctagaccacaatggcgacgtgactggatcctcaaggccccagtcgcagccagaaccaaacaaggtcaatcacatcgtaaccaccaaagacgacaacgtgttttccgacagctccgagcaggtaaacttcgacagtgaggatagttcctgcctgcctgaagatttatctttatcaaagcagctcaaaatccaagtgaaagaggaaccagtggaggaagccgaggaggaagctccggaagcgagcacggcccctaaagaggctggcccatcaaaagaagccagcctatggccttgcgaaaagtgcggcaagatgttcacagtgcacaagcagctggagcgccaccaggaacttttatgttccgtcaaacccttcatttgtcacgtgtgcaataaagcctttcgcacaaactttcggttgtggtctcacttccagtcccatatgagccaggctagtgaggaatcagcccacaaagaaagcgaggtatgtcctgtgccgactaactcaccatctcctcctccattgcccccaccccccccactccccaagattcaaccactggagcccgactctccaaccggcctgtccgagaatcccacgccagccacagagaagctgttcgtaccacaggagagtgacacactgttctatcacgctccaccgttgagcgccattacattcaagcggcagttcatgtgcaaactgtgccatcgtacttttaagacagcattctccttgtggagtcacgagcagactcacaactag

SEQ ID NO: 38750 - DNA, 150 bp, Artificial Sequence
  derived and/or modified sequence
atggaagggttactgcactatatcaatccagctcacgccatctctttgctctctgccttaaacgaggaaagacttaaggggcaattatgtgacgtactgctcatcgtcggagaccagaagttccgtgcccacaagaatgttttagcttag

SEQ ID NO: 38751 - DNA, 3201 bp, Artificial Sequence
  derived and/or modified sequence
atggagggcctgctgcactacatcaacccagcccacgccatcagcctgctgagcgccctgaatgaggagcggctgaagggccagctgtgtgatgtgctgctgattgtgggggaccagaagttccgggcccacaagaatgtgctggccgccagcagcgagtacttccagagcctcttcaccaacaaggaaaatgaaagccagaccgtcttccagctggacttctgtgagccagatgcctttgacaacgtgctgaactacatctacagcagcagcctgtttgtggagaagagcagcctggccgctgtgcaggagctgggctacagcctgggcatctccttcctgaccaacatcgtgtccaagaccccccaggcccccttccccacctgccccaacaggaagaaggtgtttgtggaggatgatgagaacagcagccagaagaggagcgtcatcgtgtgccagagcagaaatgaggcccagggcaagacagtgtcccagaaccagccagatgtgagccacaccagccggcccagccccagcattgctgtgaaggccaacaccaacaagccccacgtgcccaagcccatcgagcccctgcacaacctgagcctgacagagaagtcctggcccaaggacagctctgtggtgtatgccaagagcctggagcacagcggcagcctggatgaccccaaccgcatcagcctggtgaagagaaatgctgtgctgcccagcaagcccctgcaggaccgggaggccatggatgacaagccaggagtgtctggccagctgcccaagggcaaggccctggagctggccctgaagaggcccaggcctcctgtgctgtctgtgtgcagcagcagcgagaccccctacctgctgaaggagaccaacaagggaaatggccagggagaagatagaaacctgctgtactacagcaagctgggcctggtgatccccagcagcggcagcggcagcggcaaccagagcattgacaggagcggccccctggtgaagagcctgctgcggcgcagcctgtccatggacagccaggtgcctgtgtacagccccagcattgacctgaagagcagccagggcagcagctctgtgtccagtgatgcccctggaaatgtgctgtgtgccctgagccagaagagcagcctgaaggactgcagcgagaagacagccctggatgaccggccccaggtgctgcagccccaccggctgcgctccttcagcgccagccagagcacagaccgggagggcgccagccctgtgacagaggtgcgcatcaagacagagcccagcagccccctgagtgaccccagcgacatcatccgggtgacagtgggagatgctgccaccacagctgctgccagcagcagctctgtgacccgggacctgagcctgaagacagaagatgaccagaaggacatgagccggctgcctgccaagaggcgcttccaggccgaccggcggctgcccttcaagaagctgaaggtgaatgagcacggcagccctgtgtctgaggacaactttgaggagggcagcagccccaccctgctggatgctgacttcccagacagcgacctgaacaaggatgaatttggagagctggagggcacccggcccaacaagaagttcaagtgcaagcactgcctgaagatcttccgcagcacagctggcctgcaccgccacgtgaacatgtaccacaaccctgagaagccctatgcctgtgacatctgccacaagcgcttccacaccaacttcaaggtgtggacccactgccagacccagcacggcatcgtgaagaaccccagccctgccagcagcagccatgctgtgctggatgagaagttccagaggaagctgattgatattgtgcgggagcgggagatcaagaaggccctgatcatcaagctgcggcggggcaagccaggcttccagggccagagcagcagccaggcccagcaggtgatcaagaggaacctgcggagccgggccaagggggcctacatctgcacctactgcggcaaggcctaccgcttcctgagccagttcaagcagcacatcaagatgcaccctggagagaagcccctgggcgtgaacaaggtggccaagcccaaggagcacgcccccctggccagccctgtggagaacaaggaggtgtaccagtgccgcctgtgcaatgccaagctgagcagcctgctggagcagggcagccatgagcggctgtgcagaaatgctgctgtgtgcccctactgcagcctgcgcttcttcagccctgagctgaagcaggagcacgagagcaaatgtgagtacaagaagctgacctgcctggagtgcatgaggaccttcaagagcagcttcagcatctggaggcaccaggtggaggtgcacaaccagaacaacatggcccccacagagaacttcagcctgcctgtgctggaccacaatggagatgtgacaggcagcagccggccccagagccagcctgagcccaacaaggtgaaccacatcgtgaccaccaaggatgacaacgtgttcagtgacagcagcgagcaggtgaactttgacagcgaggacagcagctgcctgcctgaggacctgagcctgagcaagcagctgaagatccaggtgaaggaggagcctgtggaggaggccgaggaggaggcccctgaggccagcacagcccccaaggaggccggccccagcaaggaggccagcctgtggccctgtgagaagtgtgggaagatgttcaccgtgcacaagcagctggagcggcaccaggagctgctgtgcagcgtgaagcccttcatctgccacgtgtgcaacaaggccttccgcaccaacttccggctgtggagccacttccagagccacatgagccaggccagcgaggagagcgcccacaaggagagcgaggtgtgccctgtgcccaccaacagccccagccccccacccctgcccccacctccacccctgcccaagatccagcccctggagccagacagccccaccggcctgtctgagaaccccaccccagccacagagaagctgtttgtgccccaggagagtgacaccctcttctaccacgccccacccctgagcgccatcaccttcaagaggcagttcatgtgcaagctgtgccacaggaccttcaagacagccttcagcctgtggagccatgagcagacccacaactag

SEQ ID NO: 38752 - DNA, 150 bp, Artificial Sequence
  derived and/or modified sequence
atggagggcctgctgcactacatcaacccagcccacgccatcagcctgctgagcgccctgaatgaggagcggctgaagggccagctgtgtgatgtgctgctgattgtgggggaccagaagttccgggcccacaagaatgtgctggcctag

SEQ ID NO: 38753 - DNA, 3201 bp, Artificial Sequence
  derived and/or modified sequence
atggagggcctgctgcactacatcaaccccgcccacgccatcagcttgctgtcggcacttaatgaggagcgattgaaaggtcagctatgtgatgtgctgttgattgtcggagaccagaaattccgggctcacaagaatgtgcttgcagcgagctccgagtactttcaatctctttttaccaataaggagaatgaaagccagactgtatttcagttggacttctgtgaacccgacgctttcgacaatgtacttaactatatctattcatcttctctctttgtggagaagagtagtctagccgccgtgcaagaactcggatacagccttgggattagcttcctgactaatattgtgagtaaaacgccacaagcaccgtttcccacctgtcctaaccgtaagaaagtattcgtcgaagatgatgagaattcttctcagaagcggtctgtcattgtgtgccaaagtcggaacgaggcccaaggcaagacagtgagccagaaccagccagacgtatctcacacgtccagacctagccctagtattgctgtgaaggccaacaccaataagccacacgtgcccaaacctatcgagccgttgcataatctgagtctgacagaaaagtcttggccaaaggactcctcagtggtgtatgctaaatccctggagcactctggcagtctcgatgatcctaacagaatttccttagtcaagcgtaacgccgtcctgccaagcaaacctttacaggacagggaagccatggacgataaaccgggtgtatcaggacagctgccaaagggcaaagctcttgagctggccctgaagcggcccagacctcccgtgctctcagtgtgcagctcttcagagactccctatctcctcaaggagaccaacaaggggaacgggcagggggaggacagaaatctcctctactacagcaagctgggcctggtcatcccgagttcagggtcagggtcggggaaccagagcattgaccgttccggaccactagtgaagagccttctgcggcgctcactaagtatggattcccaggtcccggtttattctccaagcatagatttaaagtcatctcaaggttcaagttccgtttcatcggacgcccctggtaatgtgttgtgtgcactcagtcagaaaagctcactcaaggactgttctgagaaaacagccctggatgacagaccccaagtgctgcagccccatcgtcttaggtccttctcagcctcccagagtactgatcgggaaggagcttcacctgttaccgaggtgagaataaaaaccgagcctagcagtccactatccgatccctccgacatcattcgagtgacagtcggggacgccgcgaccaccgccgccgcttcttccagttctgttacacgagacttatcactgaagacggaggatgatcagaaagacatgtctaggctccctgctaagagacgattccaggctgaccgcagactcccattcaaaaagctgaaagttaatgaacatggtagtcctgtcagtgaagataatttcgaagaaggatcaagccccacactgctcgacgcagactttccagacagtgacctcaataaggacgagttcggagaacttgaggggactagacccaacaaaaagttcaagtgcaagcattgccttaagatatttaggagtactgcaggtctccataggcatgtcaacatgtaccacaaccccgaaaaaccttacgcgtgtgacatatgtcacaagagattccacacaaatttcaaggtttggacacactgccagacccagcacgggatcgtcaagaatccgtccccggcaagttcctctcacgctgtcttggacgaaaaatttcagcgtaagcttattgacattgttagagagcgtgaaatcaagaaagcgctgatcattaagctccgccgaggtaagccaggcttccagggccaatcgtcatcgcaggcgcagcaggtcattaaacgaaatcttcggtctcgcgccaaaggcgcctatatctgcacttactgtggcaaggcgtatcggtttttgtctcaattcaaacagcatattaagatgcaccccggggagaagccactcggcgtaaacaaggtcgccaaaccaaaagagcacgcccctttagctagtcccgttgagaacaaggaggtttaccagtgcaggctgtgcaacgctaagctttcgtctttactagaacagggaagtcacgagcgactatgcagaaatgctgcagtgtgcccatactgcagcttgcgcttcttttcccccgaacttaaacaggaacatgagtctaagtgcgaatataagaaattaacttgcctcgagtgtatgcgtacctttaaatcttctttctccatatggcgacaccaggtcgaggtccataatcaaaacaatatggcgccgacagaaaacttttctctgcccgtgctggaccacaatggtgatgtgacggggtcaagtagacctcaatctcaacccgagccaaataaggtgaatcacatcgtgacaacaaaagatgataacgtcttttctgacagcagcgagcaggtgaatttcgacagcgaagattctagttgcctccctgaggacctgagtctgtccaagcaactcaagattcaggttaaagaagaacctgtggaagaggccgaagaagaagcccccgaggcttcaacagcgcctaaggaagccggtcccagtaaggaggcgagtctttggccctgtgaaaaatgcggcaaaatgttcaccgttcataaacagctggagcgtcaccaggagctgctgtgctccgtgaagccctttatatgtcatgtgtgtaacaaggcatttcgaacgaattttaggttgtggagccactttcaatcccatatgagtcaggctagcgaagagagtgcacataaagagagcgaggtgtgtcctgttcccactaatagcccttcaccaccccctttgccgcctcccccccccttgcctaagatacagccactggaacccgacagtcctacggggctcagtgagaacccaactcctgccacagaaaaattattcgttccacaagaatctgatacactcttttatcatgctccaccgctgtcagctatcaccttcaagcgccagttcatgtgcaagctgtgtcatagaacgtttaagacagcattttcgctgtggtctcatgagcagacccataactag

SEQ ID NO: 38754 - DNA, 150 bp, Artificial Sequence
  derived and/or modified sequence
atggagggcctgctgcactacatcaaccccgcccacgccatcagcctccttagcgccctgaacgaggagagactgaaagggcagctatgcgacgtgctgctgatcgtcggcgaccagaaattccgagcacacaagaatgtgctggcctag

SEQ ID NO: 38755 - DNA, 3201 bp, Artificial Sequence
  derived and/or modified sequence
atggagggcctgctgcactacatcaaccccgcccacgccatcagcctgctttccgcacttaacgaggagagactgaagggacagctgtgcgatgtcctcttaattgttggcgatcaaaagtttcgggcccacaagaatgtcctggccgctagcagtgaatatttccaatctctatttaccaataaagaaaacgagagtcagacagtgtttcaactggatttttgcgagcctgacgctttcgacaatgtcttgaattacatttactcgtccagccttttcgtggagaaaagctctttggccgccgtgcaggagctgggctactccttgggtatttcttttctgacaaacatcgtaagcaagacccctcaggcaccctttcccacttgtccgaaccgcaagaaagtgttcgtggaggatgacgagaattcgagccaaaaaagaagcgtgatcgtatgccagagccggaacgaagctcagggcaaaaccgtaagtcagaatcagcccgacgtcagccatacctctcgacccagcccttcaattgctgtgaaggcaaataccaacaagccccacgttcctaagcctattgaacccctgcacaacctctcactgacagaaaaatcttggcctaaagactcaagcgtcgtctacgccaagtctctggagcacagcgggagcctggacgacccaaaccggatctctttagtaaagaggaatgcagtgctccctagtaaaccccttcaggatagggaagctatggacgacaagcccggcgtgtctggccagcttccgaaagggaaggctctggagctggcactaaagcggccaaggccacctgtgttgtccgtatgttcttcttcagagacgccttatctcttgaaggaaacaaacaaagggaacggacagggggaggaccggaatctcttatattattccaagctggggcttgtgatcccctcctccggaagcgggagtggaaaccagtccatcgatcgctcaggccctctggtgaaatcattacttcgacggagcctgtcgatggattcccaagtgcctgtgtacagcccctccatagatcttaagagtagccagggtagcagctccgtgtcatctgatgcacccggtaatgtgctgtgtgctctgtctcagaaaagttctttgaaagactgtagcgaaaagaccgccctagacgatcgccctcaggtactgcaacctcaccgcctgcggtcattttctgcaagtcagtctaccgaccgtgagggcgccagcccagtcacagaagttagaattaaaactgagccatcttcacctctctccgatcccagtgatataatcagggtcacagtgggggatgcggcgaccactgccgctgcctcctcatcttctgtcacacgggatttatctctgaagacagaagatgaccagaaggacatgagccgcctgccagccaagcgaaggttccaggcagaccgtcgtcttccatttaagaagctgaaggtgaacgaacacggatcacccgtgagtgaagataatttcgaggaaggctcgagccctacgctcttagatgcagacttcccagactcagaccttaataaagatgaattcggagagttggagggtaccagaccaaacaagaagttcaaatgtaagcactgcttaaaaatctttaggtctacagccggcctgcataggcacgtcaatatgtatcataaccccgagaagccttacgcctgcgatatctgccataagcgttttcatacaaattttaaggtctggacgcactgtcagacccagcatgggattgtgaagaatccttcgccagccagttcatctcacgctgtcctggatgagaagttccagcggaaactgatcgacatcgtccgggagagagagatcaagaaggctctcatcattaagctcaggcgcgggaaacccgggtttcaaggacaatcgtcctcccaggcacaacaagtcatcaagaggaacttgcgctcccgtgccaagggggcgtacatatgtacctactgtggtaaggcataccggtttctgtcccagttcaagcagcacattaagatgcatcccggggagaaacctctcggggttaacaaagttgctaagccaaaagaacacgcccccctggcttccccggtggagaacaaagaggtgtaccagtgtagactctgcaatgccaagttgtcctcattgttggaacaggggtctcatgaacggctgtgcaggaatgccgccgtgtgtccctattgctcgcttagattcttcagtccggagctgaaacaggagcacgagagcaaatgcgaatacaaaaaattgacgtgcctggaatgtatgcgcacatttaagtcttccttctcaatctggcgccatcaggtggaagtccataaccagaataacatggcacccacagagaacttctccctaccagtgcttgatcacaacggcgatgtcacgggctcttccaggcctcagtcccagcctgagcccaataaagttaaccatattgtcaccacaaaggacgacaatgtcttcagcgactcgagcgaacaggtgaacttcgatagtgaggattcttcctgccttcccgaggatttatccctaagcaagcagcttaaaatacaggtgaaagaagaacccgtcgaggaggcagaggaagaggcacctgaagcaagcactgctccaaaggaggccggcccatcaaaagaggctagtttgtggccttgtgagaaatgcgggaaaatgttcaccgtgcacaagcagctggagaggcaccaggagctactgtgcagcgtcaagcctttcatctgtcacgtgtgcaacaaggcattccggacgaacttccgcctgtggtctcattttcagtcacatatgagccaggctagcgaggaatctgctcataaggaaagcgaggtgtgccctgtccctacgaattccccttctcctcctcctctgccaccacccccacctctgcctaaaatccagccccttgaacccgactcaccaactggactgtcagagaacccaaccccagccactgaaaagcttttcgtgcctcaggagtccgatactctgttctaccacgccccccccctatccgctatcaccttcaaaaggcagtttatgtgtaaactgtgccatagaacattcaagacagcctttagtttgtggtcacacgaacagacacacaactag

SEQ ID NO: 38756 - DNA, 3201 bp, Artificial Sequence
  derived and/or modified sequence
atggagggcctgctgcactacatcaaccccgcccacgccatcagcctcctaagcgcactcaatgaagaacgcctgaaggggcaactttgcgacgtccttctgatagtgggagaccaaaaatttagagcacacaagaacgtcctggcagctagctccgagtacttccaatcactgttcacaaacaaagaaaacgagagtcagactgtattccaactggatttttgcgaacccgacgcatttgacaacgtgttgaattacatatacagctctagcctgttcgtcgagaagtcctcactggcggctgtgcaggagctgggatactccttaggtatcagcttccttacaaatatcgtgtccaaaaccccgcaggcccctttcccaacatgtcccaatcggaagaaggtgtttgttgaagacgatgagaattcctcccagaagcgctcagtaattgtctgtcagtccagaaacgaggctcaggggaagaccgtgtcacaaaatcaacctgatgtgtcacacactagcaggccctcacccagcattgccgtgaaagccaacacaaacaagccgcacgttcctaaaccaattgaaccactgcataacctttcactgactgaaaaaagctggcctaaagactcttctgtggtatacgccaaaagtctggagcactctggtagcttggacgaccctaatcggattagcctggtgaagaggaatgctgtgttgccatcaaagcccctccaggatagagaggccatggacgataagcctggcgtgtccggtcagctgccgaagggcaaggcgttagagcttgcactcaaaagaccacggcccccggttctgtcagtttgcagctcctcagaaacaccctacctgctgaaagagacgaacaagggtaacggccagggggaggaccgcaatctgttgtactattccaaattaggcctggtgatcccttcctcgggcagtgggtcaggaaatcagtctatcgaccgctcaggaccgctggtgaagtcactgttgagacggtccctttctatggattcacaggtgcccgtctactcgcctagtattgatctgaagtccagtcaggggtcgtcttcagtatcctcagatgcccccggcaacgtactctgtgctctttctcagaaaagctcactcaaagactgctcggaaaaaacagcactagacgaccggccacaggtgctgcaacctcaccggctgaggtccttttctgcctctcagagtacggatcgggagggggcttcacccgtaacagaggtgaggatcaagaccgagccttcatcgcccctctccgacccaagcgacatcatccgcgtcactgtaggtgatgcagccacaacagcagccgctagcagttcctcggtcactcgtgatctctccttgaaaacagaggatgaccagaaggacatgtctcgactacctgccaagcgaagatttcaggctgaccggaggctgccctttaaaaagctcaaagtgaatgagcatgggagtcctgtgtcagaagacaatttcgaggaagggtccagtcctacattactggacgcggatttcccggattccgatctcaataaagatgagtttggagaactggagggtactcgacctaacaagaaatttaagtgtaagcactgcctgaagattttccggtctaccgcgggactccaccgtcacgtcaacatgtatcataatcccgagaaaccctatgcttgtgacatatgtcacaagcgatttcatactaactttaaagtttggacacattgccagacgcagcatggaatagtaaagaatccatccccagcatcttctagccacgctgtgctcgacgaaaaattccagcggaagttgatcgacatcgtaagagagagggagataaaaaaggcccttatcatcaagctgcgacgcggtaaacctggttttcaaggacaatcctcctcccaggcacagcaggtcattaagaggaacttgcgatctcgcgctaaaggtgcatacatttgtacatactgtggtaaggcctaccgcttcctcagccagttcaagcagcacatcaagatgcacccaggcgagaaaccacttggagtgaacaaggtagctaaacccaaggaacacgcccccctagccagcccagtcgagaacaaagaagtgtatcagtgccgcctgtgcaatgccaaactatcaagccttctggagcagggttcccatgaacgcctgtgcagaaatgccgctgtttgcccttactgcagcctgcggttcttcagtcccgaattaaaacaggaacacgaaagcaagtgtgagtacaagaagctgacctgtctggagtgtatgaggacgtttaaatcatcattctcaatttggaggcaccaggtggaggtgcataatcaaaataatatggcacctaccgagaatttcagtctgccagtgctcgaccacaatggggatgtgacaggatcatcacgccctcaatctcagcccgagcctaacaaagttaatcatatcgtgacaactaaagatgataacgtgttcagcgacagttcagaacaggtaaatttcgattctgaggactccagctgtctacccgaggatctgagcttgagtaaacagttgaaaattcaggtgaaggaagagcccgtggaggaagcggaagaggaagctccagaagcgtccacggcccccaaagaagccggccccagcaaagaggcatcattgtggccatgtgagaagtgtggcaaaatgttcaccgttcacaagcagctggaaaggcaccaggagctcctgtgcagcgttaaacccttcatttgccatgtgtgtaacaaagcattcaggacgaatttccggttgtggagtcacttccagagtcatatgtcccaagcatctgaggagtcagcgcataaggagtccgaggtttgtccagtcccgacaaattcacctagcccacccccgcttccacccccccccccattacccaagatacagccactggagcctgacagcccaactgggctcagcgagaatccaacccccgcgacagagaagctgttcgtgccacaggaaagcgatacactattctatcatgcccccccactctccgccattacatttaaacgtcagttcatgtgcaagctgtgtcatcgcactttcaaaaccgccttttccttatggagccacgagcaaacacacaactag

SEQ ID NO: 38757 - DNA, 150 bp, Artificial Sequence
  derived and/or modified sequence
atggagggcctgctgcactacatcaaccccgcccacgccatcagcctgctgagcgcactaaacgaagagagactgaaaggtcagctctgcgacgtgctgctcattgtgggtgaccagaaattccgcgcccataaaaatgttctggcatag

SEQ ID NO: 38758 - DNA, 3201 bp, Artificial Sequence
  derived and/or modified sequence
atggagggcctccttcactacataaatcccgcacacgcaataagcctcctgtccgccctcaatgaagaacggttgaagggacagctgtgtgacgtattgttgatcgtgggagatcagaaattccgggcacacaaaaacgtactcgctgcctcctctgaatactttcagtccctctttacaaataaggaaaatgagtcacagaccgtattccaattagacttttgcgagccggacgcctttgataacgtcttgaattacatatatagttcaagtctgtttgtggagaaaagctcgctcgccgcagtgcaggaactaggctatagcttgggcatctccttccttacaaacattgtatcaaagaccccccaggccccattccccacctgcccaaatcggaagaaagtgttcgtcgaagacgatgaaaacagcagtcagaagcgcagcgtcatcgtttgccagtcacgtaacgaggcacagggtaagacagtgtcacagaaccagcccgatgtctcccatacctcaagaccctccccttcgatcgcagtgaaggccaacactaacaagccacacgtgccaaaacctatcgaacccctccacaacctgagtctgaccgagaaaagttggccaaaagactcatccgttgtgtacgccaaatcccttgaacattcaggctcactcgatgacccaaaccgcattagtctggtgaagcgaaatgcggttctgccgtctaaacctctgcaagatcgagaagctatggacgacaagccgggtgtgagcgggcaactgccaaaagggaaagccctcgagttggcactaaagcgtccacgccctccggtcctgtccgtgtgctcttcctccgaaactccttatctactgaaggagactaacaagggtaatgggcagggggaggatcgcaacctcctatactactcaaagctgggactggtcatccctagctcgggtagtggaagtggcaaccagtccatcgaccggagtggaccacttgttaaatcactgttaagaaggtccctgagcatggactcccaggtcccagtgtactccccgagtatcgaccttaaatcctctcaggggtcttcctctgtgtcctccgacgcacccggtaacgtgctgtgtgcccttagccagaagagcagtttgaaggactgtagtgaaaagactgccctggacgatcgcccacaagtcctgcagcctcatagactacggtctttttcagcatcccagtctactgatagagagggggcaagccccgtgacagaggtgcgaattaaaacagagccgagctcaccactttccgatccttcagacatcattagagtgactgtgggggatgccgctactaccgcagccgcttctagctcatcagttacccgggacctcagtctcaagacggaagacgatcagaaagatatgtcgcggctccccgcaaaacggagatttcaggctgaccggcgactgccctttaagaagctgaaggtgaacgaacatggaagtcccgtctctgaggacaatttcgaggagggcagttctcccactctcttggacgctgactttcctgactctgatttgaataaagacgaatttggtgaactcgaggggacccggccaaacaagaagtttaagtgtaagcactgcctgaaaatcttccgtagcaccgcaggactccatcgtcatgtgaacatgtaccataacccagagaaaccttatgcctgtgatatttgtcacaaaagattccacacaaatttcaaggtttggacgcactgtcagactcagcacggaattgtaaaaaatccatctcctgcttcttccagtcacgccgtcttggacgagaagttccagcgtaagctgatcgatatcgtgcgcgaacgcgagattaagaaggcactgatcatcaaattgcgacgagggaaacccggtttccaagggcaatcctcttctcaggctcagcaggttatcaaaagaaacctccgttcacgcgctaagggggcttacatctgcacatattgtggcaaggcctatagattcctgagccagtttaaacaacatatcaagatgcatcctggtgaaaaacccctgggagttaataaagtcgcaaaaccaaaggagcatgcaccactggcttccccagtggagaataaagaggtgtaccagtgccggctgtgcaatgcaaagctgagttccctgctggagcagggctcccatgaaagactgtgtcgaaacgcagcagtctgtccgtactgctctcttaggtttttttcaccagaactgaagcaggagcacgagtctaaatgcgaatataagaagctcacctgcctggagtgtatgaggacctttaagagctcattttctatctggcgtcaccaggtcgaagtccacaaccagaacaatatggctcctaccgagaacttctccctgccggtgctggaccacaacggcgatgtgacagggtccagccggccacagagccagccagaacctaataaagtgaatcatatcgtgaccaccaaagatgataatgtgttctccgacagcagcgagcaagtgaatttcgacagcgaagacagcagttgtctgccggaggatcttagcctaagcaaacagcttaagatccaggtcaaggaagagcccgtcgaggaggctgaagaagaagccccagaggcttccactgcaccaaaggaggcaggtccgagtaaagaggcgtcattatggccttgcgagaagtgtggaaagatgtttacagtccacaaacagctggagagacatcaggagctgctgtgtagtgttaaaccctttatttgccatgtgtgcaacaaagcctttcgaactaacttccgcctgtggagccactttcagagccatatgtcccaagcttccgaggagagcgcccacaaagagtccgaggtctgcccggtgccaaccaatagtccctcccctccccctttaccgccaccccctcccctgcccaagatacagccattagaaccagattcacctactggcctctccgagaatccgacaccggctactgaaaagctcttcgtgcctcaggaatccgatacactgttctaccatgctccaccgctgtccgcaattacatttaagaggcagttcatgtgcaagctgtgtcaccgcacattcaaaaccgctttttccctgtggtctcacgagcagactcataactag

SEQ ID NO: 38759 - DNA, 150 bp, Artificial Sequence
  derived and/or modified sequence
atggaaggcctgttacattatatcaatccagctcacgccatctcattgctctcagcactaaatgaggaacgcctgaaggggcagctgtgtgatgtgctgttgatcgtcggcgaccagaagttccgggctcataaaaatgttttggcttag

SEQ ID NO: 38760 - DNA, 3201 bp, Artificial Sequence
  derived and/or modified sequence
atggaaggcttgctgcactacatcaatccagctcacgctatcagtctcctgtccgcactgaatgaagagaggctgaagggacaactctgtgatgtgctgcttatcgtaggggaccagaaattccgcgcacacaaaaatgtactggcagcctcatcagaatacttccagagtctgtttacaaacaaagagaacgaatcacagaccgtcttccaactagatttttgtgagccagatgccttcgataacgtactaaactacatttactctagcagcctgttcgtggagaaatcctcactggcagccgtacaggaattgggctatagcctcggtatctccttccttacgaatatagtgtctaagactccacaggctcccttcccaacatgtcccaacagaaagaaggtgtttgtcgaggatgacgagaactcctctcaaaagcgttccgtgatcgtctgtcagagcagaaatgaggcccagggcaagaccgtgagccagaaccagcctgacgtcagtcatactagtcgtccctcaccatcaatcgcagtcaaggccaatacgaataaacctcacgttccaaaaccgatagaaccgcttcacaaccttagtctgaccgagaagtcgtggcccaaagactcaagcgtcgtgtatgcgaaatcgcttgagcactccggctctctcgacgaccccaatcgtatctccctggttaagaggaacgcggtcctgccgagcaagccacttcaggatcgtgaggcgatggatgataaacctggcgtttcaggccagcttcccaagggtaaagccctcgaattggccctgaaaagacccaggcctccggtcctgtctgtgtgctctagctcagagacaccctatttgcttaaagagaccaacaaagggaacggacaaggagaggaccgcaatctgttgtattactcaaagctcgggcttgtgataccttccagtggcagcggcagcggcaatcagtctatcgacagatcagggcctcttgtgaagagcctgcttcgtcgaagtctgtccatggacagccaagtgccagtctattcacccagcatcgatcttaaatcctcgcaaggaagcagcagcgtttcaagtgacgccccagggaatgtgctgtgtgcactctctcaaaagagctcgctgaaggactgttccgaaaagacagctctggatgacaggccacaagtgctgcagccgcaccgattgagatccttctccgcgtcacagtcaacagatagagagggcgctagtcctgtgaccgaagtgaggatcaaaactgagccctcttcaccattgtcggatccaagcgatatcattcgcgtcacagttggcgacgctgccacaactgctgcggctagcagttcctccgttacgagggatttgtccctgaagacagaggacgatcaaaaggacatgtcccggctgcccgctaagcgaagattccaggcggaccggaggttacctttcaaaaagttgaaagtgaacgagcatgggtcaccagtatctgaagacaactttgaggagggatcttccccaaccttacttgacgccgactttccagactccgatttgaataaggatgagttcggagagctggaggggactagaccaaacaaaaaatttaagtgcaagcattgcctgaaaatttttagaagtacagctggactgcatagacatgtaaatatgtatcacaaccctgagaaaccatacgcctgtgacatctgtcacaagcggtttcacaccaattttaaggtttggacacattgtcagacacagcatggcatagtcaagaatccaagccccgcaagttctagccacgccgtgctcgacgaaaagtttcagcgaaaactaatagacatagtgcgcgagcgtgagatcaagaaggctttaattattaagctcaggcgcggaaaacctgggtttcaagggcagtctagctcccaggcacagcaagttataaagcgcaacctccgtagtagggccaagggcgcttacatctgtacttactgtgggaaggcctaccggtttttgtcacagttcaaacagcacatcaagatgcatcccggtgaaaaaccactgggggtcaacaaggtagccaaacctaaggagcacgcccctctggcaagcccagtagagaacaaagaggtgtatcaatgcagactctgtaacgcaaaactgagctccctgctcgagcaaggaagtcatgagcggttgtgccgcaatgccgcagtgtgcccatactgctcactacgattctttagcccagagcttaaacaggagcacgaaagcaaatgtgagtataagaagctgacttgcctggagtgtatgcggacatttaaatctagcttctccatttggcgccatcaggttgaggtgcacaaccagaacaatatggcaccaaccgagaatttttcgctacccgtattagatcataatggagacgtgacggggtcctctcgtcctcagagccagcccgaacccaacaaggtcaatcacatcgttacaaccaaggatgataacgtgttttctgacagcagcgagcaggtgaacttcgatagcgaggattcttcttgcctgcctgaggatctgtcgttgtccaaacagctgaagattcaggtcaaagaggaacctgtggaagaggcagaggaggaagcaccggaagcatctactgctcccaaagaggctgggcctagtaaggaggctagcctgtggccctgcgaaaaatgcggcaaaatgttcacagtgcacaaacaattggaacgacaccaggagctactgtgctctgttaagccattcatttgccacgtctgtaacaaggcgttcaggaccaacttccggctctggtcgcacttccagagccacatgagtcaggcatcagaagaaagcgcccacaaagaatctgaggtgtgtcccgtccccacaaatagtccctcccctccacccctcccacctccccctcctctgccaaagatacagcctctggaaccagactctccaaccggccttagcgaaaatcccacgccagccacagagaagctctttgtgccacaggagtcagacacactgttttatcacgctccccctctgagtgccatcactttcaaacgtcagtttatgtgcaaactttgccaccggacgtttaagaccgcatttagtctgtggtcacacgaacagacacacaactag

SEQ ID NO: 38761 - DNA, 3201 bp, Artificial Sequence
  derived and/or modified sequence
atggaaggccttttacattacattaatccagcgcatgctatttcactgctttctgcactgaatgaggagcggctgaagggtcagctgtgcgacgtcctgctcatcgttggtgatcaaaagtttagggcccacaaaaatgtgctggccgcttcctcggagtatttccaatccctgttcacaaataaagagaacgagtctcagactgtgttccagctggacttctgcgaacccgacgcattcgacaatgtgctaaactatatttacagctctagcttatttgtcgagaagtctagcctggccgctgtccaggagctgggctacagccttgggatctctttccttactaacattgtgagcaagacaccccaggctccattccctacttgtcccaatagaaagaaggtgtttgtcgaagatgatgagaactcgtctcagaagcggtccgttatcgtctgccagtccaggaatgaggcacagggtaaaacagtaagccaaaaccagcccgatgtctcacacacatctagaccttcaccatccattgctgttaaggctaacacaaataagccccacgtcccgaaacccattgaaccactgcacaacctcagtctcacagagaaaagttggcccaaagattcttcagtagtgtacgcaaagagtctggagcattccggttctctggatgacccaaatcggatttctctggtcaagaggaacgctgttttgcctagcaaacccctacaagaccgagaagcgatggacgataaacccggtgtcagcggacagctgcctaaaggtaaggccctggaattggccttaaagcgcccaagaccacctgttcttagcgtgtgttctagcagcgagaccccctaccttctgaaggagaccaacaaagggaacggccaaggtgaagaccgcaacctgctgtactactcaaagctcggtctggttattccaagctcggggagcggaagcggcaaccagtccatagatagaagcggaccacttgtcaaatctttgcttagacgatcactgagtatggacagccaggtgccagtatatagcccttccatcgatctgaagtcatctcaaggttctagtagcgtaagttcagatgccccaggtaacgtgctgtgcgctctctcccaaaaatcatctcttaaggactgctcggagaaaactgcactcgatgaccggccacaggtgctgcagcctcataggctgcgaagcttttctgcatcccagtcaacagatcgggaaggcgcatcccccgtgaccgaagttagaatcaagacagagccgtctagccctctctccgatcctagcgacataataagagtgacggtcggggatgcagctacaacagctgccgcaagcagcagttcagtgactcgggacctgtcacttaagactgaagacgaccaaaaggatatgtcacgtctgccggcaaagcgtagatttcaggccgaccgcaggctaccgttcaaaaaactgaaagtaaatgaacacggcagccccgtttccgaagataattttgaggaaggcagttccccgacattattggatgctgatttcccagactccgacctgaacaaggacgagtttggggagctcgaaggcaccaggccaaacaaaaagttcaaatgcaaacattgtcttaagatattcaggagtactgctgggctgcaccgccacgtgaacatgtaccataacccagaaaagccatatgcctgcgatatatgtcacaagagatttcataccaatttcaaggtttggacccactgtcaaacccagcacgggattgttaagaatccctctccagccagttcgtcccacgccgtgcttgatgagaagttccagcggaagcttatcgatatcgttagagagcgcgaaatcaaaaaggccctcatcattaaactgagaaggggcaaacctgggttccagggccagtcctctagccaagcacaacaggtgatcaagcggaatttgagaagtagggccaaaggagcctacatctgcacttactgtggcaaggcctacaggttcctgtcccagttcaaacaacatattaagatgcaccccggtgaaaaacccctgggcgtcaacaaggttgccaagcctaaagagcacgctcctctggccagtccagtagagaacaaagaggtgtatcagtgtaggctttgtaacgccaaactctcctctctcctggagcaggggtcacatgagcgcctttgtcggaatgcagcagtgtgtccatactgcagcctccgctttttttcccccgaacttaagcaagagcacgagagtaaatgtgagtataagaagctgacatgccttgaatgtatgaggactttcaagagctccttttcaatctggcgccatcaggtagaggtgcacaaccagaataacatggctccaacagaaaatttctctctgccagtgttagatcataatggcgatgtgactgggagcagccgtccgcagtctcagccggaaccaaacaaggttaatcacattgtgaccaccaaggacgacaacgtcttctcggactcgtcggagcaggtgaattttgattctgaagatagctcatgtctccccgaggacctcagtttatcaaagcagctcaagatccaggtgaaggaggaacctgttgaggaggccgaggaggaggccccagaggcatccactgccccaaaggaggcagggcctagtaaggaagcctcactgtggccgtgtgagaagtgtgggaaaatgtttacagtacacaagcagctcgagcgccaccaggagctcctctgttctgtgaagccatttatatgccatgtgtgcaacaaggcttttaggaccaatttcaggttatggtctcacttccaaagtcacatgagccaggcatctgaagagtccgcccacaaggagagtgaggtgtgccccgtgccaactaacagtccatcacccccacctctcccacctccaccccctttaccaaaaattcagcccttggaaccagactcacctacggggctcagtgagaatccaactcccgcaactgaaaagctgtttgtgcctcaggaatcagacaccttattctaccacgcaccacctctgagcgcgattaccttcaagagacagttcatgtgcaagttgtgtcatagaacatttaagactgcatttagtctgtggagtcatgagcaaacccataattag

SEQ ID NO: 38762 - DNA, 150 bp, Artificial Sequence
  derived and/or modified sequence
atggaggggctcctgcactacattaaccctgctcacgcaatctctctgctctcggcgttgaatgaagagaggctaaagggccagctgtgcgatgtcctgctcattgtgggggaccaaaagttcagggctcacaaaaacgtccttgcatag

SEQ ID NO: 38763 - DNA, 7449 bp, Artificial Sequence
  derived and/or modified sequence
gtcaaattcaagatggatggaatcacagcggcagcggcggctgcggcgcgcgcgagccgagtgtgagcggaaaggggcccggcgtctgcctcgagactgaagaccgaagacatgaagtagaaacaatccaggaaggctttgggaagctatttgtgtgcgaggatcaaagtgataaactcaagccatggagggattactgcattacatcaaccctgcacacgccatttctctcctaagtgccctgaatgaggagcgtctcaaaggacagctgtgtgatgtgctgctgattgttggagaccaaaagttccgagctcataaaaacgtcttggctgccagcagcgaatactttcagagtttattcacaaataaggaaaatgagtcacaaactgtatttcagcttgacttctgtgagccagatgcttttgataatgttttaaactacatttattcttcctctctatttgttgagaagagcagccttgctgctgtgcaagaacttggctatagtcttgggatttcctttctgactaacatcgtttctaaaacacctcaagccccctttccaacgtgtcctaatagaaaaaaagtgtttgtagaagatgatgaaaacagttctcaaaagagaagtgtcattgtttgtcaaagtagaaacgaagcgcaaggaaaaactgttagtcaaaatcaacccgatgtaagccatacttcccggccctctcctagcattgcagtcaaggccaataccaataagccacatgtcccaaaaccaatagaaccacttcataatttgtcattaactgaaaagagttggccgaaagatagttctgtggtatatgcaaagtctcttgagcattctggatctttggatgatcctaatagaatcagtttggtgaaaagaaatgcagtgttgccttcaaagcctctgcaagacagagaagctatggatgataaaccaggtgtgagtggtcagcttccaaaaggaaaagctctagagctggctttgaagagaccacggccacctgttttgtctgtttgtagctcatcagagactccctatctattaaaagaaactaacaaaggaaatggtcaaggtgaagatagaaacttgttgtactattcaaagttaggcttagtgatcccatccagtggatctggttctggaaaccaaagcattgacaggagtggcccacttgttaagagtctcctcagacggtcattgtcgatggatagccaggttcctgtctattcaccttccatagatttgaaatcttcccagggatcatcttcggtgtccagtgatgcaccagggaatgtgttgtgtgctttatctcagaagtcatctttaaaagattgtagtgaaaaaacagccctagatgacaggcctcaagtgctacaaccgcatcgcctcaggtcctttagtgcttctcagtcaacagacagggagggagcttcccctgtgactgaggtgcgcataaagactgagcccagcagcccgctgtcggacccctcggacatcatccgcgtcactgtgggagatgcggcaacaacagcagctgcctcatcttcgtcggtcacaagagacctgtctctgaaaacagaagatgaccaaaaagacatgagcagactcccagcaaaaaggaggttccaagcggaccgaagattgccgtttaagaagttaaaggtgaatgagcacgggtctcctgtgtcagaagataattttgaggaaggctcaagccctactctccttgatgcagattttccagattctgatttgaataaagacgaatttggtgagttggaggggacgagaccaaacaaaaaatttaaatgcaaacattgccttaagatctttagatcaacagcaggtcttcaccgtcatgttaacatgtaccataacccagaaaagccctacgcttgtgacatctgtcacaagaggtttcacaccaacttcaaagtgtggacacactgtcagacccaacacggcatagtgaagaacccatcaccagcctctagttcacatgctgttttggatgaaaaattccaaagaaagctgattgacatagtgagagagagagaaattaagaaggccctgatcattaagttaaggcgcggcaagcctggttttcagggacagagtagctcccaagcacagcaagtcatcaagaggaacttgagatctcgagccaaaggagcttacatttgtacttactgcggaaaagcgtaccgctttctctctcaatttaagcagcatataaaaatgcatccaggagaaaaaccccttggagtaaataaagttgctaaaccaaaagagcatgctcctcttgcaagtccagtagaaaacaaggaggtttaccagtgccgcctctgtaatgctaagctctcttctctcctagagcaaggaagccacgagcggctgtgccggaacgcggccgtctgcccttactgcagcctcaggtttttctcgcccgagctgaagcaagaacacgagagcaagtgtgagtataagaagctgacctgcctcgagtgcatgcgcaccttcaagtcctctttcagcatctggcggcaccaggttgaagtccataatcagaacaacatggcacccaccgaaaacttttctttgcccgttttggaccacaatggtgatgtgactggttcttcaaggccccaatcccagcctgagcccaacaaagtaaaccacatcgtcaccacaaaagacgacaacgtgttcagtgattcttcagaacaagttaacttcgactcggaagattcctcttgtcttcccgaagaccttagtctttccaagcaactgaaaatccaagtcaaagaggagcctgtggaggaggctgaagaagaggcacccgaggccagcacagcccccaaagaagcgggtcctagcaaagaagccagcctgtggccctgcgagaagtgtgggaagatgttcacggtgcataagcagctggagcgtcaccaggagcttctgtgctctgtgaaaccatttatttgtcacgtgtgcaacaaagcttttcgcactaattttcgactctggagtcacttccaatcgcacatgtctcaggcttcagaggaatcggcacataaggaatctgaggtgtgccctgttcccacaaactctccctctccaccacctctgccaccgccaccaccactgcccaagatccagcctctggagcctgacagccccacaggcctgtccgaaaacccaactccagccacagaaaaactgtttgtgccccaagaatcagacacccttttttaccatgccccacccctttcagcaatcacatttaaaagacagtttatgtgtaaactttgccacaggacattcaagactgcatttagtctttggagtcacgaacaaacacacaattgaaagaccaacactttttacctatgggaggcagtccccagatttcaacctgaattgtgaaatgtgtcataagaaacaaaatattttttaaacaagaataataaaggttggagattgttacgcttgaaattaagttggaggcaaattgataattacttagtaatgtccttaactttagaaatacagcttttaaaatattgtggttctggaccttacaagaacaagatggtttgatttcattaatgttgaaattggattagtcttgattgtgtgcatggttcctcattccatggtgtcagtataatcatttaattgaggtttttggttttttattgattagtggaatactgtcgaagtattccttcttttaattattttagacacttgagttctagttaaatcttaaccatgttcttaagtccaaaataggaagaagtggagtagtttgcagtattgatttatatcttagactactttagcaataaaagataaatctcaactttaataagttatcctgacacttgataaaaataaatatttggtattttgtggtcatgtaaaacttctttttgtatgaaaattgtgagaaatttaaatcagcaatagtaacacttagatttttataaactaacaaaaacttgctctcagtcaatataataaatgatagttaaactctaaggaagacctgggaaatgaaaacaatttatggaagtcccctacagtcagtttataagggcttcagtagtgatagacattgttataaaaacttgtaccatgttacatgtacactgcaccacagtctaaattcagaccagcatttgaaggactgcacatatttcatttcctctgatttatgctgtcacaaattgaaaatctgagtgtagttaggacaaaaaacaaagctaaccatatggcactaattttgattttaacattagtgtaacaaataaggtcgggacatatatttacatagatcccagacactcaagaattagcacagctgatgtaaaattctaaattaccatttacttccagatagagcagaggagaaacacctcactgcagtttcaacatgctttccaagaacaatatatacgacatatacattttcctgcctctctcttgtgacaatttctgttagaatttgttgggggtctgatggttaaaatcatgggcaaggccattctctacatcattgcttaatatttcaaaaataggtattagagcactatcagtggtccaaaattagttttagctacttattttgctccatgggttttgggcttttcaaagaatactatgtataatttgtaattgaaagcctttcagtaggatatccaaagttcaatgtgtttcaaaagggaaaacttttacttgtgggggtgggagttagatgtattaaaaaaacgaaactacaaaatccttttaagaaagtaataccaatttagactctagtttgtgttacgaggtattctttcaaattttttttaaaagccaactactgtcattaagaaataattttagatttgtgctctagcagaaaataactctgtacccatcaatcttattgccaacattccataccagtggtaggaaagatattctcattttttttattgaaccagacatttttataaaatactgattgactttgtacattatggatattatatatgaaattttgccttgtattctttcacttgaaaaaactccaaaattccacaatattttagtagttaacttcctattctttcttaaatttgatggagaagggaaaataaattgcagttattgattcttgccatctttgttttcttaaagaaatctatgcattttaaggataaaactaaagcatatgggtttacatgaaacatcaggatggattattgtacattgaattcattccgcgtataatgtggtatttcttactctgtccatcttggtagctgtcacttcaaaagaagacagtttccctgagtaatcatcacctacatggccattagagtatctatcggtgataattccatgatacagagtatcttggcattataaattcagtatcccaggacctaaacctttatgctacattttcgaagattttttaaaaataatattgttaatcagtaaaaaaaaaaaatatttttgatctaaacataggttctgcatatctgttagattttaaaaatgactggtgttttgtcttcacatttttgtctaagcaaggaatataagatttcaaataaaattttgaaccaaaaacatttataatgccgttctggtttttctattactttttatactgtactttaaaagcattaggctgaaagagtttattttggtggtcaaaaaaaatatgcttccactcatgtaactattttaaatgttaagaagtaaaataatgaaagatatgttaattactttattcagtaaagttttttaagaatgtttatctcagccagtaggcaaatacttggtgtaaaacaagttggtcttaaattgttgcaactcattagctagtgaagatattcatgtaaatatattttaggattgtaattaattttgaaaatgtagaaagctctttattccatgtaagtatgcaggatgcctgcttttttatgcagttgtggaaagaatgtaaaatgttttaatatattctttgttaatctgagaacttgatactgaatcgtttatgtgggagaaggaaggagtaacataaaacatgtttttatcactcaaagtaagcaatggaggtaacaaatattgtgcattttaacagtaatatttgaagatttgtagaatattcacctttaaaactagttagtatgcatttataattttaccagaatatacaactaacaattcaacagtgatgttctttgcatttgtggggagatgtgtgatgttcttggttttctggtttggaatggaacgtttatagccttgcctgtaaaaatgtgccccagcacttaatgagtgaccgtttgaatccatatgtagtcccattggtgctaatgagagtagctgctgtgaaacaggaataaaatgtgtctgttcacggaggtgcggtgtggatgcacctacaaggccaactctctgatcagggtgagggagagatggaagaattaacagatctaaagttggcctttgttgtctcaaattgggtttgtacacacatgcatgcatgtgtgtatacaactgtaatctggaacttcaggaagtaaaattatttgaagtttcttagtaaaaagtaattaggtataattccaaatagatttctgtataaattgtatctaactggattacaagtcagtttgacaatttacgatgtctcagtgatgtttctgcaataattgtgaaatgcattattgatttaaataatgctgacacgtactctttaaaagtgttctttaacactgactactaaactttaagttttaaaaaataggttttcatttatggctttttgtggttttagcactttaagaagtttaattttttgtaatttttaatatgctctttcagtgtatctcagcgggtactccagcttgtggcattcccatgtgactggggagaagacaaaattggtgtttagattctggaggagaaaaaatgagttacaatgtcaggtgtttttaaaaattccttttagagacagtcttttgggaaccaaagtattttactgtaaatctttaaaataacagaattcagtgctctttcatttgttaatgctgtccagatttttcacacagttatactcagttaatactagttttcagaacattagtccaaggctatttcaagttttccattgaatatatgcttatggttaaaagaaaaacgaatggttttataattctgtgtattttgtcatatgccttagcagagtaagtcatttttccattttacttaggaataagctttttcgaactgaaaattcatggtaaaataggatttctatctaatgttaatccattgcttatttgtattcaattccattgtctacagtttgcttaaatgttgactaagaatgattggagtcaataaatttgtactgtattttgcttcga

SEQ ID NO: 38764 - DNA, 5806 bp, Artificial Sequence
  derived and/or modified sequence
tgggatgacgtcaaattcaagatggatggaatcacagcggcagcggcggctgcggcgcgcgcgagccgagtgtgagcggaaaggggcccggcgtctgcctcgagactgaagaccgaagacatgaagtagaaacaatccaggaaggctttgggaagctatttgtgtgcgaggatcaaagtgcagaagagcagagaaatcaaaagtttttgaggattcggtgtacacagccaccagccacaaacagtcttgctggattatctcgtgatcgtcagcagttgtgattttccccctttttacttacattcttgatggatggagcattttatatttttagataaactcaagccatggagggattactgcattacatcaaccctgcacacgccatttctctcctaagtgccctgaatgaggagcgtctcaaaggacagctgtgtgatgtgctgctgattgttggagaccaaaagttccgagctcataaaaacgtcttggctgccagcagcgaatactttcagagtttattcacaaataaggaaaatgagtcacaaactgtatttcagcttgacttctgtgagccagatgcttttgataatgttttaaactacatttattcttcctctctatttgttgagaagagcagccttgctgctgtgcaagaacttggctatagtcttgggatttcctttctgactaacatcgtttctaaaacacctcaagccccctttccaacgtgtcctaatagaaaaaaagtgtttgtagaagatgatgaaaacagttctcaaaagagaagtgtcattgtttgtcaaagtagaaacgaagcgcaaggaaaaactgttagtcaaaatcaacccgatgtaagccatacttcccggccctctcctagcattgcagtcaaggccaataccaataagccacatgtcccaaaaccaatagaaccacttcataatttgtcattaactgaaaagagttggccgaaagatagttctgtggtatatgcaaagtctcttgagcattctggatctttggatgatcctaatagaatcagtttggtgaaaagaaatgcagtgttgccttcaaagcctctgcaagacagagaagctatggatgataaaccaggtgtgagtggtcagcttccaaaaggaaaagctctagagctggctttgaagagaccacggccacctgttttgtctgtttgtagctcatcagagactccctatctattaaaagaaactaacaaaggaaatggtcaaggtgaagatagaaacttgttgtactattcaaagttaggcttagtgatcccatccagtggatctggttctggaaaccaaagcattgacaggagtggcccacttgttaagagtctcctcagacggtcattgtcgatggatagccaggttcctgtctattcaccttccatagatttgaaatcttcccagggatcatcttcggtgtccagtgatgcaccagggaatgtgttgtgtgctttatctcagaagtcatctttaaaagattgtagtgaaaaaacagccctagatgacaggcctcaagtgctacaaccgcatcgcctcaggtcctttagtgcttctcagtcaacagacagggagggagcttcccctgtgactgaggtgcgcataaagactgagcccagcagcccgctgtcggacccctcggacatcatccgcgtcactgtgggagatgcggcaacaacagcagctgcctcatcttcgtcggtcacaagagacctgtctctgaaaacagaagatgaccaaaaagacatgagcagactcccagcaaaaaggaggttccaagcggaccgaagattgccgtttaagaagttaaaggtgaatgagcacgggtctcctgtgtcagaagataattttgaggaaggctcaagccctactctccttgatgcagattttccagattctgatttgaataaagacgaatttggtgagttggaggggacgagaccaaacaaaaaatttaaatgcaaacattgccttaagatctttagatcaacagcaggtcttcaccgtcatgttaacatgtaccataacccagaaaagccctacgcttgtgacatctgtcacaagaggtttcacaccaacttcaaagtgtggacacactgtcagacccaacacggcatagtgaagaacccatcaccagcctctagttcacatgctgttttggatgaaaaattccaaagaaagctgattgacatagtgagagagagagaaattaagaaggccctgatcattaagttaaggcgcggcaagcctggttttcagggacagagtagctcccaagcacagcaagtcatcaagaggaacttgagatctcgagccaaaggagcttacatttgtacttactgcggaaaagcgtaccgctttctctctcaatttaagcagcatataaaaatgcatccaggagaaaaaccccttggagtaaataaagttgctaaaccaaaagagcatgctcctcttgcaagtccagtagaaaacaaggaggtttaccagtgccgcctctgtaatgctaagctctcttctctcctagagcaaggaagccacgagcggctgtgccggaacgcggccgtctgcccttactgcagcctcaggtttttctcgcccgagctgaagcaagaacacgagagcaagtgtgagtataagaagctgacctgcctcgagtgcatgcgcaccttcaagtcctctttcagcatctggcggcaccaggttgaagtccataatcagaacaacatggcacccaccgaaaacttttctttgcccgttttggaccacaatggtgatgtgactggttcttcaaggccccaatcccagcctgagcccaacaaagtaaaccacatcgtcaccacaaaagacgacaacgtgttcagtgattcttcagaacaagttaacttcgactcggaagattcctcttgtcttcccgaagaccttagtctttccaagcaactgaaaatccaagtcaaagaggagcctgtggaggaggctgaagaagaggcacccgaggccagcacagcccccaaagaagcgggtcctagcaaagaagccagcctgtggccctgcgagaagtgtgggaagatgttcacggtgcataagcagctggagcgtcaccaggagcttctgtgctctgtgaaaccatttatttgtcacgtgtgcaacaaagcttttcgcactaattttcgactctggagtcacttccaatcgcacatgtctcaggcttcagaggaatcggcacataaggaatctgaggtgtgccctgttcccacaaactctccctctccaccacctctgccaccgccaccaccactgcccaagatccagcctctggagcctgacagccccacaggcctgtccgaaaacccaactccagccacagaaaaactgtttgtgccccaagaatcagacacccttttttaccatgccccacccctttcagcaatcacatttaaaagacagtttatgtgtaaactttgccacaggacattcaagactgcatttagtctttggagtcacgaacaaacacacaattgaaagaccaacactttttacctatgggaggcagtccccagatttcaacctgaattgtgaaatgtgtcataagaaacaaaatattttttaaacaagaataataaaggttggagattgttacgcttgaaattaagttggaggcaaattgataattacttagtaatgtccttaactttagaaatacagcttttaaaatattgtggttctggaccttacaagaacaagatggtttgatttcattaatgttgaaattggattagtcttgattgtgtgcatggttcctcattccatggtgtcagtataatcatttaattgaggtttttggttttttattgattagtggaatactgtcgaagtattccttcttttaattattttagacacttgagttctagttaaatcttaaccatgttcttaagtccaaaataggaagaagtggagtagtttgcagtattgatttatatcttagactactttagcaataaaagataaatctcaactttaataagttatcctgacacttgataaaaataaatatttggtattttgtggtcatgtaaaacttctttttgtatgaaaattgtgagaaatttaaatcagcaatagtaacacttagatttttataaactaacaaaaacttgctctcagtcaatataataaatgatagttaaactctaaggaagacctgggaaatgaaaacaatttatggaagtcccctacagtcagtttataagggcttcagtagtgatagacattgttataaaaacttgtaccatgttacatgtacactgcaccacagtctaaattcagaccagcatttgaaggactgcacatatttcatttcctctgatttatgctgtcacaaattgaaaatctgagtgtagttaggacaaaaaacaaagctaaccatatggcactaattttgattttaacattagtgtaacaaataaggtcgggacatatatttacatagatcccagacactcaagaattagcacagctgatgtaaaattctaaattaccatttacttccagatagagcagaggagaaacacctcactgcagtttcaacatgctttccaagaacaatatatacgacatatacattttcctgcctctctcttgtgacaatttctgttagaatttgttgggggtctgatggttaaaatcatgggcaaggccattctctacatcattgcttaatatttcaaaaataggtattagagcactatcagtggtccaaaattagttttagctacttattttgctccatgggttttgggcttttcaaagaatactatgtataatttgtaattgaaagcctttcagtaggatatccaaagttcaatgtgtttcaaaagggaaaacttttacttgtgggggtgggagttagatgtattaaaaaaacgaaactacaaaatccttttaagaaagtaataccaatttagactctagtttgtgttacgaggtattctttcaaattttttttaaaagccaactactgtcattaagaaataattttagatttgtgctctagcagaaaataactctgtacccatcaatcttattgccaacattccataccagtggtaggaaagatattctcattttttttattgaaccagacatttttataaaatactgattgactttgtacattatggatattatatatgaaattttgccttgtattctttcacttgaaaaaactccaaaattccacaatattttagtagttaacttcctattctttcttaaatttgatggagaagggaaaataaattgcagttattgattcttgccatctttgttttcttaaagaaatctatgcattttaaggataaaactaaagcatatgggtttacatgaaacatcaggatggattattgtacattgaattcattccgcgtataatgtggtatttcttactctgtccatcttggtagctgtcacttcaaaagaagacagtttccctgagtaatcatcacctacatggccattagagtatctatcggtgataattccatgatacagagtatcttggcattataaattcagtatcccaggacctaaacctttatgctacattttcgaagattttttaaaaataatattgttaatcagtaaaaaaaaaaaatatttttgatctaaacataggttctgcatatctgttagattttaaaaatgactggtgttttgtcttcacatttttgtctaagcaaggaatataagatttcaaataaaattttgaaccaaaaaca

SEQ ID NO: 38765 - DNA, 5608 bp, Artificial Sequence
  derived and/or modified sequence
gcgatgacctcatccctggtgtgggatgacgtcaaattcaagatggatggaatcacagcggcagcggcggctgcggcgcgcgcgagccgagtgtgagcggaaaggggcccggcgtctgcctcgagactgaagaccgataaactcaagccatggagggattactgcattacatcaaccctgcacacgccatttctctcctaagtgccctgaatgaggagcgtctcaaaggacagctgtgtgatgtgctgctgattgttggagaccaaaagttccgagctcataaaaacgtcttggctgccagcagcgaatactttcagagtttattcacaaataaggaaaatgagtcacaaactgtatttcagcttgacttctgtgagccagatgcttttgataatgttttaaactacatttattcttcctctctatttgttgagaagagcagccttgctgctgtgcaagaacttggctatagtcttgggatttcctttctgactaacatcgtttctaaaacacctcaagccccctttccaacgtgtcctaatagaaaaaaagtgtttgtagaagatgatgaaaacagttctcaaaagagaagtgtcattgtttgtcaaagtagaaacgaagcgcaaggaaaaactgttagtcaaaatcaacccgatgtaagccatacttcccggccctctcctagcattgcagtcaaggccaataccaataagccacatgtcccaaaaccaatagaaccacttcataatttgtcattaactgaaaagagttggccgaaagatagttctgtggtatatgcaaagtctcttgagcattctggatctttggatgatcctaatagaatcagtttggtgaaaagaaatgcagtgttgccttcaaagcctctgcaagacagagaagctatggatgataaaccaggtgtgagtggtcagcttccaaaaggaaaagctctagagctggctttgaagagaccacggccacctgttttgtctgtttgtagctcatcagagactccctatctattaaaagaaactaacaaaggaaatggtcaaggtgaagatagaaacttgttgtactattcaaagttaggcttagtgatcccatccagtggatctggttctggaaaccaaagcattgacaggagtggcccacttgttaagagtctcctcagacggtcattgtcgatggatagccaggttcctgtctattcaccttccatagatttgaaatcttcccagggatcatcttcggtgtccagtgatgcaccagggaatgtgttgtgtgctttatctcagaagtcatctttaaaagattgtagtgaaaaaacagccctagatgacaggcctcaagtgctacaaccgcatcgcctcaggtcctttagtgcttctcagtcaacagacagggagggagcttcccctgtgactgaggtgcgcataaagactgagcccagcagcccgctgtcggacccctcggacatcatccgcgtcactgtgggagatgcggcaacaacagcagctgcctcatcttcgtcggtcacaagagacctgtctctgaaaacagaagatgaccaaaaagacatgagcagactcccagcaaaaaggaggttccaagcggaccgaagattgccgtttaagaagttaaaggtgaatgagcacgggtctcctgtgtcagaagataattttgaggaaggctcaagccctactctccttgatgcagattttccagattctgatttgaataaagacgaatttggtgagttggaggggacgagaccaaacaaaaaatttaaatgcaaacattgccttaagatctttagatcaacagcaggtcttcaccgtcatgttaacatgtaccataacccagaaaagccctacgcttgtgacatctgtcacaagaggtttcacaccaacttcaaagtgtggacacactgtcagacccaacacggcatagtgaagaacccatcaccagcctctagttcacatgctgttttggatgaaaaattccaaagaaagctgattgacatagtgagagagagagaaattaagaaggccctgatcattaagttaaggcgcggcaagcctggttttcagggacagagtagctcccaagcacagcaagtcatcaagaggaacttgagatctcgagccaaaggagcttacatttgtacttactgcggaaaagcgtaccgctttctctctcaatttaagcagcatataaaaatgcatccaggagaaaaaccccttggagtaaataaagttgctaaaccaaaagagcatgctcctcttgcaagtccagtagaaaacaaggaggtttaccagtgccgcctctgtaatgctaagctctcttctctcctagagcaaggaagccacgagcggctgtgccggaacgcggccgtctgcccttactgcagcctcaggtttttctcgcccgagctgaagcaagaacacgagagcaagtgtgagtataagaagctgacctgcctcgagtgcatgcgcaccttcaagtcctctttcagcatctggcggcaccaggttgaagtccataatcagaacaacatggcacccaccgaaaacttttctttgcccgttttggaccacaatggtgatgtgactggttcttcaaggccccaatcccagcctgagcccaacaaagtaaaccacatcgtcaccacaaaagacgacaacgtgttcagtgattcttcagaacaagttaacttcgactcggaagattcctcttgtcttcccgaagaccttagtctttccaagcaactgaaaatccaagtcaaagaggagcctgtggaggaggctgaagaagaggcacccgaggccagcacagcccccaaagaagcgggtcctagcaaagaagccagcctgtggccctgcgagaagtgtgggaagatgttcacggtgcataagcagctggagcgtcaccaggagcttctgtgctctgtgaaaccatttatttgtcacgtgtgcaacaaagcttttcgcactaattttcgactctggagtcacttccaatcgcacatgtctcaggcttcagaggaatcggcacataaggaatctgaggtgtgccctgttcccacaaactctccctctccaccacctctgccaccgccaccaccactgcccaagatccagcctctggagcctgacagccccacaggcctgtccgaaaacccaactccagccacagaaaaactgtttgtgccccaagaatcagacacccttttttaccatgccccacccctttcagcaatcacatttaaaagacagtttatgtgtaaactttgccacaggacattcaagactgcatttagtctttggagtcacgaacaaacacacaattgaaagaccaacactttttacctatgggaggcagtccccagatttcaacctgaattgtgaaatgtgtcataagaaacaaaatattttttaaacaagaataataaaggttggagattgttacgcttgaaattaagttggaggcaaattgataattacttagtaatgtccttaactttagaaatacagcttttaaaatattgtggttctggaccttacaagaacaagatggtttgatttcattaatgttgaaattggattagtcttgattgtgtgcatggttcctcattccatggtgtcagtataatcatttaattgaggtttttggttttttattgattagtggaatactgtcgaagtattccttcttttaattattttagacacttgagttctagttaaatcttaaccatgttcttaagtccaaaataggaagaagtggagtagtttgcagtattgatttatatcttagactactttagcaataaaagataaatctcaactttaataagttatcctgacacttgataaaaataaatatttggtattttgtggtcatgtaaaacttctttttgtatgaaaattgtgagaaatttaaatcagcaatagtaacacttagatttttataaactaacaaaaacttgctctcagtcaatataataaatgatagttaaactctaaggaagacctgggaaatgaaaacaatttatggaagtcccctacagtcagtttataagggcttcagtagtgatagacattgttataaaaacttgtaccatgttacatgtacactgcaccacagtctaaattcagaccagcatttgaaggactgcacatatttcatttcctctgatttatgctgtcacaaattgaaaatctgagtgtagttaggacaaaaaacaaagctaaccatatggcactaattttgattttaacattagtgtaacaaataaggtcgggacatatatttacatagatcccagacactcaagaattagcacagctgatgtaaaattctaaattaccatttacttccagatagagcagaggagaaacacctcactgcagtttcaacatgctttccaagaacaatatatacgacatatacattttcctgcctctctcttgtgacaatttctgttagaatttgttgggggtctgatggttaaaatcatgggcaaggccattctctacatcattgcttaatatttcaaaaataggtattagagcactatcagtggtccaaaattagttttagctacttattttgctccatgggttttgggcttttcaaagaatactatgtataatttgtaattgaaagcctttcagtaggatatccaaagttcaatgtgtttcaaaagggaaaacttttacttgtgggggtgggagttagatgtattaaaaaaacgaaactacaaaatccttttaagaaagtaataccaatttagactctagtttgtgttacgaggtattctttcaaattttttttaaaagccaactactgtcattaagaaataattttagatttgtgctctagcagaaaataactctgtacccatcaatcttattgccaacattccataccagtggtaggaaagatattctcattttttttattgaaccagacatttttataaaatactgattgactttgtacattatggatattatatatgaaattttgccttgtattctttcacttgaaaaaactccaaaattccacaatattttagtagttaacttcctattctttcttaaatttgatggagaagggaaaataaattgcagttattgattcttgccatctttgttttcttaaagaaatctatgcattttaaggataaaactaaagcatatgggtttacatgaaacatcaggatggattattgtacattgaattcattccgcgtataatgtggtatttcttactctgtccatcttggtagctgtcacttcaaaagaagacagtttccctgagtaatcatcacctacatggccattagagtatctatcggtgataattccatgatacagagtatcttggcattataaattcagtatcccaggacctaaacctttatgctacattttcgaagattttttaaaaataatattgttaatcagtaaaaaaaaaaaatatttttgatctaaacataggttctgcatatctgttagattttaaaaatgactggtgttttgtcttcacatttttgtctaagcaaggaatataagatttcaaataaaattttgaaccaaaaaca

SEQ ID NO: 38766 - protein, 865 aa, Artificial Sequence
  derived and/or modified sequence
MEGLLHYINPAHAISLLSALNEERLKGQLCDVLLIVGDQKFRAHKNVLAASSEYFQSLFTNKENESQTVFQLDFCEPDAFDNVLNYIYSSSLFVEKSSLAAVQELGYSLGISFLTNIVSKTPQAPFPTCPNRKKVFVEDDENSSQKRSVIVCQSRNEAQGKTVSQNQPDVSHTSRPSPSIAVKANTNKPHVPKPIEPLHNLSLTEKSWPKDSSVVYAKSLEHSGSLDDPNRISLVKRNAVLPSKPLQDREAMDDKPGVSGQLPKGKALELALKRPRPPVLSVCSSSETPYLLKETNKGNGQGEDRNLLYYSKLGLVIPSSGSGSGNQSIDRSGPLVKSLLRRSLSMDSQVPVYSPSIDLKSSQGSSSVSSDAPGNVLCALSQKSSLKDCSEKTALDDRPQVLQPHRLRSFSASQSTDREGASPVTEVRIKTEPSSPLSDPSDIIRVTVGDAATTAAASSSSVTRDLSLKTEDDQKDMSRLPAKRRFQADRRLPFKKLKVNEHGSPVSEDNFEEGSSPTLLDADFPDSDLNKDEFEQGSHERLCRNAAVCPYCSLRFFSPELKQEHESKCEYKKLTCLECMRTFKSSFSIWRHQVEVHNQNNMAPTENFSLPVLDHNGDVTGSSRPQSQPEPNKVNHIVTTKDDNVFSDSSEQVNFDSEDSSCLPEDLSLSKQLKIQVKEEPVEEAEEEAPEASTAPKEAGPSKEASLWPCEKCGKMFTVHKQLERHQELLCSVKPFICHVCNKAFRTNFRLWSHFQSHMSQASEESAHKESEVCPVPTNSPSPPPLPPPPPLPKIQPLEPDSPTGLSENPTPATEKLFVPQESDTLFYHAPPLSAITFKRQFMCKLCHRTFKTAFSLWSHEQTHN

SEQ ID NO: 38767 - protein, 119 aa, Artificial Sequence
  derived and/or modified sequence
MEGLLHYINPAHAISLLSALNEERLKGQLCDVLLIVGDQKFRAHKNVLAASSEYFQSLFTNKENESQTVFQLDFCEPDAFDNVLNYIYSSSLFVEKSSLAAVQELGYSLGISFLTNIVS

SEQ ID NO: 38768 - DNA, 2598 bp, Artificial Sequence
  derived and/or modified sequence
atggagggcctgctgcactacatcaaccccgcccacgccatcagcctgctgagcgccctgaacgaggagagactgaagggccagctgtgcgacgtgctgctgatcgtgggcgaccagaagttcagagcccacaagaacgtgctggccgccagcagcgagtacttccagagcctgttcaccaacaaggagaacgagagccagaccgtgttccagctggacttctgcgagcccgacgccttcgacaacgtgctgaactacatctacagcagcagcctgttcgtggagaagagcagcctggccgccgtgcaggagctgggctacagcctgggcatcagcttcctgaccaacatcgtgagcaagaccccccaggcccccttccccacctgccccaacagaaagaaggtgttcgtggaggacgacgagaacagcagccagaagagaagcgtgatcgtgtgccagagcagaaacgaggcccagggcaagaccgtgagccagaaccagcccgacgtgagccacaccagcagacccagccccagcatcgccgtgaaggccaacaccaacaagccccacgtgcccaagcccatcgagcccctgcacaacctgagcctgaccgagaagagctggcccaaggacagcagcgtggtgtacgccaagagcctggagcacagcggcagcctggacgaccccaacagaatcagcctggtgaagagaaacgccgtgctgcccagcaagcccctgcaggacagagaggccatggacgacaagcccggcgtgagcggccagctgcccaagggcaaggccctggagctggccctgaagagacccagaccccccgtgctgagcgtgtgcagcagcagcgagaccccctacctgctgaaggagaccaacaagggcaacggccagggcgaggacagaaacctgctgtactacagcaagctgggcctggtgatccccagcagcggcagcggcagcggcaaccagagcatcgacagaagcggccccctggtgaagagcctgctgagaagaagcctgagcatggacagccaggtgcccgtgtacagccccagcatcgacctgaagagcagccagggcagcagcagcgtgagcagcgacgcccccggcaacgtgctgtgcgccctgagccagaagagcagcctgaaggactgcagcgagaagaccgccctggacgacagaccccaggtgctgcagccccacagactgagaagcttcagcgccagccagagcaccgacagagagggcgccagccccgtgaccgaggtgagaatcaagaccgagcccagcagccccctgagcgaccccagcgacatcatcagagtgaccgtgggcgacgccgccaccaccgccgccgccagcagcagcagcgtgaccagagacctgagcctgaagaccgaggacgaccagaaggacatgagcagactgcccgccaagagaagattccaggccgacagaagactgcccttcaagaagctgaaggtgaacgagcacggcagccccgtgagcgaggacaacttcgaggagggcagcagccccaccctgctggacgccgacttccccgacagcgacctgaacaaggacgagttcgagcagggcagccacgagagactgtgcagaaacgccgccgtgtgcccctactgcagcctgagattcttcagccccgagctgaagcaggagcacgagagcaagtgcgagtacaagaagctgacctgcctggagtgcatgagaaccttcaagagcagcttcagcatctggagacaccaggtggaggtgcacaaccagaacaacatggcccccaccgagaacttcagcctgcccgtgctggaccacaacggcgacgtgaccggcagcagcagaccccagagccagcccgagcccaacaaggtgaaccacatcgtgaccaccaaggacgacaacgtgttcagcgacagcagcgagcaggtgaacttcgacagcgaggacagcagctgcctgcccgaggacctgagcctgagcaagcagctgaagatccaggtgaaggaggagcccgtggaggaggccgaggaggaggcccccgaggccagcaccgcccccaaggaggccggccccagcaaggaggccagcctgtggccctgcgagaagtgcggcaagatgttcaccgtgcacaagcagctggagagacaccaggagctgctgtgcagcgtgaagcccttcatctgccacgtgtgcaacaaggccttcagaaccaacttcagactgtggagccacttccagagccacatgagccaggccagcgaggagagcgcccacaaggagagcgaggtgtgccccgtgcccaccaacagccccagccccccccccctgcccccccccccccccctgcccaagatccagcccctggagcccgacagccccaccggcctgagcgagaaccccacccccgccaccgagaagctgttcgtgccccaggagagcgacaccctgttctaccacgccccccccctgagcgccatcaccttcaagagacagttcatgtgcaagctgtgccacagaaccttcaagaccgccttcagcctgtggagccacgagcagacccacaactag

SEQ ID NO: 38769 - DNA, 360 bp, Artificial Sequence
  derived and/or modified sequence
atggagggcctgctgcactacatcaaccccgcccacgccatcagcctgctgagcgccctgaacgaggagagactgaagggccagctgtgcgacgtgctgctgatcgtgggcgaccagaagttcagagcccacaagaacgtgctggccgccagcagcgagtacttccagagcctgttcaccaacaaggagaacgagagccagaccgtgttccagctggacttctgcgagcccgacgccttcgacaacgtgctgaactacatctacagcagcagcctgttcgtggagaagagcagcctggccgccgtgcaggagctgggctacagcctgggcatcagcttcctgaccaacatcgtgagctag

SEQ ID NO: 38770 - DNA, 2598 bp, Artificial Sequence
  derived and/or modified sequence
atggaagggctgctacattacattaaccctgctcacgccataagcctgctttccgctttaaacgaggagcggctgaaaggccaactatgtgatgtcctgctgattgttggtgaccagaagtttagggcacataaaaacgtcttggctgctagttcagaatatttccagagcctcttcactaataaagaaaacgagtcccagacagtatttcaactcgacttctgcgagccggacgccttcgataacgttttaaattacatttactcaagttcgctttttgtggagaagagctcactggccgcggtacaggaactgggctactcacttggaatcagcttcctgactaatatcgtctctaagaccccccaggcgccatttcccacctgtccgaatcgcaaaaaggtgttcgtggaagatgacgagaactcatcacaaaaaagatccgtaattgtgtgtcagagtcggaacgaggcccagggcaagacagtgtcccagaaccagcccgacgtctctcacacatcaaggccgagcccttccatcgccgtcaaagctaatacaaataagcctcacgttccaaaaccgattgagcccctgcacaacttatctctgactgagaagtcctggccgaaggatagcagcgtggtgtacgcaaagtcactggagcacagcggctctttagacgatccaaataggatatccctggttaaacggaacgccgttcttccttccaagccactgcaagatcgggaagccatggacgataagccaggtgtatccggccaactcccaaaaggaaaggccttggaactggctctgaaacgaccgcgaccccctgtgctaagtgtatgctcttcctcagaaaccccatatctgctcaaagaaactaataaagggaatgggcaaggagaggacagaaatctgctttattattcaaagctcgggttggtgatcccatcgtcgggaagcggaagcgggaatcagagcattgacagatcaggcccactggtgaagagccttctgaggaggtctctgtctatggattcccaagttcctgtatactcaccaagcatagacttgaagagcagccaggggagcagctccgtgagttctgatgcaccaggaaacgtgttatgcgccctgtcccaaaagtcctcactcaaggactgttcagaaaaaaccgcgctggacgaccgccctcaggtgctgcagccacacaggctgcggtcattcagcgccagccagagtactgatcgcgaaggcgctagtcccgtaacagaggtccgcataaagaccgagccgagctctcccctttctgacccatctgacattatccgcgttactgtcggagacgccgcgacaacagcggccgctagttcctcttctgtgacacgggacctctctttgaagacggaagacgatcagaaagacatgtcaagactacctgcgaagcgccgctttcaggcagataggcgattgcccttcaaaaaactcaaggtgaatgagcatggaagcccagtatcggaggataactttgaagagggaagcagccccactttactggatgctgatttcccggacagtgacttaaacaaggacgagttcgagcagggcagtcacgagcggctttgtaggaatgctgccgtgtgtccatactgcagcctgaggttcttctcgcccgaactcaaacaggaacatgaatctaaatgcgaatataagaagctgacatgcctggagtgtatgcgtaccttcaaaagcagttttagtatatggagacatcaagttgaggtgcacaatcagaataatatggcccccaccgagaatttctcactgccagtcctggaccacaacggggatgtgacaggctcgtctcgaccccagagccagcctgagcccaacaaagttaaccatatcgtgacaaccaaagacgataatgttttttctgacagctctgagcaggtgaactttgattccgaagactccagctgccttccggaagacctgagcctgtctaagcagttgaaaatccaggtaaaggaggaacccgttgaagaggccgaggaagaagcacccgaggcatcaaccgcgccaaaggaagccggtccgagtaaggaggcgtcactgtggccatgcgagaaatgtggtaaaatgttcactgtccacaagcagttggagagacatcaggagttgctttgttcagttaagccattcatttgccacgtgtgcaacaaggcttttcgtaccaacttccgactgtggagccactttcaaagccacatgagccaggcatctgaagagagtgcacataaagaaagtgaggtttgcccagtccctaccaactcaccctcaccccccccattgccccctcccccgccccttccaaagattcagccactggaacccgattcgccgacaggcctttcagagaaccctacccctgcaactgagaaactgttcgtgccacaggagtctgacacccttttctatcatgccccaccgcttagcgccataacctttaaaagacagtttatgtgcaaactgtgtcacagaacttttaagacagctttttctctgtggagtcacgagcagacgcataactag

SEQ ID NO: 38771 - DNA, 360 bp, Artificial Sequence
  derived and/or modified sequence
atggaaggacttctgcattacatcaatcctgctcacgctattagtctgctgtcagcactcaatgaggagcgcctcaaaggccaactctgtgacgttctcttgatcgtgggcgaccagaagttccgggcccacaagaacgttcttgccgctagctctgagtactttcaatccctgtttactaacaaagagaacgagagccaaaccgtgtttcaacttgacttttgcgagcccgacgcatttgataatgtcttgaattacatctacagcagtagcctcttcgtcgagaaaagttcactggccgcagttcaggagctcggctactccctgggaatttcatttctgaccaacattgtttcatag

SEQ ID NO: 38772 - DNA, 2598 bp, Artificial Sequence
  derived and/or modified sequence
atggagggcctgctgcactacatcaacccagcccacgccatcagcctgctgagcgccctgaatgaggagcggctgaagggccagctgtgtgatgtgctgctgattgtgggggaccagaagttccgggcccacaagaatgtgctggccgccagcagcgagtacttccagagcctcttcaccaacaaggaaaatgaaagccagaccgtcttccagctggacttctgtgagccagatgcctttgacaacgtgctgaactacatctacagcagcagcctgtttgtggagaagagcagcctggccgctgtgcaggagctgggctacagcctgggcatctccttcctgaccaacatcgtgtccaagaccccccaggcccccttccccacctgccccaacaggaagaaggtgtttgtggaggatgatgagaacagcagccagaagaggagcgtcatcgtgtgccagagcagaaatgaggcccagggcaagacagtgtcccagaaccagccagatgtgagccacaccagccggcccagccccagcattgctgtgaaggccaacaccaacaagccccacgtgcccaagcccatcgagcccctgcacaacctgagcctgacagagaagtcctggcccaaggacagctctgtggtgtatgccaagagcctggagcacagcggcagcctggatgaccccaaccgcatcagcctggtgaagagaaatgctgtgctgcccagcaagcccctgcaggaccgggaggccatggatgacaagccaggagtgtctggccagctgcccaagggcaaggccctggagctggccctgaagaggcccaggcctcctgtgctgtctgtgtgcagcagcagcgagaccccctacctgctgaaggagaccaacaagggaaatggccagggagaagatagaaacctgctgtactacagcaagctgggcctggtgatccccagcagcggcagcggcagcggcaaccagagcattgacaggagcggccccctggtgaagagcctgctgcggcgcagcctgtccatggacagccaggtgcctgtgtacagccccagcattgacctgaagagcagccagggcagcagctctgtgtccagtgatgcccctggaaatgtgctgtgtgccctgagccagaagagcagcctgaaggactgcagcgagaagacagccctggatgaccggccccaggtgctgcagccccaccggctgcgctccttcagcgccagccagagcacagaccgggagggcgccagccctgtgacagaggtgcgcatcaagacagagcccagcagccccctgagtgaccccagcgacatcatccgggtgacagtgggagatgctgccaccacagctgctgccagcagcagctctgtgacccgggacctgagcctgaagacagaagatgaccagaaggacatgagccggctgcctgccaagaggcgcttccaggccgaccggcggctgcccttcaagaagctgaaggtgaatgagcacggcagccctgtgtctgaggacaactttgaggagggcagcagccccaccctgctggatgctgacttcccagacagcgacctgaacaaggatgaatttgagcagggcagccatgagcggctgtgcagaaatgctgctgtgtgcccctactgcagcctgcgcttcttcagccctgagctgaagcaggagcacgagagcaaatgtgagtacaagaagctgacctgcctggagtgcatgaggaccttcaagagcagcttcagcatctggaggcaccaggtggaggtgcacaaccagaacaacatggcccccacagagaacttcagcctgcctgtgctggaccacaatggagatgtgacaggcagcagccggccccagagccagcctgagcccaacaaggtgaaccacatcgtgaccaccaaggatgacaacgtgttcagtgacagcagcgagcaggtgaactttgattctgaggacagcagctgcctgcctgaggacctgagcctgagcaagcagctgaagatccaggtgaaggaggagcctgtggaggaggccgaggaggaggcccctgaggccagcacagcccccaaggaggccggccccagcaaggaggccagcctgtggccctgtgagaagtgtgggaagatgttcaccgtgcacaagcagctggagcggcaccaggagctgctgtgcagcgtgaagcccttcatctgccacgtgtgcaacaaggccttccgcaccaacttccggctgtggagccacttccagagccacatgagccaggccagcgaggagagcgcccacaaggagagcgaggtgtgccctgtgcccaccaacagccccagccccccacccctgcccccacctccacccctgcccaagatccagcccctggagccagacagccccaccggcctgtctgagaaccccaccccagccacagagaagctgtttgtgccccaggagagtgacaccctcttctaccacgccccacccctgagcgccatcaccttcaagaggcagttcatgtgcaagctgtgccacaggaccttcaagacagccttcagcctgtggagccatgagcagacccacaactag

SEQ ID NO: 38773 - DNA, 360 bp, Artificial Sequence
  derived and/or modified sequence
atggagggcctgctgcactacatcaacccagcccacgccatcagcctgctgagcgccctgaatgaggagcggctgaagggccagctgtgtgatgtgctgctgattgtgggggaccagaagttccgggcccacaagaatgtgctggccgccagcagcgagtacttccagagcctcttcaccaacaaggaaaatgaaagccagaccgtcttccagctggacttctgtgagccagatgcctttgacaacgtgctgaactacatctacagcagcagcctgtttgtggagaagagcagcctggccgctgtgcaggagctgggctacagcctgggcatctccttcctgaccaacatcgtgtcctag

SEQ ID NO: 38774 - DNA, 2598 bp, Artificial Sequence
  derived and/or modified sequence
atggagggcctgctgcactacatcaaccccgcccacgccatcagcctactgagtgccctcaacgaagagcgcctgaagggacagctttgcgacgtcctcttaatagtgggcgaccagaagttcagggcccacaagaatgtcttggccgcttcatcagaatacttccagtctctctttaccaacaaggagaatgagtcacagacggtgttccagctggacttctgtgaacccgacgccttcgataacgttctgaattatatctatagttcgtcgctttttgtagaaaagtctagtttggcagctgtacaggagctaggttactccctcggtatctcgtttctcacaaacattgtgtctaagactcctcaggctccctttcctacttgccctaatcggaaaaaggtgttcgtcgaagacgacgaaaattccagtcagaaacggtctgttattgtgtgccaaagtagaaacgaagcccaagggaagacagtgtcccagaaccagcctgacgtgtctcacacttcccgtcctagccctagcatcgccgtgaaagctaataccaataagcctcacgtcccaaagccgatcgaacctctccataacttaagcctgactgagaaatcatggcccaaagattcatcagtggtctatgcaaaaagtctggagcatagcggctcactggacgaccccaacaggatatcccttgtcaagaggaacgccgttttaccttctaagccactgcaggaccgtgaagcgatggacgataaacctggagtgagcgggcagctgcccaagggcaaggccctcgagctggccctgaagaggccacgaccgcccgtactcagcgtgtgtagctcgtctgaaaccccttacctgctcaaagagaccaataaagggaatggccagggggaggaccgtaaccttttgtactacagcaaattggggctcgtgatcccctcctctggatccggttctggcaaccaatccattgatcggagcggcccactggtcaaaagtctgttgagacgaagtctgtcaatggatagccaagtccccgtgtattcaccatctatcgatcttaagagcagtcaggggtcatcttctgtatcttctgatgctcccgggaatgttctctgtgcactctcgcagaaatcttcccttaaagattgctccgaaaaaaccgccttggacgatcgcccacaggtgctacaaccccaccgtctcaggagcttttccgctagtcagtctaccgacagagagggggcaagtcctgtcaccgaagtccgcattaaaacagaacctagctctccccttagcgacccctctgacattataagagtcaccgtgggagatgcagccactacagctgccgccagctcttcctcagtcactagggatctctcattaaagactgaagatgaccagaaggatatgagcagattgcccgcaaagcggcggttccaggccgaccggcgccttcccttcaaaaagcttaaggtaaacgaacacggttcacccgtgtcggaggacaactttgaggaggggtcatcaccaactctcctggacgccgattttccagattccgatctaaacaaagacgagttcgagcagggcagtcatgagcggctctgcaggaacgcagccgtatgcccctactgtagcctgcggttcttttcccctgagctcaagcaggaacatgagtctaaatgcgaatacaagaagctaacctgtctggagtgcatgaggacattcaaatcttctttttcaatctggcgccaccaggtggaggttcataaccagaacaatatggccccgaccgagaatttttcactgcctgtgctggaccataacggcgacgtcacaggaagtagtcgccctcagtcccagcccgagcccaataaggtgaaccacattgtgaccacaaaagatgataacgtcttctccgactcgagtgagcaagtcaacttcgacagcgaggatagttcttgtttgcccgaggacctgtcattgagcaagcagttaaagatccaggtcaaggaggaacccgtagaggaggccgaggaggaagctcctgaagctagcacggctccaaaggaggccggtccgagcaaagaggcctcactgtggccttgtgagaaatgtggcaaaatgttcacagtgcataaacaactggaaaggcatcaggagctgttgtgctccgttaaaccctttatctgccacgtgtgtaacaaggcctttaggacaaattttaggctgtggtcccatttccagtcacatatgtcacaggcttccgaggagagcgcccataaagaatcagaggtctgccccgtgcctaccaacagcccatctcccccccctctgccacccccaccacctttgcctaagatccagcccttggagccggatagccccacaggcctgagcgagaatccgacacccgcaacagagaagttgttcgtgccccaggagagcgatactctattttatcacgccccgcctctctctgccattacctttaagagacagttcatgtgcaaactgtgccaccgaactttcaaaaccgcattcagcctttggagtcatgagcaaacccacaattag

SEQ ID NO: 38775 - DNA, 360 bp, Artificial Sequence
  derived and/or modified sequence
atggagggcctgctgcactacatcaaccccgcccacgccatcagccttctaagcgccctgaatgaagaacggcttaaggggcaactttgcgatgtgctgctcattgttggagaccagaagtttcgtgctcataagaatgtacttgctgcttcttcagaatacttccagtccctgttcacaaataaagagaacgagtcccaaacagtttttcaactggacttctgcgagcctgacgctttcgataacgtcctgaactacatctactcctcttcactttttgtggagaagtcatccctggctgctgtacaggagttaggctatagcctaggtataagctttttaactaatattgtttcctag

SEQ ID NO: 38776 - DNA, 2598 bp, Artificial Sequence
  derived and/or modified sequence
atggaagggctgctgcattatatcaatcctgcccatgctatctccctgctctctgccctgaacgaggaacgactgaaagggcaactgtgcgatgtcttactgatcgttggggatcagaagttcagagctcacaaaaatgtgctggcggcttcatccgaatatttccagtctctgtttaccaataaagagaatgaatcccaaacggtcttccagttggatttctgtgaaccagacgcattcgacaatgtcctgaactacatttactcgtcttccttatttgtggaaaaaagctctctggctgccgtgcaggaattgggctactccctgggtatctcttttctgaccaatatcgtatccaaaacacctcaagccccttttccaacgtgccccaaccggaagaaagtgtttgtcgaggacgacgaaaatagtagccaaaagaggtctgtgattgtgtgccagtctcgaaatgaggcccagggcaaaacggtttctcagaatcagcctgacgtttcccacacttctcgtccatctccttcgattgccgtcaaggccaacaccaataaaccacacgtacccaaacccatagagccactgcacaacttgtcgttgaccgaaaagagttggcccaaagatagctctgttgtgtatgctaaatctctcgaacacagcggaagtcttgatgatccaaaccggatatccctcgtaaaaagaaacgccgtgctcccaagcaagccgttgcaggatcgagaagccatggacgacaagccaggagtgtcaggtcaactcccaaaagggaaggcactcgagctggctctcaaaaggcctaggcctccagtgctctccgtttgcagttcctcagagacaccttacttactcaaagagaccaataagggcaacggacagggggaggatcgaaacttgctgtactattccaagctcggtttggtgatcccaagcagtggcagcggctctggaaaccagtctatcgaccgttctggacctctcgttaaaagcctgctgcgcaggagtctcagcatggactcacaggtgccagtgtattcgccatccattgatttgaaatctagtcagggctcaagcagtgtgtcctcagacgcacccggtaacgtgctgtgtgccttgtcccaaaaaagctcactgaaggactgttccgagaagactgcattggacgacagaccacaggtcctgcagccccatagactacgatctttttccgccagtcaatccaccgatagggaaggggcatcaccagtgaccgaggtacgcattaaaactgagccgtctagccccttatcagacccgagcgacatcatccgcgtcactgtcggggatgccgcaactacagcagctgcatcctcttcgtctgtcacacgggacctctccctcaagacagaggatgatcagaaggacatgagcagactccctgctaagcggcgttttcaagccgatcgaaggcttcccttcaagaagctcaaggtcaacgagcacggaagcccagtgagcgaggacaacttcgaggaaggatccagtcctacactcctggatgcagacttcccagattcagacctgaacaaggatgaatttgaacagggctcccacgagaggctgtgccggaacgcagccgtgtgtccatattgctccctaagattttttagtccagaactcaagcaagagcacgaaagcaagtgcgaatataaaaagctcacttgtctagaatgcatgcggaccttcaagtcttcgttttcaatctggagacaccaagtcgaagtgcataaccagaataacatggcacccaccgagaacttcagcctaccagtgctcgatcataacggcgacgtcacaggcagcagcagaccccagtcacaacccgagcctaacaaggtgaatcacattgtgacaacaaaagacgataacgtattcagcgactctagcgagcaggtcaacttcgactctgaagacagttcatgcttaccagaggacctatcgctgagcaagcagctgaaaattcaagtgaaggaagagcctgtggaagaggccgaagaggaagccccagaggcgtcaaccgctccaaaagaggccggtccatcgaaagaagcatccctttggccctgcgagaagtgcggcaaaatgttcacagtccataaacagctagagagacaccaagaattattgtgctctgtgaaaccctttatatgccatgtgtgtaacaaggcattccggacaaatttcagactttggtcccatttccaatctcacatgagtcaggccagtgaggaaagtgcacataaagaatccgaagtttgtcccgtgcctactaactcaccaagcccacccccactcccccctcccccacctttgcccaagatccagcctctcgaacccgattctccgacaggtctgagtgaaaatcccacgccagctaccgagaaattgttcgtcccacaagagtctgatacactcttctaccacgcaccccctctatcagccatcacatttaagcggcagtttatgtgtaaactgtgtcaccgaaccttcaaaacagccttttctctctggtctcatgaacagacacataactag

SEQ ID NO: 38777 - DNA, 360 bp, Artificial Sequence
  derived and/or modified sequence
atggaagggttgcttcactacataaatcctgcgcatgccatcagtttgctctcagccctgaacgaggagcggttgaaaggccaactttgcgacgtgctgttaatagtcggcgatcagaagttccgggctcacaagaacgttctcgctgccagctctgagtatttccagtcattgtttaccaataaggagaatgaaagtcagacggtcttccagctagatttctgcgaacctgatgccttcgataacgtacttaactacatatatagttcctccctctttgtcgaaaaaagtagcctggcagccgtgcaggagctcggatactccttgggtatcagtttccttaccaatatagtgtcctag

SEQ ID NO: 38778 - DNA, 555 bp, Artificial Sequence
  derived and/or modified sequence
tgggatgacgtcaaattcaagatggatggaatcacagcggcagcggcggctgcggcgcgcgcgagccgagtgtgagcggaaaggggcccggcgtctgcctcgagactgaagaccgaagacatgaagtagaaacaatccaggaaggctttgggaagctatttgtgtgcgaggatcaaagtgatctgaaaaatacactgaggagaaagtacacccggcaacaaagctcgccttatctgacagcagaagagcagagaaatcaaaagtttttgaggattcggtgtacacagccaccagccacaaacagtcttgctggattatctcgtgatcgtcagcagttgtgattttccccctttttacttacattcttgatggatggagcattttatatttttagataaactcaagccatggagggattactgcattacatcaaccctgcacacgccatttctctcctaagtgccctgaatgaggagcgtctcaaaggacagctgtgtgatgtgctgctgattgttggagaccaaaagttccgagctcataaaaacgtcttggctg

SEQ ID NO: 38779 - DNA, 6846 bp, Artificial Sequence
  derived and/or modified sequence
gtcaaattcaagatggatggaatcacagcggcagcggcggctgcggcgcgcgcgagccgagtgtgagcggaaaggggcccggcgtctgcctcgagactgaagaccgaagacatgaagtagaaacaatccaggaaggctttgggaagctatttgtgtgcgaggatcaaagtgataaactcaagccatggagggattactgcattacatcaaccctgcacacgccatttctctcctaagtgccctgaatgaggagcgtctcaaaggacagctgtgtgatgtgctgctgattgttggagaccaaaagttccgagctcataaaaacgtcttggctgccagcagcgaatactttcagagtttattcacaaataaggaaaatgagtcacaaactgtatttcagcttgacttctgtgagccagatgcttttgataatgttttaaactacatttattcttcctctctatttgttgagaagagcagccttgctgctgtgcaagaacttggctatagtcttgggatttcctttctgactaacatcgtttctaaaacacctcaagccccctttccaacgtgtcctaatagaaaaaaagtgtttgtagaagatgatgaaaacagttctcaaaagagaagtgtcattgtttgtcaaagtagaaacgaagcgcaaggaaaaactgttagtcaaaatcaacccgatgtaagccatacttcccggccctctcctagcattgcagtcaaggccaataccaataagccacatgtcccaaaaccaatagaaccacttcataatttgtcattaactgaaaagagttggccgaaagatagttctgtggtatatgcaaagtctcttgagcattctggatctttggatgatcctaatagaatcagtttggtgaaaagaaatgcagtgttgccttcaaagcctctgcaagacagagaagctatggatgataaaccaggtgtgagtggtcagcttccaaaaggaaaagctctagagctggctttgaagagaccacggccacctgttttgtctgtttgtagctcatcagagactccctatctattaaaagaaactaacaaaggaaatggtcaaggtgaagatagaaacttgttgtactattcaaagttaggcttagtgatcccatccagtggatctggttctggaaaccaaagcattgacaggagtggcccacttgttaagagtctcctcagacggtcattgtcgatggatagccaggttcctgtctattcaccttccatagatttgaaatcttcccagggatcatcttcggtgtccagtgatgcaccagggaatgtgttgtgtgctttatctcagaagtcatctttaaaagattgtagtgaaaaaacagccctagatgacaggcctcaagtgctacaaccgcatcgcctcaggtcctttagtgcttctcagtcaacagacagggagggagcttcccctgtgactgaggtgcgcataaagactgagcccagcagcccgctgtcggacccctcggacatcatccgcgtcactgtgggagatgcggcaacaacagcagctgcctcatcttcgtcggtcacaagagacctgtctctgaaaacagaagatgaccaaaaagacatgagcagactcccagcaaaaaggaggttccaagcggaccgaagattgccgtttaagaagttaaaggtgaatgagcacgggtctcctgtgtcagaagataattttgaggaaggctcaagccctactctccttgatgcagattttccagattctgatttgaataaagacgaatttgagcaaggaagccacgagcggctgtgccggaacgcggccgtctgcccttactgcagcctcaggtttttctcgcccgagctgaagcaagaacacgagagcaagtgtgagtataagaagctgacctgcctcgagtgcatgcgcaccttcaagtcctctttcagcatctggcggcaccaggttgaagtccataatcagaacaacatggcacccaccgaaaacttttctttgcccgttttggaccacaatggtgatgtgactggttcttcaaggccccaatcccagcctgagcccaacaaagtaaaccacatcgtcaccacaaaagacgacaacgtgttcagtgattcttcagaacaagttaacttcgactcggaagattcctcttgtcttcccgaagaccttagtctttccaagcaactgaaaatccaagtcaaagaggagcctgtggaggaggctgaagaagaggcacccgaggccagcacagcccccaaagaagcgggtcctagcaaagaagccagcctgtggccctgcgagaagtgtgggaagatgttcacggtgcataagcagctggagcgtcaccaggagcttctgtgctctgtgaaaccatttatttgtcacgtgtgcaacaaagcttttcgcactaattttcgactctggagtcacttccaatcgcacatgtctcaggcttcagaggaatcggcacataaggaatctgaggtgtgccctgttcccacaaactctccctctccaccacctctgccaccgccaccaccactgcccaagatccagcctctggagcctgacagccccacaggcctgtccgaaaacccaactccagccacagaaaaactgtttgtgccccaagaatcagacacccttttttaccatgccccacccctttcagcaatcacatttaaaagacagtttatgtgtaaactttgccacaggacattcaagactgcatttagtctttggagtcacgaacaaacacacaattgaaagaccaacactttttacctatgggaggcagtccccagatttcaacctgaattgtgaaatgtgtcataagaaacaaaatattttttaaacaagaataataaaggttggagattgttacgcttgaaattaagttggaggcaaattgataattacttagtaatgtccttaactttagaaatacagcttttaaaatattgtggttctggaccttacaagaacaagatggtttgatttcattaatgttgaaattggattagtcttgattgtgtgcatggttcctcattccatggtgtcagtataatcatttaattgaggtttttggttttttattgattagtggaatactgtcgaagtattccttcttttaattattttagacacttgagttctagttaaatcttaaccatgttcttaagtccaaaataggaagaagtggagtagtttgcagtattgatttatatcttagactactttagcaataaaagataaatctcaactttaataagttatcctgacacttgataaaaataaatatttggtattttgtggtcatgtaaaacttctttttgtatgaaaattgtgagaaatttaaatcagcaatagtaacacttagatttttataaactaacaaaaacttgctctcagtcaatataataaatgatagttaaactctaaggaagacctgggaaatgaaaacaatttatggaagtcccctacagtcagtttataagggcttcagtagtgatagacattgttataaaaacttgtaccatgttacatgtacactgcaccacagtctaaattcagaccagcatttgaaggactgcacatatttcatttcctctgatttatgctgtcacaaattgaaaatctgagtgtagttaggacaaaaaacaaagctaaccatatggcactaattttgattttaacattagtgtaacaaataaggtcgggacatatatttacatagatcccagacactcaagaattagcacagctgatgtaaaattctaaattaccatttacttccagatagagcagaggagaaacacctcactgcagtttcaacatgctttccaagaacaatatatacgacatatacattttcctgcctctctcttgtgacaatttctgttagaatttgttgggggtctgatggttaaaatcatgggcaaggccattctctacatcattgcttaatatttcaaaaataggtattagagcactatcagtggtccaaaattagttttagctacttattttgctccatgggttttgggcttttcaaagaatactatgtataatttgtaattgaaagcctttcagtaggatatccaaagttcaatgtgtttcaaaagggaaaacttttacttgtgggggtgggagttagatgtattaaaaaaacgaaactacaaaatccttttaagaaagtaataccaatttagactctagtttgtgttacgaggtattctttcaaattttttttaaaagccaactactgtcattaagaaataattttagatttgtgctctagcagaaaataactctgtacccatcaatcttattgccaacattccataccagtggtaggaaagatattctcattttttttattgaaccagacatttttataaaatactgattgactttgtacattatggatattatatatgaaattttgccttgtattctttcacttgaaaaaactccaaaattccacaatattttagtagttaacttcctattctttcttaaatttgatggagaagggaaaataaattgcagttattgattcttgccatctttgttttcttaaagaaatctatgcattttaaggataaaactaaagcatatgggtttacatgaaacatcaggatggattattgtacattgaattcattccgcgtataatgtggtatttcttactctgtccatcttggtagctgtcacttcaaaagaagacagtttccctgagtaatcatcacctacatggccattagagtatctatcggtgataattccatgatacagagtatcttggcattataaattcagtatcccaggacctaaacctttatgctacattttcgaagattttttaaaaataatattgttaatcagtaaaaaaaaaaaatatttttgatctaaacataggttctgcatatctgttagattttaaaaatgactggtgttttgtcttcacatttttgtctaagcaaggaatataagatttcaaataaaattttgaaccaaaaacatttataatgccgttctggtttttctattactttttatactgtactttaaaagcattaggctgaaagagtttattttggtggtcaaaaaaaatatgcttccactcatgtaactattttaaatgttaagaagtaaaataatgaaagatatgttaattactttattcagtaaagttttttaagaatgtttatctcagccagtaggcaaatacttggtgtaaaacaagttggtcttaaattgttgcaactcattagctagtgaagatattcatgtaaatatattttaggattgtaattaattttgaaaatgtagaaagctctttattccatgtaagtatgcaggatgcctgcttttttatgcagttgtggaaagaatgtaaaatgttttaatatattctttgttaatctgagaacttgatactgaatcgtttatgtgggagaaggaaggagtaacataaaacatgtttttatcactcaaagtaagcaatggaggtaacaaatattgtgcattttaacagtaatatttgaagatttgtagaatattcacctttaaaactagttagtatgcatttataattttaccagaatatacaactaacaattcaacagtgatgttctttgcatttgtggggagatgtgtgatgttcttggttttctggtttggaatggaacgtttatagccttgcctgtaaaaatgtgccccagcacttaatgagtgaccgtttgaatccatatgtagtcccattggtgctaatgagagtagctgctgtgaaacaggaataaaatgtgtctgttcacggaggtgcggtgtggatgcacctacaaggccaactctctgatcagggtgagggagagatggaagaattaacagatctaaagttggcctttgttgtctcaaattgggtttgtacacacatgcatgcatgtgtgtatacaactgtaatctggaacttcaggaagtaaaattatttgaagtttcttagtaaaaagtaattaggtataattccaaatagatttctgtataaattgtatctaactggattacaagtcagtttgacaatttacgatgtctcagtgatgtttctgcaataattgtgaaatgcattattgatttaaataatgctgacacgtactctttaaaagtgttctttaacactgactactaaactttaagttttaaaaaataggttttcatttatggctttttgtggttttagcactttaagaagtttaattttttgtaatttttaatatgctctttcagtgtatctcagcgggtactccagcttgtggcattcccatgtgactggggagaagacaaaattggtgtttagattctggaggagaaaaaatgagttacaatgtcaggtgtttttaaaaattccttttagagacagtcttttgggaaccaaagtattttactgtaaatctttaaaataacagaattcagtgctctttcatttgttaatgctgtccagatttttcacacagttatactcagttaatactagttttcagaacattagtccaaggctatttcaagttttccattgaatatatgcttatggttaaaagaaaaacgaatggttttataattctgtgtattttgtcatatgccttagcagagtaagtcatttttccattttacttaggaataagctttttcgaactgaaaattcatggtaaaataggatttctatctaatgttaatccattgcttatttgtattcaattccattgtctacagtttgcttaaatgttgactaagaatgattggagtcaataaatttgtactgtattttgcttcga

SEQ ID NO: 38780 - DNA, 607 bp, Artificial Sequence
  derived and/or modified sequence
aaacagatgtgggagcagggacgagagttgtggagtttaagtaccatgctggacctgaggatatactgtgatggaaccgttcagtaggtacctgagaggctggagcctcaagagtctaaacagagatacagatttgggaatcatcgtccagtagtgattaaagtcacaaggtctaatagaaaaagcaaagaatactgccacgttttggggctctgtaacggatgctggagaaataaagataaactcaagccatggagggattactgcattacatcaaccctgcacacgccatttctctcctaagtgccctgaatgaggagcgtctcaaaggacagctgtgtgatgtgctgctgattgttggagaccaaaagttccgagctcataaaaacgtcttggctgccagcagcgaatactttcagagtttattcacaaataaggaaaatgagtcacaaactgtatttcagcttgacttctgtgagccagatgcttttgataatgttttaaactacatttattcttcctctctatttgttgagaagagcagccttgctgctgtgcaagaacttggctatagtcttgggatttcctttctgactaacatcgtttc

SEQ ID NO: 38781 - DNA, 463 bp, Artificial Sequence
  derived and/or modified sequence
gtcaaattcaagatggatggaatcacagcggcagcggcggctgcggcgcgcgcgagccgagtgtgagcggaaaggggcccggcgtctgcctcgagactgaagaccgagcccccgcagaccttgtctgggacttcccggcggtcccgcagagcatagcaccctccgccggccaggagccctgctgctcggccggcgaccgtctccccgcttggaggagcccccttccccccgtccgagaagacatgaagtagaaacaatccaggaaggctttgggaagctatttgtgtgcgaggatcaaagtgataaactcaagccatggagggattactgcattacatcaaccctgcacacgccatttctctcctaagtgccctgaatgaggagcgtctcaaaggacagctgtgtgatgtgctgctgattgttggagaccaaaagttccgagctcataaaaacgtcttggctg

SEQ ID NO: 38782 - protein, 116 aa, Artificial Sequence [sequence omitted]

SEQ ID NO: 38783 - DNA, 538 bp, Artificial Sequence
  derived and/or modified sequence
cacgtggagaacgccagggagctgtgagggtgtgtggtctcgttcctgtcgtctggaatatttttcctctactgagattcatctgtgtgaaatatgagttggcgaggaagatcgacctatcggtctagaccaagactctatgtagagccccctgaaatgattgggcctatgctgcccgagcagttcagtgatgaagtggaaccagcaacacctgaagaaggggaaccagcaactcaacgtcaggatcctgcagctgctcaggagggagaggatgagggagcatctgcaggtcaagggccgaagcctgaagctgatagccaggaacaggttcacccaaagactgggtgtgagtgtggagatggtcctgatggccaggagatgggcctgccaaatccagaggaggtgaaaaggcctgaagaaggtgaaaagcaatcacagtgttaaaagaagacacgttgaaatgatgcaggctgctcctatgttggaaatttgttcattaaaattctcccaataaagctttacagccttctgcaaagaa

SEQ ID NO: 38784 - DNA, 351 bp, Artificial Sequence
  derived and/or modified sequence
atgtcttggagagggaggtctacctacaggagtagaccacgcctctatgtggagccaccggaaatgataggccctatgctgcctgagcagtttagcgatgaggtcgaacccgccacaccagaagaaggcgaacccgccactcagagacaggatcccgcggcagcccaagagggtgaggatgaaggagccagcgctggtcagggacctaaacctgaagcggacagccaggaacaagttcacccgaagaccggctgcgaatgtggggacggtcctgacggccaggagatgggtttgcccaatcccgaagaagtgaagcgtcctgaagaaggtgagaagcagtctcagtgctag

SEQ ID NO: 38785 - DNA, 351 bp, Artificial Sequence
  derived and/or modified sequence
atgtcctggaggggccgcagcacctaccgcagccggccccggctgtatgtggagcccccagagatgattggccccatgctgcctgagcagttcagtgatgaggtggagcccgccaccccagaggagggggagcccgccacccagaggcaggaccctgctgctgcccaggagggagaagatgagggcgccagcgctggccagggccccaagccagaggccgacagccaggagcaggtgcaccccaagacaggctgtgaatgtggagatggcccagatggccaggagatgggcctgcccaaccctgaggaggtgaagaggcctgaggagggggagaagcagagccagtgctag

SEQ ID NO: 38786 - DNA, 351 bp, Artificial Sequence
  derived and/or modified sequence
atgagctggcggggccggagcacctaccggagccggccccggctgtacgtggagccccctgaaatgatcggccccatgcttcccgaacagtttagtgatgaggttgaaccggcgaccccagaagaaggagagccggcaactcaaaggcaagacccagcagccgcacaggagggtgaagacgaaggcgctagtgccggtcagggcccgaaaccggaagcagattcacaagagcaggttcatcctaaaacgggatgcgagtgcggcgacggaccagacgggcaggagatgggcctccccaatccagaggaggtaaaacgaccggaagaaggagagaaacagagccagtgctag

SEQ ID NO: 38787 - DNA, 351 bp, Artificial Sequence
  derived and/or modified sequence
atgtcctggagaggtagatctacttatcggagcaggcctaggctttatgtggagccaccagaaatgatcggcccaatgctcccagagcagttcagcgacgaggtggagcctgccacacccgaggagggcgaacctgcaacccagaggcaggaccctgccgcagctcaagagggggaggatgaaggcgcatccgctggacaggggcctaaaccagaggccgattcgcaggagcaggtccaccctaaaaccggctgtgaatgtggagatgggccagatggtcaggagatgggtctgcccaaccccgaggaggtgaaaagaccagaggaaggcgaaaagcagagccagtgttag

SEQ ID NO: 38788 - DNA, 351 bp, Artificial Sequence
  derived and/or modified sequence
atgagctggagaggcagaagcacctacagaagcagacccagactgtacgtggagccccccgagatgatcggccccatgctgcccgagcagttcagcgacgaggtggagcccgccacccccgaggagggcgagcccgccacccagagacaggaccccgccgccgcccaggagggcgaggacgagggcgccagcgccggccagggccccaagcccgaggccgacagccaggagcaggtgcaccccaagaccggctgcgagtgcggcgacggccccgacggccaggagatgggcctgcccaaccccgaggaggtgaagagacccgaggagggcgagaagcagagccagtgctag

SEQ ID NO: 38789 - protein, 954 aa, Artificial Sequence
  derived and/or modified sequence
MHSPGADGTQVSPGAHYCSPTGAGCPRPCADTPGPQPQPMDLRVGQRPPVEPPPEPTLLALQRPQRLHHHLFLAGLQQQRSVEPMRLSMDTPMPELQVGPQEQELRQLLHKDKSKRSAVASSVVKQKLAEVILKKQQAALERTVHPNSPGIPYRTLEPLETEGATRSMLSSFLPPVPSLPSDPPEHFPLRKTVSEPNLKLRYKPKKSLERRKNPLLRKESAPPSLRRRPAETLGDSSPSSSSTPASGCSSPNDSEHGPNPILGSEADSDRRTHPTLGPRGPILGSPHTPLFLPHGLEPEAGGTLPSRLQPILLLDPSGSHAPLLTVPGLGPLPFHFAQSLMTTERLSGSGLHWPLSRTRSEPLPPSATAPPPPGPMQPRLEQLKTHVQVIKRSAKPSEKPRLRQIPSAEDLETDGGGPGQVVDDGLEHRELGHGQPEARGPAPLQQHPQVLLWEQQRLAGRLPRGSTGDTVLLPLAQGGHRPLSRAQSSPAAPASLSAPEPASQARVLSSSETPARTLPFTTGLIYDSVMLKHQCSCGDNSRHPEHAGRIQSIWSRLQERGLRSQCECLRGRKASLEELQSVHSERHVLLYGTNPLSRLKLDNGKLAGLLAQRMFVMLPCGGVGVDTDTIWNELHSSNAARWAAGSVTDLAFKVASRELKNGFAVVRPPGHHADHSTAMGFCFFNSVAIACRQLQQQSKASKILIVDWDVHHGNGTQQTFYQDPSVLYISLHRHDDGNFFPGSGAVDEVGAGSGEGFNVNVAWAGGLDPPMGDPEYLAAFRIVVMPIAREFSPDLVLVSAGFDAAEGHPAPLGGYHVSAKCFGYMTQQLMNLAGGAVVLALEGGHDLTAICDASEACVAALLGNRVDPLSEEGWKQKPNLNAIRSLEAVIRVHSKYWGCMQRLASCPDSWVPRVPGADKEEVEAVTALASLSVGILAEDRPSEQLVEEEEPMNL

SEQ ID NO: 38790 - DNA, 2865 bp, Artificial Sequence
  derived and/or modified sequence
atgcacagccccggcgccgacggcacccaggtgagccccggcgcccactactgcagccccaccggcgccggctgccccagaccctgcgccgacacccccggcccccagccccagcccatggacctgagagtgggccagagaccccccgtggagcccccccccgagcccaccctgctggccctgcagagaccccagagactgcaccaccacctgttcctggccggcctgcagcagcagagaagcgtggagcccatgagactgagcatggacacccccatgcccgagctgcaggtgggcccccaggagcaggagctgagacagctgctgcacaaggacaagagcaagagaagcgccgtggccagcagcgtggtgaagcagaagctggccgaggtgatcctgaagaagcagcaggccgccctggagagaaccgtgcaccccaacagccccggcatcccctacagaaccctggagcccctggagaccgagggcgccaccagaagcatgctgagcagcttcctgccccccgtgcccagcctgcccagcgacccccccgagcacttccccctgagaaagaccgtgagcgagcccaacctgaagctgagatacaagcccaagaagagcctggagagaagaaagaaccccctgctgagaaaggagagcgccccccccagcctgagaagaagacccgccgagaccctgggcgacagcagccccagcagcagcagcacccccgccagcggctgcagcagccccaacgacagcgagcacggccccaaccccatcctgggcagcgaggccgacagcgacagaagaacccaccccaccctgggccccagaggccccatcctgggcagcccccacacccccctgttcctgccccacggcctggagcccgaggccggcggcaccctgcccagcagactgcagcccatcctgctgctggaccccagcggcagccacgcccccctgctgaccgtgcccggcctgggccccctgcccttccacttcgcccagagcctgatgaccaccgagagactgagcggcagcggcctgcactggcccctgagcagaaccagaagcgagcccctgccccccagcgccaccgccccccccccccccggccccatgcagcccagactggagcagctgaagacccacgtgcaggtgatcaagagaagcgccaagcccagcgagaagcccagactgagacagatccccagcgccgaggacctggagaccgacggcggcggccccggccaggtggtggacgacggcctggagcacagagagctgggccacggccagcccgaggccagaggccccgcccccctgcagcagcacccccaggtgctgctgtgggagcagcagagactggccggcagactgcccagaggcagcaccggcgacaccgtgctgctgcccctggcccagggcggccacagacccctgagcagagcccagagcagccccgccgcccccgccagcctgagcgcccccgagcccgccagccaggccagagtgctgagcagcagcgagacccccgccagaaccctgcccttcaccaccggcctgatctacgacagcgtgatgctgaagcaccagtgcagctgcggcgacaacagcagacaccccgagcacgccggcagaatccagagcatctggagcagactgcaggagagaggcctgagaagccagtgcgagtgcctgagaggcagaaaggccagcctggaggagctgcagagcgtgcacagcgagagacacgtgctgctgtacggcaccaaccccctgagcagactgaagctggacaacggcaagctggccggcctgctggcccagagaatgttcgtgatgctgccctgcggcggcgtgggcgtggacaccgacaccatctggaacgagctgcacagcagcaacgccgccagatgggccgccggcagcgtgaccgacctggccttcaaggtggccagcagagagctgaagaacggcttcgccgtggtgagaccccccggccaccacgccgaccacagcaccgccatgggcttctgcttcttcaacagcgtggccatcgcctgcagacagctgcagcagcagagcaaggccagcaagatcctgatcgtggactgggacgtgcaccacggcaacggcacccagcagaccttctaccaggaccccagcgtgctgtacatcagcctgcacagacacgacgacggcaacttcttccccggcagcggcgccgtggacgaggtgggcgccggcagcggcgagggcttcaacgtgaacgtggcctgggccggcggcctggacccccccatgggcgaccccgagtacctggccgccttcagaatcgtggtgatgcccatcgccagagagttcagccccgacctggtgctggtgagcgccggcttcgacgccgccgagggccaccccgcccccctgggcggctaccacgtgagcgccaagtgcttcggctacatgacccagcagctgatgaacctggccggcggcgccgtggtgctggccctggagggcggccacgacctgaccgccatctgcgacgccagcgaggcctgcgtggccgccctgctgggcaacagagtggaccccctgagcgaggagggctggaagcagaagcccaacctgaacgccatcagaagcctggaggccgtgatcagagtgcacagcaagtactggggctgcatgcagagactggccagctgccccgacagctgggtgcccagagtgcccggcgccgacaaggaggaggtggaggccgtgaccgccctggccagcctgagcgtgggcatcctggccgaggacagacccagcgagcagctggtggaggaggaggagcccatgaacctgtag

SEQ ID NO: 38791 - DNA, 2865 bp, Artificial Sequence
  derived and/or modified sequence
atgcacagccccggagcggatgggacccaggtgagtccaggagcccactattgttcgcctaccggtgctggatgccccagaccatgcgctgatacccctgggccccagccacaaccaatggatctccgcgtcggacagcggccccccgtggaacccccaccagaacccactctcttggcccttcagcggcctcagaggctccaccaccacctcttccttgccggccttcaacagcagaggtctgtggagcctatgcgtctgtccatggatactcctatgccagaactccaggtcggtccccaggagcaggaactgcggcagttgttgcacaaggacaagtctaaaaggagcgctgtcgcaagttccgtggttaagcagaaactcgccgaggttatactcaagaagcagcaagctgctcttgagcggactgttcaccctaactcccctggaatcccctatcgaacgctcgagcccctcgagacagagggcgccactcgcagtatgctctcgtccttcctgccccctgtgcccagtttgccttcagaccctccagaacactttcctctcaggaagactgtgagcgagcccaacctgaaactgagatacaagcccaagaagtcactggagagaaggaagaatcctcttcttcgcaaagagtctgctcccccgtccctcaggcgacgaccggctgagaccctgggtgactcatctccctccagttcgtctaccccagccagcgggtgctcttcacctaacgattccgagcacggccctaatcctattctggggagcgaggcagactccgatcggaggacacatcccaccttaggccctcgaggacctatactgggatcgcctcatacacctctgttcctgccacatggcctggagccagaagctgggggcaccctaccctcacggcttcaacccatcttgcttctggaccccagcggaagccacgcccccctgctgactgtgccagggctcggtcccctaccttttcactttgcccaatcacttatgacgaccgagcgcctatctggatccggcctccactggccgctgtcaaggacacgaagtgagccgctgcccccctccgcaactgcccctcccccacctggaccaatgcagccacgcctggaacagctgaagacacacgtgcaagttattaaaaggtcagctaagccctcggagaagccacggctgcggcagattcccagtgctgaggacttggagaccgatgggggaggccccggccaggtggtggacgatggattggagcaccgggaactcggtcacgggcagccagaggcccgagggccagcccctctccaacagcatccacaggttctcttatgggagcagcagcgactggccggtcgacttccccggggtagcacaggagacacggtacttctcccattggcccagggcgggcatagaccgctttcccgagcccagtcctccccagctgctcctgcaagcctgtcagcaccagagccagctagtcaggcccgggtgctctcctcgagtgaaacccccgccaggacactgcccttcaccacaggcttaatatatgattcagtgatgcttaagcaccagtgctcctgtggcgataatagccgccaccccgagcacgcgggacggatacaaagcatttggtctcgactgcaggaaagagggctgcgttctcagtgtgagtgtctcaggggcagaaaagcgagccttgaagaacttcagtctgtgcacagcgagaggcatgtgcttctttatggaaccaatcccctcagtagattgaagctggacaatggcaagctggcaggcttattggcccagaggatgtttgtcatgcttccttgtggaggcgtcggtgtcgatactgatactatttggaacgaacttcacagtagcaatgccgctcgatgggcagccggctcagtaacggatctagcattcaaagttgccagcagggaactgaaaaatggttttgccgtggtgcggccacctggtcaccatgcggatcactccacagctatggggttttgcttttttaattctgtggccatcgcctgtaggcagctgcagcaacaaagtaaagcgagtaagatcctgatagtggattgggatgtacatcatggtaacgggacccagcagacattctaccaggacccttccgtgctatacatttcgctgcataggcacgatgatgggaacttcttcccaggctcaggcgccgtggacgaggtgggggccggctctggcgaaggttttaacgtgaacgttgcttgggccgggggcctcgatcctcctatgggagatcccgagtacctagccgctttcaggatcgtggtcatgcctatcgcaagggagttttcacctgatcttgtgctcgtgtcagcaggatttgacgccgccgaagggcaccctgcacccctgggagggtatcacgtcagtgccaagtgctttggatatatgacccaacaactgatgaatctcgctggcggagctgtggtgctcgctctggagggaggacacgatctgactgcaatctgtgatgcttcagaggcatgcgtggccgctttactcggaaaccgggtggacccgctcagcgaagaagggtggaagcaaaaacctaacctcaacgccatcaggagcctagaagccgtgattcgcgtccattccaagtactgggggtgtatgcagcgactcgcatcttgtcccgattcctgggtgccaagagttccaggagcagacaaagaggaagtcgaggccgtaacggcgctggcgtccctcagcgttggcatattggccgaggaccgcccgagtgaacagctggtggaggaagaggaacccatgaacttatag

SEQ ID NO: 38792 - DNA, 4065 bp, Artificial Sequence
  derived and/or modified sequence
ggcgactggggggatgtgaggccggcgccccagccccccgccccgccatgagccccccgctctgagggccccggcccctggatgcacagccccggcgctgatgggacccaggtgagcccgggtgcccactactgcagccccactggcgcaggctgccccaggccctgtgcagacacaccaggccctcagccgcagcccatggacctgcgggtgggccagcggcccccagtggagcccccaccagagcccacattgctggccctgcagcgtccccagcgcctgcaccaccacctcttcctagcaggcctgcagcagcagcgctcggtggagcccatgaggctctccatggacacgccgatgcccgagttgcaggtgggaccccaggaacaagagctgcggcagcttctccacaaggacaagagcaagcgaagtgctgtagccagcagcgtggtcaagcagaagctagcggaggtgattctgaaaaaacagcaggcggccctagaaagaacagtccatcccaacagccccggcattccctacagaaccctggagcccctggagacggaaggagccacccgctccatgctcagcagctttttgcctcctgttcccagcctgcccagtgaccccccagagcacttccctctgcgcaagacagtctctgagcccaacctgaagctgcgctataagcccaagaagtccctggagcggaggaagaatccactgctccgaaaggagagtgcgccccccagcctccggcggcggcccgcagagaccctcggagactcctccccaagtagtagcagcacgcccgcatcagggtgcagctcccccaatgacagcgagcacggccccaatcccatcctgggctcggaggctgacagtgaccgcaggacccatccgactctgggccctcgggggccaatcctggggagcccccacactcccctcttcctgccccatggcttggagcccgaggctgggggcaccttgccctctcgcctgcagcccattctcctcctggacccctcaggctctcatgccccgctgctgactgtgcccgggcttgggcccttgcccttccactttgcccagtccttaatgaccaccgagcggctctctgggtcaggcctccactggccactgagccggactcgctcagagcccctgccccccagtgccaccgctcccccaccgccgggccccatgcagccccgcctggagcagctcaaaactcacgtccaggtgatcaagaggtcagccaagccgagtgagaagccccggctgcggcagataccctcggctgaagacctggagacagatggcgggggaccgggccaggtggtggacgatggcctggagcacagggagctgggccatgggcagcctgaggccagaggccccgctcctctccagcagcaccctcaggtgttgctctgggaacagcagcgactggctgggcggctcccccggggcagcaccggggacactgtgctgcttcctctggcccagggtgggcaccggcctctgtcccgggctcagtcttccccagccgcacctgcctcactgtcagccccagagcctgccagccaggcccgagtcctctccagctcagagacccctgccaggaccctgcccttcaccacagggctgatctatgactcggtcatgctgaagcaccagtgctcctgcggtgacaacagcaggcacccggagcacgccggccgcatccagagcatctggtcccggctgcaggagcgggggctccggagccagtgtgagtgtctccgaggccggaaggcctccctggaagagctgcagtcggtccactctgagcggcacgtgctcctctacggcaccaacccgctcagccgcctcaaactggacaacgggaagctggcagggctcctggcacagcggatgtttgtgatgctgccctgtggtggggttggggtggacactgacaccatctggaatgagcttcattcctccaatgcagcccgctgggccgctggcagtgtcactgacctcgccttcaaagtggcttctcgtgagctaaagaatggtttcgctgtggtgcggcccccaggacaccatgcagatcattcaacagccatgggcttctgcttcttcaactcagtggccatcgcctgccggcagctgcaacagcagagcaaggccagcaagatcctcattgtagactgggacgtgcaccatggcaacggcacccagcaaaccttctaccaagaccccagtgtgctctacatctccctgcatcgccatgacgacggcaacttcttcccggggagtggggctgtggatgaggtaggggctggcagcggtgagggcttcaatgtcaatgtggcctgggctggaggtctggacccccccatgggggatcctgagtacctggctgctttcaggatagtcgtgatgcccatcgcccgagagttctctccagacctagtcctggtgtctgctggatttgatgctgctgagggtcacccggccccactgggtggctaccatgtttctgccaaatgttttggatacatgacgcagcaactgatgaacctggcaggaggcgcagtggtgctggccttggagggtggccatgacctcacagccatctgtgacgcctctgaggcctgtgtggctgctcttctgggtaacagggtggatcccctttcagaagaaggctggaaacagaaacccaacctcaatgccatccgctctctggaggccgtgatccgggtgcacagtaaatactggggctgcatgcagcgcctggcctcctgtccagactcctgggtgcctagagtgccaggggctgacaaagaagaagtggaggcagtgaccgcactggcgtccctctctgtgggcatcctggctgaagataggccctcggagcagctggtggaggaggaagaacctatgaatctctaaggctctggaaccatctgcccgcccaccatgcccttgggacctggttctcttctaacccctggcaatagcccccattcctgggtctttagagatcctgtgggcaagtagttggaaccagagaacagcctgcctgctttgacagttatcccagggagcgtgagaaaatccctgggtctagaatgggaactggagaggaccctgagaggagacgggctgggcggcgacccccacagggctctcgagaacagattctcccctccagtatgggccctggctgtggcccccattcctcaggactgcacagaggaggactggctccggctccgtcgggctcacccttaaccactattcctggctctgcaaaccccagactttgcacacagcctcaggctccacacagaaatgtgaacttggcctcagacaggctggcccttcctaggctctaggggctaggggggagtggggagccaagaggtcccatattcctgagtgcaggggtagtccctctcacctgcttcctcagacgactctggaagcttccctctaccactgggcactgagacgaagctccctgacagccgagactggcagccctccatctggtccgtaccctcgccagaggcccccctacatcaacctcctggcgatgccctggtggagcagatgggtgctctgggagtcctgtgcttcctgatccaatggtgccaaacccttcatctccccaagaagcgcagcatacccctgggacccctcggccactgcccactcggggagccttctctgtttctggggcctcccccaccatagctctgattcccaccccacataggagtagcctgactgagggggaaggggtgggagagaagatacagacatggaggaggggaggctgctctggcaaagtcttcaaggcttttgggggtccaggcctggggtcaagaaggaaaatgtgtgtgagcatgtgtgtgagtgaggcgtgtgtgtgagcgtgtgtgtgagtgaggcgtgtgtgtgtgtctttcctaggacccaccataccctgtgtatgtatgcatgtttttgtaaaaaggaagaaaatggaaaaaaatctgaacaataaatgttttatttgctttaaaa

SEQ ID NO: 38793 - DNA, 2865 bp, Artificial Sequence
  derived and/or modified sequence
atgcacagccctggagcagatggcacccaggtgtcccctggggcccactactgcagccccactggagctggctgcccccggccctgtgccgacaccccaggcccccagccccagcccatggacctgcgggtgggccagaggcctcctgtggagcccccacctgagcccaccctgctggccctgcagaggccccagaggctgcaccaccacctgttcctggccggcctgcagcagcagaggtctgtggagcccatgaggctgtccatggacacccccatgcctgagctgcaggtgggcccccaggagcaggagctgcggcagctgctgcacaaggacaagagcaagaggtctgctgtggccagctctgtggtgaagcagaagctggccgaggtgatcctgaagaagcagcaggccgccctggagaggacagtgcaccccaacagccctggcatcccctaccgcaccctggagcccctggagacagaaggagccaccaggtccatgctgagcagcttcctgccccctgtgcccagcctgcccagcgaccccccagagcacttccccctgaggaagacagtgtctgagcccaacctgaagctgcgctacaagcccaagaagagcctggagaggaggaagaaccccctgctgaggaaggagagcgccccacccagcctgcggcggcggcctgctgagaccctgggggacagcagccccagcagcagcagcaccccagccagcggctgcagcagccccaatgacagcgagcacggccccaaccccatcctgggcagcgaggccgacagcgacaggaggacccaccccaccctgggcccccggggccccatcctgggcagcccccacacccccctcttcctgccccacggcctggagcctgaggccggcggcaccctgcccagccggctgcagcccatcctgctgctggaccccagcggcagccacgcccccctgctgactgtgcccggcctgggccccctgcccttccactttgcccagagcctgatgaccacagagcggctgagcggcagcggcctgcactggcccctgagcaggaccaggtctgagcccctgccccccagcgccacagcccctcctcctcctggccccatgcagccccggctggagcagctgaagacccacgtgcaggtgatcaagaggtctgccaagcccagcgagaagccccggctgcggcagatccccagcgctgaggacctggagacagatggcggcggccctggccaggtggtggatgatggcctggagcaccgggagctgggccacggccagcctgaggcccggggccctgcccccctgcagcagcacccccaggtgctgctgtgggagcagcagaggctggccggccgcctgccccggggcagcactggagacacagtgctgctgcccctggcccagggcggccaccggcccctgagccgggcccagagcagccctgctgccccagccagcctgagcgcccctgagcccgccagccaggcccgggtgctgagcagcagcgagaccccagcccggaccctgcccttcaccaccggcctcatctatgacagcgtgatgctgaagcaccagtgcagctgtggggacaacagccgccaccctgagcacgccggccgcatccagagcatctggagccggctgcaggagcggggcctgcggagccagtgtgaatgtctgcggggcaggaaggccagcctggaggagctgcagagcgtgcacagcgagagacatgtgctgctgtatggcaccaaccccctgagccggctgaagctggacaatggcaagctggccggcctgctggcccagaggatgtttgtgatgctgccctgtggcggcgtgggcgtggacacagacaccatctggaatgagctgcacagcagcaatgctgcccgctgggccgccggctctgtgacagacctggccttcaaggtggccagccgggagctgaagaatggatttgctgtggtgcggcccccaggccaccacgccgaccacagcacagccatgggcttctgcttcttcaacagcgtggccatcgcctgccggcagctgcagcagcagagcaaggccagcaagatcctgattgtggactgggatgtgcaccacggcaatggcacccagcagaccttctaccaggaccccagcgtgctgtacatcagcctgcacagacatgatgatggcaacttcttccctggcagcggggctgtggatgaggtgggcgccggcagcggggagggcttcaacgtgaatgtggcctgggccggcggcctggacccccccatgggagaccctgagtacctggccgccttccgcatcgtggtgatgcccatcgcccgggagttctccccagacctggtgctggtgtctgctggctttgatgctgctgagggccacccagcccccctgggcggctaccacgtgtctgccaagtgcttcggctacatgacccagcagctgatgaacctggccggcggcgctgtggtgctggccctggagggcggccatgacctgacagccatctgtgatgccagcgaggcctgtgtggccgccctgctgggcaacagagtggaccccctgtctgaggagggctggaagcagaagcccaacctgaatgccatccgcagcctggaggccgtcatccgggtgcacagcaagtactggggctgcatgcagaggctggccagctgcccagacagctgggtgccccgggtgcctggagctgacaaggaggaggtggaggccgtgacagccctggccagcctgtctgtgggcatcctggccgaggaccggcccagcgagcagctggtggaggaggaggagcccatgaacctgtag

SEQ ID NO: 38794 - DNA, 2865 bp, Artificial Sequence
  derived and/or modified sequence
atgcacagccccggcgccgacggcacccaggtgagccccggcgcccactactgtagccctactggtgctgggtgcccacggccttgcgcagacacccctggacctcagccgcaaccaatggatttgcgggttggacagcggccgcccgtggagcccccgcccgagcctacccttctggcactccagcgcccacaacgcctgcatcaccacctctttctcgccggtctccagcagcagagatctgtggagcccatgagactaagcatggacacccctatgcccgaactccaggtaggcccgcaggaacaagaattgcgtcagctgctgcacaaagataagtccaagcgctctgccgtggccagttcggtggtcaagcagaaactggccgaagtgatactcaagaagcaacaggccgctcttgaacgcaccgtccacccaaacagccccggaattccttaccgcaccctggagccgctcgaaaccgagggagcaaccagaagcatgcttagcagtttcttgccacctgtccctagcctgccatctgacccccctgaacattttccgttacggaagactgtcagtgaacccaatctgaaattgcggtacaagcccaagaaatccctggaaagacgtaagaatcctctgcttcgcaaagaaagtgctcctccgtctttgaggcgcaggcccgctgaaacgctgggtgactcgagcccctcttcatcatctacacctgcaagcgggtgcagctcccctaacgattcagagcacggacccaatccaattcttggctccgaagccgactcggatcgccgcactcatccaacactgggccctaggggcccaattctcggatcgcctcataccccactgtttctcccccacggtctggaaccagaggcaggggggacactgccatcccgcctgcagccaatcctgcttctggatccctcaggatcacacgctcccttgctgaccgtgcctggcctcgggcctctgcccttccatttcgctcagagtctgatgaccacggaacgactgtccggatcgggcctccattggcccttgagtcgcaccaggtcagagccattgccacctagcgccaccgctccacctccacccgggcccatgcagcctaggctcgaacagctcaagacccatgtgcaggtgattaagagaagcgctaaaccatctgaaaagcctcgactccggcagatcccatctgccgaagatttggagacagatgggggagggcccggtcaagtcgtagacgatgggctcgagcatcgcgagctcggtcacggtcaacccgaggctagagggcccgcgcccctgcagcagcatccacaggtgctgctgtgggaacagcagcggttggctggtaggttgcccaggggtagtaccggagacacggttttgctacccctggcacagggaggtcaccgccccctgtcccgggcgcagtcttctccagccgcccccgcgagcctgtccgccccagaaccggcgagccaagctcgtgtcctgagctccagcgaaacacccgcacgcactctgcccttcaccaccggcctgatttacgacagtgtaatgttgaaacaccagtgtagctgcggagataacagccgacatccggagcatgctgggaggattcaaagtatatggtcacgcttgcaggaacgtggcctcagaagtcagtgcgagtgcctcagagggcgtaaggcctcactggaggagttgcagagcgtccattcagaaagacacgtgctgctatatggcaccaatcccctgagtcggctgaaactggacaacggcaaactggccggccttctggctcaaagaatgtttgtaatgctaccatgcggtggagttggagtcgacacagatacgatatggaacgagttgcactcctccaatgcagctaggtgggcagctggaagcgtgaccgatctggccttcaaggtagcgagccgggagctcaaaaatggtttcgccgtcgttcgcccccccggacaccacgctgaccatagcactgccatggggttttgcttttttaattcagtggctatcgcgtgtagacagctgcagcagcaatcaaaggcctctaagatcctaattgtggattgggacgtgcaccacggtaatgggactcaacagacattctatcaggacccctcagtattgtatatcagcctccaccggcacgacgacgggaattttttccccgggtctggcgctgttgacgaggttggagcaggcagcggagagggctttaacgtgaatgtggcctgggcaggcggcttagacccccctatgggtgatccggagtatctggctgctttcagaatcgtcgtcatgcccatcgcgagagagttctcgcctgatttggtactggtgtcagctgggttcgatgctgcggagggtcaccccgctccactgggaggataccatgtaagcgccaaatgctttggctatatgactcagcagcttatgaacctggcgggcggcgccgtggtccttgccctggagggcggccatgatcttacagcaatctgcgatgccagcgaggcttgcgtagccgcattattaggaaaccgagtggaccctttatccgaggaaggctggaagcagaagcctaatctgaacgccatccggtcgttggaggctgtcatcagggtgcactccaaatattggggctgcatgcagcggctggcctcatgtccggatagttgggtcccgagggttccgggagccgacaaagaggaagtggaggccgtcacagcacttgcctcccttagtgtggggatactcgctgaagatagaccatctgagcaacttgtggaggaagaagagccaatgaatttgtag

SEQ ID NO: 38795 - DNA, 2865 bp, Artificial Sequence
  derived and/or modified sequence
atgcacagccctggcgctgatggcacacaggtctcccctggggcacactattgttctcctaccggtgcaggttgtcccagaccctgtgccgacacaccagggcctcagcctcagcctatggacctgcgggtggggcaacggccacccgtcgagccccctccagagcccactttgcttgcgctgcagcggccacaacgcttacaccaccatcttttcttggcgggactgcaacagcagcggtccgttgagcctatgcgcctgtctatggacaccccaatgccagagcttcaggtcggacctcaggagcaggagctccggcagctcctgcataaggacaagagtaagcggtccgccgttgcaagcagcgttgtgaaacagaaactagccgaggtgatcctcaagaagcagcaagcagctcttgaaaggacagtgcacccgaattcaccaggcattccttaccggactctggagccactggagacagaaggcgcaacacgaagcatgctgtcctcttttctgccacctgtcccctcacttccttcagatccccctgaacacttccccctccgcaagaccgtaagtgagccgaacttaaaactcaggtataagcccaagaagtccctcgagaggaggaagaatccattgttgaggaaagaatctgcgcctccgagtctaagacgacgtcctgcagagaccttgggtgattcttcaccttccagctcctccactccggctagtggctgtagctctcctaacgactcagaacacgggcctaatcccatcttgggctctgaagccgactcagacaggcgaacccatccgactctgggaccacgcggacccattctgggatcccctcacacgccactctttctgccacacgggctggagccagaggcagggggaaccttgcctagtaggctgcagccaattctactgctggaccctagcggcagccatgctcccttattgacagtgcctggactgggcccattgcctttccactttgctcagagcctgatgaccaccgagcgcctgtctggatctggcctccactggcccctctcccgcactcgcagtgaacccctgcctcccagcgctacggccccaccacccccaggacccatgcagcctagactggaacagctcaagacccacgtgcaagtcatcaagcgcagtgcaaagccaagtgaaaaacctcgccttcgtcagataccatccgctgaggacttggagacagatggaggaggcccaggccaagttgtggatgacggcctcgaacatcgtgaactgggccacggtcagccggaggccagaggaccggctcccttgcaacagcatcctcaggtcctactgtgggaacagcagaggcttgcgggtagactccccagaggtagcacaggtgacaccgtgttactaccattggcacaggggggacacaggccattgagtagagcccagagctcccctgcagcccctgcctctctgagtgccccagagccggctagccaggcccgagttctgagtagttctgaaactcctgccaggaccctgcctttcacaacggggctgatctacgattccgtgatgcttaaacatcaatgctcatgcggcgataactccaggcaccctgagcacgcgggaaggatccaaagcatttggtcaaggctgcaggagcgcggattgcggtctcaatgcgaatgtctgcgtggccgtaaggcgtcactggaagagctgcagagtgtgcattcggaaagacacgtcctcctgtatggcaccaaccctctgagcaggcttaagctggataatggaaagcttgccggactgctcgctcagcgtatgttcgtgatgctgccttgtgggggtgtgggagtagacacagacactatctggaacgagctgcatagctctaatgccgctcggtgggcagccggaagcgtgacggacttggcctttaaggttgctagccgagagctgaagaacggctttgcggtggtgaggcctcccggtcatcacgcagatcacagcactgcgatgggtttctgcttttttaactccgttgccatcgcctgccggcagttacagcagcagtctaaggcaagtaaaatcttaattgtcgactgggatgtgcaccacggaaatggaactcagcagacattctaccaggatcctagtgtgctgtacatttccctgcacaggcacgatgatggtaatttcttcccaggtagtggtgcagtcgatgaagtcggcgcaggtagcggtgaaggttttaacgtcaacgttgcctgggccggaggcttggaccctccaatgggtgaccctgagtatttagccgctttcaggattgtggtgatgccaattgcacgagaatttagccccgacctagtcctagtgtcagcgggatttgacgcagccgaagggcatcctgccccactcggaggctatcatgtctctgccaaatgcttcggctatatgacccagcaactcatgaatctcgctgggggagccgtggtgttagccctagaaggcggacacgatctgaccgccatctgcgatgcctctgaggcgtgcgtggcagcactactcgggaaccgtgtagaccctctgagcgaagaagggtggaagcagaagcccaacttaaacgccatccggtctcttgaagccgtgatccgggtgcactctaagtactggggttgcatgcagaggctggctagctgtccagatagctgggtgccacgggtgcccggagctgacaaggaggaagtggaggccgtgactgcactggcctccctctcagtggggattctagcagaggaccgcccttctgagcaattggtggaagaggaggaaccaatgaacctctag

SEQ ID NO: 38796 - DNA, 957 bp, Artificial Sequence
  derived and/or modified sequence
atggaggacgtgctaaacttcttttccgactgtaggatccgtaacggagaaaatggaattcattttctgttgaatcgcgatggcaaaaggagaggtgatgctctgatagagatggagtcggagcaggacgtacagaaagcactggagaagcacagaatgtacatgggacagcgatacgtcgaagtctatgagattaataacgaggatgtcgatgctctaatgaagagtctgcaggtgaagtcctcccccgtggtaaacgatggcgtggtacggctgcgaggcctcccttattcttgtaacgaaaaggacatcgtcgacttttttgccggcctcaatattgtggatatcaccttcgtgatggactatagagggagacggaagacgggcgaggcgtatgtgcagtttgaagagcctgagatggccaaccaggcactgttgaagcacagggaagagatcggaaaccgatatatcgaaatcttcccttctagaagaaacgaggttcgcacccacgtcgggagctataagggaaagaagatcgcttccttccccactgcaaaatacatcaccgaaccagaaatggtattcgaagaacatgaggtgaacgaggatatccagcctatgacagccttcgagagcgaaaaagagatcgagctcccgaaagaagtcccagagaaactccctgaggccgccgacttcggcactacctcttcactacactttgtccatatgaggggcctgccatttcaggctaatgctcaagatatcattaactttttcgcccctcttaagcccgtgaggatcacaatggagtacagttcctctgggaaggcaacaggtgaagcggacgtgcactttgagacgcatgaagatgccgttgccgcaatgctaaaagacaggtcccatgtgcatcaccgatacatcgaattgttcctcaacagctgccccaaagggaagtag

SEQ ID NO: 38797 - DNA, 957 bp, Artificial Sequence
  derived and/or modified sequence
atggaggatgtgctgaacttcttctcagattgcaggattagaaatggggaaaacggcatacacttcctgctgaacagggatggaaaaaggaggggtgacgccctgattgagatggagagcgaacaagatgtgcagaaggctttggagaagcatagaatgtatatgggacagcggtatgtggaagtgtatgagattaataatgaagatgtggatgctctgatgaaatcgctgcaggtgaagtcctcgcccgtagtgaatgatggagtcgtgagactccgtggattgccttatagctgtaatgaaaaggacatcgtggatttcttcgcaggcctgaacatcgtggacattactttcgtcatggactatcggggacggaggaagacaggagaggcctatgtgcagttcgaagaaccagaaatggcaaatcaggccttgctgaaacatcgcgaggagattggcaacagatacatcgagatttttcctagtcgaaggaatgaagtgagaacccacgtgggcagttacaaaggcaagaaaattgcttccttccccaccgctaaatacatcacagaacctgagatggtgttcgaagagcacgaagtaaatgaagacattcagcccatgacagcttttgaatccgagaaggagatcgaactgccgaaagaagtaccagagaaactacctgaagccgctgactttggcacaaccagtagcctccactttgtgcatatgagggggttgccatttcaggcaaacgctcaagacataattaactttttcgcccccctgaagcccgtccgaattaccatggagtacagcagttcagggaaggcgaccggcgaggcagatgtccacttcgaaacccatgaagatgccgtggccgccatgctgaaggataggagccatgtgcatcatagatatattgaactatttttgaatagctgccccaagggaaagtag

SEQ ID NO: 38798 - DNA, 957 bp, Artificial Sequence
  derived and/or modified sequence
atggaggatgtgctgaacttcttcagtgactgccgcatcagaaatggagaaaatggcatccacttcctgctgaacagagatggcaagagaagaggagatgccctgattgagatggagagcgagcaggatgtgcagaaggccctggagaagcacaggatgtacatgggccagagatatgtggaggtgtatgagatcaacaatgaagatgtggatgccctgatgaagagcctgcaggtgaagagcagccctgtggtgaatgatggagtggtgcggctgcggggcctgccctacagctgcaatgagaaggacatcgtggacttctttgctggcctgaacatcgtggacatcacctttgtgatggactaccggggccgcaggaagacaggagaggcctacgtgcagtttgaggagcctgagatggccaaccaggccctgctgaagcaccgggaggagatcggcaaccgctacatcgagatcttccccagcagaagaaatgaggtgaggacccacgtgggcagctacaagggcaagaagatcgccagcttccccacagccaagtacatcacagagcctgagatggtgtttgaggagcacgaggtgaatgaagacatccagcccatgacagcctttgagagcgagaaggagattgagctgcccaaggaggtgcctgagaagctgcctgaggccgctgactttggcaccaccagcagcctgcactttgtgcacatgaggggcctgcccttccaggccaatgcccaggacatcatcaacttctttgcccccctgaagcctgtgcgcatcaccatggagtacagcagcagcggcaaggccaccggggaggctgatgtgcactttgagacccatgaagatgctgtggccgccatgctgaaggacaggagccacgtgcaccaccgctacatcgagctgttcctgaacagctgccccaagggcaagtag

SEQ ID NO: 38799 - DNA, 957 bp, Artificial Sequence
  derived and/or modified sequence
atggaggacgtgctgaacttcttcagcgactgccggatccggaacggcgagaatggtatacactttctactgaacagggatggcaagaggaggggcgatgcactcattgagatggaatccgaacaggacgtccagaaagccctggaaaagcatcgcatgtatatgggccaacgctatgttgaggtttatgagattaataacgaggacgttgacgcccttatgaagagcctccaggtgaaatcatcccccgtggttaacgatggagtggtgagactgcgcgggctcccttactcttgtaatgaaaaagacattgtcgactttttcgctggacttaatatcgtggacatcacatttgttatggattaccggggcagaagaaagacgggcgaagcctacgtccaatttgaagagcctgagatggccaaccaggctctcctgaagcatcgagaggaaattggaaatcggtatattgagatcttcccatcccggcgcaacgaagttagaacgcacgtgggatcatataagggtaagaaaatcgccagcttccctacggccaagtacataactgagccagagatggtttttgaggagcatgaagtgaatgaagatatacagcctatgactgctttcgagtcggaaaaagagatcgagctgccaaaggaagtgccagaaaagttacccgaagcggctgacttcgggaccacctctagtttacatttcgtgcacatgagggggcttccatttcaagctaacgcccaagatatcattaactttttcgctccacttaaaccagtgcggatcaccatggagtacagcagcagtggcaaggcaaccggagaggctgacgttcactttgagacacacgaagacgccgttgctgccatgctgaaggaccggagtcatgtgcatcaccggtacatagagctgttcctgaactcctgtccgaaaggaaagtag

SEQ ID NO: 38800 - DNA, 957 bp, Artificial Sequence
  derived and/or modified sequence
atggaggacgtgctgaacttcttcagcgactgccggatccggaacggggaaaacggcatacatttcttgttgaaccgggacggaaaacgacggggagacgcgctcatcgagatggaaagtgaacaagatgttcagaaggccctggagaaacacagaatgtatatgggtcaaaggtatgttgaagtttatgagatcaacaacgaagatgttgatgcgctcatgaagtctctgcaggtgaaatcttctcccgttgttaatgacggcgtcgtgaggctacgaggattgccctattcgtgtaacgagaaggatattgtggactttttcgcaggactcaacattgttgacataactttcgtgatggattataggggccgaaggaaaaccggcgaggcatacgtccagtttgaggagccggagatggccaaccaggcactgctaaaacatagggaggagatcggtaatcgctacatcgagatctttccatcacgccggaacgaggtgaggacccatgtcggttcctataaggggaagaaaattgcatccttcccaacagcgaagtacataacagagcccgaaatggttttcgaggaacatgaagtgaatgaggacatccagcccatgactgcattcgagagcgagaaggaaatagagttgccgaaagaagtgccggagaagctgcccgaggccgcagacttcggaactacaagttccctccactttgtgcatatgcggggccttccctttcaggccaacgcacaggatatcatcaacttttttgctcctttgaagccagtgcgaattaccatggaatactcctcatctggcaaggcaacgggggaagcagacgttcattttgagacgcacgaggacgccgtggccgctatgctcaaagacaggtctcacgtgcaccatagatatattgagctgttcctaaattcctgccccaaggggaagtag

SEQ ID NO: 38801 - DNA, 957 bp, Artificial Sequence
  derived and/or modified sequence
atggaggacgtcttaaatttttttagtgactgccgaatcaggaatggtgagaacgggatccatttccttttaaacagagatgggaagaggagaggggatgctctgattgagatggaatctgaacaggacgtccaaaaagcacttgagaagcacaggatgtatatgggacaacgatatgtggaggtttacgagattaataatgaagatgtggacgccctgatgaaatctttgcaggtgaaaagcagtccagtggtcaatgacggcgtcgtgagacttaggggcctgccctactcctgcaacgagaaagatattgtagactttttcgctgggttgaacatcgtcgacatcacgtttgttatggactataggggacgtcgcaaaactggggaggcctacgttcagttcgaagagccggaaatggcgaatcaggccctgcttaagcaccgggaagagatcggtaatagatatatagagattttccctagccgtcgcaatgaggtacgtacacacgtcggatcatacaaaggaaagaagatcgcatcattccccactgcaaaatatattacagagcccgagatggtgtttgaagagcatgaggtcaatgaggacatccagcctatgacagcgttcgaaagtgagaaggagatcgaattgccaaaggaagtgcccgagaaactacctgaggcagctgattttggtacaaccagttcactccattttgtgcacatgcggggattacctttccaggcgaacgcccaggatatcatcaatttcttcgcccctcttaaacccgtcaggatcaccatggagtacagcagtagtggtaaagccacaggcgaagctgatgtccacttcgagacacacgaggatgcagtcgctgctatgctgaaagataggtctcatgtccatcaccggtatattgagttattcttgaatagttgtcccaaaggcaagtag

SEQ ID NO: 38802 - DNA, 957 bp, Artificial Sequence
  derived and/or modified sequence
atggaggacgtgctcaatttcttttctgactgtaggatccggaacggcgagaacggaatccatttccttctcaatcgtgacggcaagcgacgaggggacgccttgatagagatggagtctgagcaagacgtacagaaggctctagaaaaacacaggatgtacatgggacaaaggtacgtggaagtgtatgaaattaataatgaggatgtcgacgcccttatgaaaagcctgcaggtgaagtcctcccccgtcgttaacgatggggtggtgcggcttagaggcctgccctacagctgcaatgagaaagacatcgttgatttttttgctggtctcaatatcgtggatatcacattcgtaatggattacagaggcaggagaaaaacaggcgaggcctatgtgcaattcgaggagccggagatggcaaaccaagccctgctcaagcatcgagaggagattggcaaccggtacatagaaatctttcccagtcgaagaaatgaggtgaggacccatgtgggatcttacaaggggaagaaaattgcctcttttcccactgccaagtatatcacggagccagagatggtgtttgaggagcacgaagtgaacgaggatattcagcctatgaccgcttttgaaagtgaaaaggagatagagcttccaaaggaggttcccgagaaactcccggaagcggcagacttcggtactacctcaagtttgcactttgtccacatgagaggacttccgtttcaggcaaacgcccaggacattataaactttttcgcaccgctgaaaccagtcaggatcacaatggagtacagtagttccggcaaggcaacgggagaagccgatgttcacttcgaaactcacgaagatgctgtggctgctatgctgaaagacaggagtcatgtgcaccaccggtatatcgagttattccttaatagctgccctaagggcaagtag

SEQ ID NO: 38803 - DNA, 957 bp, Artificial Sequence
  derived and/or modified sequence
atggaggacgtgctgaacttcttcagcgactgcagaatcagaaacggcgagaacggcatccacttcctgctgaacagagacggcaagagaagaggcgacgccctgatcgagatggagagcgagcaggacgtgcagaaggccctggagaagcacagaatgtacatgggccagagatacgtggaggtgtacgagatcaacaacgaggacgtggacgccctgatgaagagcctgcaggtgaagagcagccccgtggtgaacgacggcgtggtgagactgagaggcctgccctacagctgcaacgagaaggacatcgtggacttcttcgccggcctgaacatcgtggacatcaccttcgtgatggactacagaggcagaagaaagaccggcgaggcctacgtgcagttcgaggagcccgagatggccaaccaggccctgctgaagcacagagaggagatcggcaacagatacatcgagatcttccccagcagaagaaacgaggtgagaacccacgtgggcagctacaagggcaagaagatcgccagcttccccaccgccaagtacatcaccgagcccgagatggtgttcgaggagcacgaggtgaacgaggacatccagcccatgaccgccttcgagagcgagaaggagatcgagctgcccaaggaggtgcccgagaagctgcccgaggccgccgacttcggcaccaccagcagcctgcacttcgtgcacatgagaggcctgcccttccaggccaacgcccaggacatcatcaacttcttcgcccccctgaagcccgtgagaatcaccatggagtacagcagcagcggcaaggccaccggcgaggccgacgtgcacttcgagacccacgaggacgccgtggccgccatgctgaaggacagaagccacgtgcaccacagatacatcgagctgttcctgaacagctgccccaagggcaagtag

SEQ ID NO: 38804 - protein, 254 aa, Artificial Sequence
  derived and/or modified sequence
MAPRSLLLLLSGALALTDTWAGSHSLRYFSTAVSRPGRGEPRYIAVEYVDDTQFLRFDSDAAIPRMEPREPWVEQEGPQYWEWTTGYAKANAQTDRVALRNLLRRYNQSEAGSHTLQGMNGCDMGPDGRLLRGYHQHAYDGKDYISLNEDLRSWTAADTVAQITQRFYEAEEYAEEFRTYLEGECLELLRRYLENGKETLQRAEQSPQPTIPIVGIVAGLVVLGAVVTGAVVAAVMWRKKSSDRNRGSYSQAAV

SEQ ID NO: 38805 - protein, 131 aa, Artificial Sequence
  derived and/or modified sequence
MAPRSLLLLLSGALALTDTWAGSHSLRYFSTAVSRPGRGEPRYIAVEYVDDTQFLRFDSDAAIPRMEPREPWVEQEGPQYWEWTTGYAKANAQTDRVALRNLLRRYNQSEAGSHTLQGMNGCDMGPDGRLL

SEQ ID NO: 38806 - protein, 242 aa, Artificial Sequence
  derived and/or modified sequence
MAPRSLLLLLSGALALTDTWAGSHSLRYFSTAVSRPGRGEPRYIAVEYVDDTQFLRFDSDAAIPRMEPREPWVEQEGPQYWEWTTGYAKANAQTDRVALRNLLRRYNQSEAGSHTLQGMNGCDMGPDGRLLRGYHQHAYDGKDYISLNEDLRSWTAADTVAQITQRFYEAEEYAEEFRTYLEGECLELLRRYLENGKETLQRAEQSPQPTIPIVGIVAGLVVLGAVVTGAVVAAVMWRKKSS

SEQ ID NO: 38807 - DNA, 765 bp, Artificial Sequence
  derived and/or modified sequence
atggcccccagaagcctgctgctgctgctgagcggcgccctggccctgaccgacacctgggccggcagccacagcctgagatacttcagcaccgccgtgagcagacccggcagaggcgagcccagatacatcgccgtggagtacgtggacgacacccagttcctgagattcgacagcgacgccgccatccccagaatggagcccagagagccctgggtggagcaggagggcccccagtactgggagtggaccaccggctacgccaaggccaacgcccagaccgacagagtggccctgagaaacctgctgagaagatacaaccagagcgaggccggcagccacaccctgcagggcatgaacggctgcgacatgggccccgacggcagactgctgagaggctaccaccagcacgcctacgacggcaaggactacatcagcctgaacgaggacctgagaagctggaccgccgccgacaccgtggcccagatcacccagagattctacgaggccgaggagtacgccgaggagttcagaacctacctggagggcgagtgcctggagctgctgagaagatacctggagaacggcaaggagaccctgcagagagccgagcagagcccccagcccaccatccccatcgtgggcatcgtggccggcctggtggtgctgggcgccgtggtgaccggcgccgtggtggccgccgtgatgtggagaaagaagagcagcgacagaaacagaggcagctacagccaggccgccgtgtag

SEQ ID NO: 38808 - DNA, 396 bp, Artificial Sequence
  derived and/or modified sequence
atggcccccagaagcctgctgctgctgctgagcggcgccctggccctgaccgacacctgggccggcagccacagcctgagatacttcagcaccgccgtgagcagacccggcagaggcgagcccagatacatcgccgtggagtacgtggacgacacccagttcctgagattcgacagcgacgccgccatccccagaatggagcccagagagccctgggtggagcaggagggcccccagtactgggagtggaccaccggctacgccaaggccaacgcccagaccgacagagtggccctgagaaacctgctgagaagatacaaccagagcgaggccggcagccacaccctgcagggcatgaacggctgcgacatgggccccgacggcagactgctgtag

SEQ ID NO: 38809 - DNA, 729 bp, Artificial Sequence
  derived and/or modified sequence
atggcccccagaagcctgctgctgctgctgagcggcgccctggccctgaccgacacctgggccggcagccacagcctgagatacttcagcaccgccgtgagcagacccggcagaggcgagcccagatacatcgccgtggagtacgtggacgacacccagttcctgagattcgacagcgacgccgccatccccagaatggagcccagagagccctgggtggagcaggagggcccccagtactgggagtggaccaccggctacgccaaggccaacgcccagaccgacagagtggccctgagaaacctgctgagaagatacaaccagagcgaggccggcagccacaccctgcagggcatgaacggctgcgacatgggccccgacggcagactgctgagaggctaccaccagcacgcctacgacggcaaggactacatcagcctgaacgaggacctgagaagctggaccgccgccgacaccgtggcccagatcacccagagattctacgaggccgaggagtacgccgaggagttcagaacctacctggagggcgagtgcctggagctgctgagaagatacctggagaacggcaaggagaccctgcagagagccgagcagagcccccagcccaccatccccatcgtgggcatcgtggccggcctggtggtgctgggcgccgtggtgaccggcgccgtggtggccgccgtgatgtggagaaagaagagcagctag

SEQ ID NO: 38810 - DNA, 765 bp, Artificial Sequence
  derived and/or modified sequence
atggccccacgaagtctgttattgttgctatccggggccctcgctctgacagacacatgggccggaagccactctctgaggtacttttcgacggctgtgtctcgaccgggcaggggtgagccacgctatattgctgtcgagtacgtagatgatacccagtttttaaggttcgacagcgatgccgcgattccccggatggagccaagagagccttgggtggagcaggagggcccccagtactgggagtggaccaccggttatgctaaagccaacgcccagaccgaccgagtggccctgaggaacttgcttagaagatacaaccaatctgaggctggcagtcatactctgcaggggatgaacggctgtgatatgggcccagatggaagactgttacgcggctatcatcagcacgcttatgacggcaaagattatataagcctcaatgaagacctcaggtcgtggacagcagctgacacggtggcgcaaatcacccagaggttttacgaggcggaggagtacgccgaggagttccggacgtacttggagggggagtgcctggaactgctcaggcgttatttggaaaatggtaaagaaactcttcagcgggctgagcagtcaccgcagcccactatcccgatagtgggaatcgtagctggactcgtcgtgctcggtgctgtggtgaccggcgccgtggtggctgctgtgatgtggcgcaagaagtcaagcgaccgcaatcgcggttcttactcccaagcagcggtctag

SEQ ID NO: 38811 - DNA, 765 bp, Artificial Sequence
  derived and/or modified sequence
atggcccctaggagtctcttactgctgctgtccggtgccctcgcactcaccgatacttgggcaggatctcacagtctccggtacttttctaccgcagtgtctcgaccaggccgcggggagccacgctacatagccgtagagtacgtagacgatacccagttcttgcgttttgactccgatgctgccatacctcggatggaaccaagagaaccctgggtagaacaggaaggtcctcagtactgggaatggaccactgggtatgcaaaggccaacgcccagacagaccgcgtcgcgctgagaaatctgttgcgcaggtacaatcagagcgaagccggcagtcatactctgcagggcatgaacggctgtgatatgggccctgacggcaggttactgcgggggtatcatcagcatgcatacgacgggaaagactatatatctcttaatgaagacttgcgctcctggacggcggctgataccgtggcccagataacccagaggttctacgaagccgaagagtacgctgaagaattccggacctacctggaaggggaatgtctggagctgctcaggcgctacctggagaatggtaaggagacactccagagggccgagcaaagccctcagcctacaataccaatagtcggcattgttgctggtctggtggtgctgggtgccgtggtcacgggcgcagtcgtggcagcggtcatgtggcggaagaaatcttcggacagaaatcggggctcgtactcacaggctgccgtttag

SEQ ID NO: 38812 - DNA, 765 bp, Artificial Sequence
  derived and/or modified sequence
atggcacctcgcagcctgctgttgttgttgagcggggctctggccctgactgatacatgggccgggagccatagcctgagatatttcagcacagctgtgagtaggccaggccgaggagagccacggtacatcgccgtggagtatgtcgatgacacacaattcctgcggttcgactcagatgcagcaattccaagaatggagccccgggaaccgtgggtggagcaggaaggcccacaatattgggagtggaccaccggctacgcaaaggccaacgctcaaactgacagagttgctttaagaaacttgctcaggcgctacaatcagtccgaagccggatcccataccttacaggggatgaatggctgtgacatgggtccagatgggcgcctcttacgcgggtaccatcaacatgcgtacgacggcaaggattatatctctctgaacgaagatctccgctcctggactgcagctgatacagtggctcagataacccagcggttttatgaagctgaggagtatgccgaggagttcaggacttacctagagggcgagtgtcttgaactgctccgccggtatctcgagaacggcaaagagaccctacagagagccgagcaatctccacagcccacaattccaattgtgggcatcgttgccggcctggttgtcttaggagctgtcgttactggggccgtggtagctgctgttatgtggcgcaaaaaatcaagtgataggaatagaggctcatattcacaggcagcggtgtag

SEQ ID NO: 38813 - DNA, 396 bp, Artificial Sequence
  derived and/or modified sequence
atggcaccccgcagcctcttgctcttgctgtccggggcgctggccctgactgacacatgggctggcagtcactcgctccgatacttttcaacagctgtgtctagacccggccggggggagccacgatacattgccgttgaatacgtcgacgacactcagtttctccgcttcgacagcgatgcagctatccctcggatggagccccgagaaccttgggtggaacaggagggacctcagtattgggaatggaccacagggtacgctaaggccaatgcgcagaccgaccgggtggcactgaggaatttgctgcgcaggtataatcagagtgaggccggctcccatactctgcagggaatgaatggttgcgacatgggacctgatggcaggctcttgtag

SEQ ID NO: 38814 - DNA, 396 bp, Artificial Sequence
  derived and/or modified sequence
atggctccacggtctctgctgctgctcctgtctggcgccctcgctctgaccgacacttgggccggatcccactccctccggtacttctcaactgcagtgagccggccaggacggggtgagccacggtatatagccgttgaatacgtagacgacactcagttcttgcgctttgattccgatgcggccatcccaagaatggagccccgggagccatgggtggagcaggaggggccccagtactgggaatggaccactgggtatgcaaaagccaatgcccaaaccgatagagtggccctgcggaacctcctgagaagatacaaccagagcgaggccggatcccacacactacaaggcatgaacggttgtgacatgggacctgatggaagacttctgtag

SEQ ID NO: 38815 - DNA, 396 bp, Artificial Sequence
  derived and/or modified sequence
atggcccccagaagcttgctgttgctgttaagcggggccttagctttgaccgatacctgggccggatcccactcgttacgctacttctccaccgccgtgagtaggcccggtcgtggcgaaccacgctatattgccgtggagtatgtggacgatacccagttcctgaggtttgattctgacgcagccatacccagaatggaacctagagaaccgtgggttgagcaggaaggcccccagtattgggaatggacgactggctacgctaaagcaaatgcccaaactgacagagtcgctctgaggaacttactgcggcggtacaatcagtccgaggccggcagccataccctccaggggatgaacggctgcgacatgggtccagacggaaggcttctgtag

SEQ ID NO: 38816 - DNA, 765 bp, Artificial Sequence
  derived and/or modified sequence
atggccccccggtcgctgctcttactgctgagcggagccctagcactcaccgacacctgggcgggcagccactccctgagatatttctccacggccgtcagtagacccggacgcggggagcctcggtatatagctgttgagtacgtggacgacacacaattcttgaggtttgattctgatgctgcgatcccgcgtatggaacctagggaaccatgggtagagcaggagggaccgcagtattgggagtggacaaccgggtacgcgaaagccaacgcgcaaaccgatcgcgtcgccctgagaaatctgttacggaggtataatcaaagtgaagcagggtcccatacactccagggcatgaacggctgtgacatgggaccggatggcaggctgctcaggggttatcaccagcacgcttacgatgggaaggactacattagtttgaacgaggacctaagaagttggacagccgcagatactgttgcccagatcacgcaacggttctatgaggcagaggagtacgcggaggagttcaggacatacctggaaggcgagtgccttgagcttttgagacgttacttggagaacggcaaagagacactgcagcgtgccgaacagtccccgcaaccgacaattcctattgtaggcattgtggcaggtctagtggtgttaggagctgtagtcacaggtgcggttgtcgctgccgtgatgtggcgcaagaagagcagcgataggaaccgaggatcatattcccaggccgcagtctag

SEQ ID NO: 38817 - DNA, 396 bp, Artificial Sequence
  derived and/or modified sequence
atggctccaagatcattgctgctcctgctgagtggggcccttgcgcttaccgacacttgggcaggctcgcattcgctgagatattttagcacggcagtgtcacggcccggaagaggagagcccaggtacatagcggtggagtacgtggacgacacccaattcttgcgttttgatagcgacgccgccatcccccggatggaacctagagaaccctgggtagaacaggaggggccccagtactgggaatggacaacagggtacgctaaagctaatgcccaaacagaccgggtggcccttcgaaacttgttgcggcgttacaaccaaagtgaagcggggagtcacaccctgcaagggatgaacgggtgcgatatgggccctgacggtcgcttattatag

SEQ ID NO: 38818 - DNA, 765 bp, Artificial Sequence
  derived and/or modified sequence
atggcccctcggagcctcctgctgctcctttctggcgccctggctctcactgatacttgggcaggcagccacagtttgcggtactttagcaccgcagtctctcgccctgggagaggtgagcctaggtacatcgccgttgaatacgtggatgacacccagttccttcgatttgatagcgatgccgctatcccaagaatggaaccaagggagccatgggttgagcaggagggcccccagtattgggaatggactactgggtatgccaaagccaacgcgcagaccgatagggttgcactgagaaaccttcttcgaaggtacaatcagtcagaggcaggctcgcataccctccagggtatgaacggttgcgacatggggcctgatggaaggttactccggggataccatcagcatgcatacgatggaaaggattatatctctctgaacgaggatcttcggtcctggacagctgcagataccgtagcccagatcactcagcggttctatgaggcagaagaatatgccgaagagttccgtacctacttagagggcgaatgcctcgagctgttgagacgctatctggaaaatggaaaagaaacactgcagagagccgaacagagccctcaacctactatacctatcgtgggcatcgtggctgggctagtggtcttgggtgccgtggtgactggggctgtggtcgctgcagtgatgtggagaaaaaaaagcagcgatcgtaatcgtggttcatactcacaggccgccgtctag

SEQ ID NO: 38819 - DNA, 396 bp, Artificial Sequence
  derived and/or modified sequence
atggcgccgcgctctctgctgctgttactctctggcgccttagcgctgactgatacttgggccgggtcgcactcccttcgttactttagtacagccgtgtctaggccagggcggggcgagcctcggtatattgcagtagagtatgtcgacgacacccagttcctccggtttgatagcgacgctgctataccaaggatggagccaagagagccttgggttgaacaggagggtccccaatattgggaatggaccaccggttacgctaaggcgaatgcacagacagatagggtagccctccggaatcttttgagaaggtataaccaatctgaagccggttcccatactctacagggaatgaacgggtgcgatatggggcccgacgggagactgctgtag

SEQ ID NO: 38820 - DNA, 765 bp, Artificial Sequence
  derived and/or modified sequence
atggcaccgagaagtctcctgctgctattatctggcgcacttgccctgacggacacctgggcaggctcacacagcttgcgctatttcagcaccgcagtctcacgcccaggtcggggtgaacccagatatatcgcagttgagtacgtcgacgacacacagttccttcgattcgattccgacgcagctatcccccggatggagcccagagagccgtgggtcgagcaagagggaccccaatattgggaatggacaaccggctacgctaaagcaaacgctcagaccgacagggtggcgctgcggaacctgctgagaagatataatcagtccgaggccggctcacataccttacagggcatgaatggctgcgatatgggcccagacggtcggttactgagggggtatcaccaacatgcttatgacggtaaagactacattagtctcaacgaagacctgagaagttggactgcagccgatacagtggcacagattactcagcggttttacgaggctgaagagtacgccgaagagtttagaacatatctggagggagagtgtctggaactgcttaggagatacctcgagaatggtaaggaaacactccagcgagctgagcagtcccctcagcccaccatccccatagtagggatcgtagctgggcttgtcgtgttgggcgccgtcgtgactggagcagtggtggctgctgtaatgtggcgaaaaaagtccagcgacagaaaccgaggaagctacagccaggctgcagtgtag

SEQ ID NO: 38821 - DNA, 729 bp, Artificial Sequence
  derived and/or modified sequence
atggctccacggagtctcctgctgcttttgagcggtgccctagccctgaccgacacctgggccggtagtcacagcctgagatacttttcaaccgccgtgtcaaggcctggtcggggcgaacccaggtacatcgccgtggagtatgtggatgatacacagtttctgaggttcgactctgacgctgcgattccacggatggagcctagagagccttgggtggagcaggagggaccacagtactgggagtggaccaccggatacgctaaagcaaatgcacaaaccgaccgtgtggcactgcgcaacctcctaaggcgatacaaccaatcagaggcgggttcacatacgctccaggggatgaatggctgcgacatggggcccgacgggcgcctcctgcgaggctaccatcagcatgcgtatgatggcaaagattacataagcctgaacgaagatctacgttcctggaccgcggcagacactgtggcccaaataactcagcggttctacgaagctgaggaatacgcagaggaatttcgaacctatcttgagggcgagtgcctcgaactgctaaggagatatctcgaaaacggaaaagagaccctgcagagagccgaacagagccctcagcccaccattccaatcgttggaatagtcgccggactggtggtgctgggcgccgtggttacgggggcggtcgtagccgccgttatgtggcgaaagaaatcatcatag

SEQ ID NO: 38822 - DNA, 396 bp, Artificial Sequence
  derived and/or modified sequence
atggcccctagatcacttcttcttctgctttctggggcattggctctgacagacacatgggccggttcccactcactccgatacttctccaccgctgtttctcgcccgggacgcggcgagcctagatatattgcagtcgagtacgtcgatgatactcagttcttgcgttttgatagtgacgctgccatccctaggatggaacccagggaaccatgggttgaacaggagggacctcaatactgggaatggaccacaggatacgctaaggccaacgcccagaccgaccgggttgccctgcgtaatctcttacggcggtacaaccagagcgaggcagggtctcacaccttacaaggcatgaacggctgtgacatgggacccgatgggaggctcctctag

SEQ ID NO: 38823 - DNA, 396 bp, Artificial Sequence
  derived and/or modified sequence
atggcaccaaggtcactgctgctgctactgagtggcgcactggcattaaccgacacatgggcaggcagtcactcactgcgctattttagcacagccgtctctagacccggccggggagagccccgctacattgccgtagagtatgtggatgacacacaatttctccgtttcgactcagatgctgctatcccccggatggaaccgagggagccttgggtggaacaagaggggcctcaatactgggagtggacgacaggctacgcaaaagcgaacgcccagaccgatcgtgtcgcattgagaaatctccttcgacggtacaaccagtcagaagccgggtcccacacactccagggaatgaatggttgcgacatggggcccgatgggcggctgctgtag

SEQ ID NO: 38824 - DNA, 884 bp, Artificial Sequence
  derived and/or modified sequence
atggcgccccgaagcctcctcctgctgctctcaggggccctggccctgaccgatacttgggcgggctcccactccttgaggtatttcagcaccgctgtgtcgcggcccggccgcggggagccccgctacatcgccgtggagtacgtagacgacacgcaattcctgcggttcgacagcgacgccgcgattccgaggatggagccgcgggagccgtgggtggagcaagaggggccgcagtattgggagtggaccacagggtacgccaaggccaacgcacagactgaccgagtggccctgaggaacctgctccgccgctacaaccagagcgaggctgggtctcacaccctccagggaatgaatggctgcgacatggggcccgacggacgcctcctccgcgggtatcaccagcacgcgtacgacggcaaggattacatctccctgaacgaggacctgcgctcctggaccgcggcggacaccgtggctcagatcacccagcgcttctatgaggcagaggaatatgcagaggagttcaggacctacctggagggcgagtgcctggagttgctccgcagatacttggagaatgggaaggagacgctacagcgcgcagagcagtctccccagcccaccatccccatcgtgggcatcgttgctggccttgttgtccttggagctgtggtcactggagctgtggtcgctgctgtgatgtggaggaagaagagctcagatagaaacagagggagctactctcaggctgcagtgtgagacagcttccttgtgtgggactgagaagcaagatatcaatgtagcagaattgcacttgtgcctcacgaacatacataaattttaaaaataaagaataaaaatatatctttttatagata

SEQ ID NO: 38825 - DNA, 884 bp, Artificial Sequence
  derived and/or modified sequence
atggcgccccgaagcctcctcctgctgctctcaggggccctggccctgaccgatacttgggcaggctcccactccttgaggtatttcagcaccgctgtgtcgcggcccggccgcggggagccccgctacatcgccgtggagtacgtagacgacacgcaattcctgcggttcgacagcgacgccgcgattccgaggatggagccgcgggagccgtgggtggagcaagaggggccgcagtattgggagtggaccacagggtacgccaaggccaacgcacagactgaccgagtggccctgaggaacctgctccgccgctacaaccagagcgaggctgggtctcacaccctccagggaatgaatggctgcgacatggggcccgacggacgcctcctccgcgggtatcaccagcacgcgtacgacggcaaggattacatctccctgaacgaggacctgcgctcctggaccgcggcggacaccgtggctcagatcacccagcgcttctatgaggcagaggaatatgcagaggagttcaggacctacctggagggcgagtgcctggagttgctccgcagatacttggagaatgggaaggagacgctacagcgcgcagagcagtctccccagcccaccatccccatcgtgggcatcgttgctggccttgttgtccttggagctgtggtcactggagctgtggtcgctgctgtgatgtggaggaagaagagctcagatagaaacagagggagctactctcaggctgcagtgtgagacagcttccttgtgtgggactgagaagcaagatatcaatgtagcagaattgcacttgtgcctcacgaacatacataaattttaaaaataaagaataaaaatatatctttttatagata

SEQ ID NO: 38826 - DNA, 578 bp, Artificial Sequence
  derived and/or modified sequence
ttctctttctctcccaacccgtgtcaggtccttcttcctggatactcataacgcggccccatttctcactcccattgggcgtcgcgtttctagagaagccaatcagtgtcgccgcagttcccaggttctaaagtcccacgcaccccgcgggactcatatttttcccagacgcggaggttggggtcatggcgccccgaagcctcctcctgctgctctcaggggccctggccctgaccgatacttgggcgggctcccactccttgaggtatttcagcaccgctgtgtcgcggcccggccgcggggagccccgctacatcgccgtggagtacgtagacgacacgcaattcctgcggttcgacagcgacgccgcgattccgaggatggagccgcgggagccgtgggtggagcaagaggggccgcagtattgggagtggaccacagggtacgccaaggccaacgcacagactgaccgagtggccctgaggaacctgctccgccgctacaaccagagcgaggctgggtctcacaccctccagggaatgaatggctgcgacatggggcccgacggacgcctcctc

SEQ ID NO: 38827 - DNA, 578 bp, Artificial Sequence
  derived and/or modified sequence
ttctctttctctcccaacccgtgtcaggtccttcatcctggatactcataacgcggccccatttctcactcccattgggcgtcgcgtttctagagaagccaatcagtgtcgccgcagttcccaggttctaaagtcccacgcaccccgcgggactcatatttttcccagacgcggaggttggggtcatggcgccccgaagcctcctcctgctgctctcaggggccctggccctgaccgatacttgggcgggctcccactccttgaggtatttcagcaccgctgtgtcgcggcccggccgcggggagccccgctacatcgccgtggagtacgtagacgacacgcaattcctgcggttcgacagcgacgccgcgattccgaggatggagccgcgggagccgtgggtggagcaagaggggccgcagtattgggagtggaccacagggtacgccaaggccaacgcacagactgaccgagtggccctgaggaacctgctccgccgctacaaccagagcgaggctgggtctcacaccctccagggaatgaatggctgcgacatggggcccgacggacgcctcctc

SEQ ID NO: 38828 - DNA, 727 bp, Artificial Sequence
  derived and/or modified sequence
atggcgccccgaagcctcctcctgctgctctcaggggccctggccctgaccgatacttgggcgggctcccactccttgaggtatttcagcaccgctgtgtcgcggcccggccgcggggagccccgctacatcgccgtggagtacgtagacgacacgcaattcctgcggttcgacagcgacgccgcgattccgaggatggagccgcgggagccgtgggtggagcaagaggggccgcagtattgggagtggaccacagggtacgccaaggccaacgcacagactgaccgagtggccctgaggaacctgctccgccgctacaaccagagcgaggctgggtctcacaccctccagggaatgaatggctgcgacatggggcccgacggacgcctcctccgcgggtatcaccagcacgcgtacgacggcaaggattacatctccctgaacgaggacctgcgctcctggaccgcggcggacaccgtggctcagatcacccagcgcttctatgaggcagaggaatatgcagaggagttcaggacctacctggagggcgagtgcctggagttgctccgcagatacttggagaatgggaaggagacgctacagcgcgcagagcagtctccccagcccaccatccccatcgtgggcatcgttgctggccttgttgtccttggagctgtggtcactggagctgtggtcgctgctgtgatgtggaggaagaagagctcag

SEQ ID NO: 38829 - DNA, 578 bp, Artificial Sequence
  derived and/or modified sequence
ttctctttctctcccaacccgtgtcaggtccttcttcctggttactcataacgcggccccatttctcactcccattgggcgtcgggtttctagagaagccaatcagtgtcgccgcagttcccaggttctaaagtcccacgcaccccgcgggactcatatttttcccagacgcggaggttggggtcatggcgccccgaagcctcctcctgctgctctcaggggccctggccctgaccgatacttgggcaggctcccactccttgaggtatttcagcaccgctgtgtcgcggcccggccgcggggagccccgctacatcgccgtggagtacgtagacgacacgcaattcctgcggttcgacagcgacgccgcgattccgaggatggagccgcgggagccgtgggtggagcaagaggggccgcagtattgggagtggaccacagggtacgccaaggccaacgcacagactgaccgagtggccctgaggaacctgctccgccgctacaaccagagcgaggctgggtctcacaccctccagggaatgaatggctgcgacatggggcccgacggacgcctcctc

SEQ ID NO: 38830 - DNA, 765 bp, Artificial Sequence
  derived and/or modified sequence
atggcccccaggagcctgctgctgctgctgagcggggccctggccctgacagacacctgggccggcagccacagcctgcgctacttcagcacagctgtgtcccggcccggccgcggggagccccgctacatcgctgtggagtatgtggatgacacccagttcctgcgctttgacagtgatgctgccatccccaggatggagccccgggagccctgggtggagcaggagggcccccagtactgggagtggaccaccggctacgccaaggccaatgcccagacagacagagtggccctgaggaacctgctgcggcgctacaaccagagcgaggccggcagccacaccctgcagggcatgaatggctgtgacatgggcccagatggccgcctgctgcggggctaccaccagcacgcctatgatggcaaggactacatcagcctgaatgaagacctgcgctcctggacagctgctgacacagtggcccagatcacccagcgcttctatgaggccgaggagtatgcagaggagttccgcacctacctggagggggagtgcctggagctgctgcggcgctacctggagaatggcaaggagaccctgcagagagctgagcagagcccccagcccaccatccccatcgtgggcatcgtggccggcctggtggtgctgggcgctgtggtgactggagctgtggtggccgctgtgatgtggaggaagaagagcagtgacaggaacagaggcagctacagccaggccgctgtgtag

SEQ ID NO: 38831 - DNA, 396 bp, Artificial Sequence
  derived and/or modified sequence
atggcccccaggagcctgctgctgctgctgagcggggccctggccctgacagacacctgggccggcagccacagcctgcgctacttcagcacagctgtgtcccggcccggccgcggggagccccgctacatcgctgtggagtatgtggatgacacccagttcctgcgctttgacagtgatgctgccatccccaggatggagccccgggagccctgggtggagcaggagggcccccagtactgggagtggaccaccggctacgccaaggccaatgcccagacagacagagtggccctgaggaacctgctgcggcgctacaaccagagcgaggccggcagccacaccctgcagggcatgaatggctgtgacatgggcccagatggccgcctgctgtag

SEQ ID NO: 38832 - DNA, 729 bp, Artificial Sequence
  derived and/or modified sequence
atggcccccaggagcctgctgctgctgctgagcggggccctggccctgacagacacctgggccggcagccacagcctgcgctacttcagcacagctgtgtcccggcccggccgcggggagccccgctacatcgctgtggagtatgtggatgacacccagttcctgcgctttgacagtgatgctgccatccccaggatggagccccgggagccctgggtggagcaggagggcccccagtactgggagtggaccaccggctacgccaaggccaatgcccagacagacagagtggccctgaggaacctgctgcggcgctacaaccagagcgaggccggcagccacaccctgcagggcatgaatggctgtgacatgggcccagatggccgcctgctgcggggctaccaccagcacgcctatgatggcaaggactacatcagcctgaatgaagacctgcgctcctggacagctgctgacacagtggcccagatcacccagcgcttctatgaggccgaggagtatgcagaggagttccgcacctacctggagggggagtgcctggagctgctgcggcgctacctggagaatggcaaggagaccctgcagagagctgagcagagcccccagcccaccatccccatcgtgggcatcgtggccggcctggtggtgctgggcgctgtggtgactggagctgtggtggccgctgtgatgtggaggaagaagagcagctag

SEQ ID NO: 38833 - DNA, 765 bp, Artificial Sequence
  derived and/or modified sequence
atggccccccggagcctgctgctgctgctgagcggcgccctggccctgacggacacctgggccggctcccacagtctgcggtatttctccactgctgtgtctcgccccggacgaggcgaaccccgatatatcgccgtggaatatgtggacgatacgcagtttctccgtttcgatagcgatgctgccataccacggatggagcccagagagccatgggtagagcaggaaggcccccaatactgggaatggactaccggttacgccaaagccaatgcacagaccgatagggtagccttgcgcaacctgctcagaagatataaccagtctgaggctggctcccacactctgcaagggatgaatggctgcgatatggggccagacggcagattgctccgcggataccaccaacacgcatacgatggcaaggactatatctcactcaacgaggacctccgcagctggacggctgctgatacagtggcccaaattactcagcgcttttacgaggccgaggaatacgcagaggagtttaggacgtacctggaaggtgaatgtctggagttactgagaagatatctcgagaatggcaaggaaacactccagagagcagagcagtccccgcagccaaccattccgatcgtgggcattgttgcaggccttgtagtcctgggcgcagtggtgaccggtgcagtggtggctgcagtgatgtggagaaaaaagtcctctgaccggaatcgcggatcgtacagccaggctgcggtgtag

SEQ ID NO: 38834 - DNA, 765 bp, Artificial Sequence
  derived and/or modified sequence
atggccccccggagcctgctgctgctgctgagcggcgccctggccctgactgacacatgggctggatcacatagtctgcggtactttagcactgccgtatccagaccaggtagaggtgagcctcgttacatcgccgttgagtacgtggacgatactcagtttctccggtttgatagcgatgctgccattccacgaatggagccgcgtgagccgtgggtagagcaggagggacctcagtactgggaatggaccaccggctacgctaaggccaatgcccagacagaccgcgttgctttaagaaatctcctgcgacgctacaaccagtctgaggctggaagccacactttacagggcatgaacggttgtgacatgggacctgacggcaggttgcttcgcggctaccatcagcacgcttatgacgggaaagactatatatctctgaacgaggatctccgatcatggactgcggctgacaccgtggcgcaaatcacccagagattttatgaggccgaggaatatgcagaagagttcagaacctacctggaaggtgaatgcctcgagctgctgcgcagatacctggagaacggaaaggagaccttgcaaagggccgagcagtcacctcagcctactattccaatagtgggtattgtagcgggcttggtagtgctcggagctgtagtgacaggcgccgtcgtggctgcagtgatgtggaggaaaaaaagtagcgaccgcaaccgaggttcatattcgcaggctgcagtgtag

SEQ ID NO: 38835 - DNA, 765 bp, Artificial Sequence
  derived and/or modified sequence
atggccccccggagcctgctgctgctgctgagcggcgccctggccctgaccgacacgtgggccggtagccacagtctaagatacttcagcaccgctgttagtcgtcccgggcgcggcgagccaaggtacattgctgtggagtatgtcgatgatacacagtttttgagatttgattctgatgctgctattccacgtatggagccccgggaaccctgggtggagcaagagggtccacagtattgggaatggaccaccggttatgccaaagccaatgcacagactgaccgggttgcactgcgaaatctgctacggagatacaatcagtctgaggctggtagtcacacgctacaggggatgaatggctgtgacatgggtccagacgggagattgcttcggggttatcatcagcacgcatacgatggaaaagactacatcagtctcaatgaagatctgcggtcatggaccgccgctgacaccgtcgcgcaaatcacgcagagattttacgaagctgaggagtatgccgaagaattccgcacgtatcttgaaggcgaatgcctggagctccttcggcgctatctggaaaatggaaaggagacactgcagagagctgaacagtctccacagccaaccattcccatcgtcggtatcgttgctggcctcgtggtgctaggagccgtagtgaccggggccgtggtcgctgccgttatgtggcgtaaaaagagctccgacaggaaccgtggctcttactctcaggccgccgtgtag

SEQ ID NO: 38836 - DNA, 396 bp, Artificial Sequence
  derived and/or modified sequence
atggccccccggagcctgctgctgctgctgagcggcgccctggccctgactgatacgtgggctggtagtcattcccttcggtactttagcacagccgtgagcaggcctggtaggggtgaaccacgatacattgcagtggaatacgtcgatgatacccagtttctgagatttgactcagatgcggccatcccccgcatggagccaagagagccttgggtggagcaggaggggccccagtactgggaatggaccactgggtacgcaaaagcaaatgctcagaccgatcgtgttgctctacggaacttgcttcggagatacaaccagtccgaagcggggtcccatacactgcaagggatgaatggatgcgacatgggacctgatggcagactgctgtag

SEQ ID NO: 38837 - DNA, 396 bp, Artificial Sequence
  derived and/or modified sequence
atggccccccggagcctgctgctgctgctgagcggcgccctggccttaacagatacgtgggcgggctcccattcactcagatacttctcaacagcggtatccagacctggcaggggagagccacgctatatcgctgtggagtatgttgacgatacacagtttctgaggtttgattcggacgccgcaatcccgagaatggagccccgtgagccctgggtagagcaggagggtcctcagtactgggagtggacaactggatacgcaaaggccaatgcccaaacagacagagttgccctccgaaatctgctgcggaggtataatcagtccgaggcaggttctcatacattgcaaggaatgaacggttgcgacatgggtcccgacggcaggttgctttag

SEQ ID NO: 38838 - DNA, 396 bp, Artificial Sequence
  derived and/or modified sequence
atggccccccggagcctgctgctgctgctgagcggcgccctggccctaacagatacctgggcaggctcacatagcttgcgttattttagtacagccgtgagtcgcccaggccgcggggaacccaggtacatcgctgtggagtatgttgacgatacacagttcttaaggtttgacagtgatgctgctattcccaggatggagcctcgggaaccctgggtggaacaggagggcccccaatattgggagtggactacggggtacgccaaggctaacgcacagactgatcgggtggcattacgtaatctgctgcgcaggtataaccagtcagaagccggctcacacacactccaagggatgaacgggtgcgatatggggcctgatggccgactgctgtag

SEQ ID NO: 38839 - DNA, 765 bp, Artificial Sequence
  derived and/or modified sequence
atggccccccggagcctgctgctgctgctgagcggcgccctggccttaacggacacttgggccgggagccactcgttgcgctacttttcgacggccgtgagcaggcccggccgaggcgagcctaggtatatcgctgttgagtacgttgatgacacacagttcctgaggtttgattcggacgccgctatccctcgcatggaaccccgggaaccttgggtcgaacaggaagggccgcagtactgggaatggaccaccggttacgccaaggccaatgctcagacagatcgcgtcgcattacgaaatctgctgaggaggtacaatcagtcagaagctggatcgcacactctgcagggcatgaacggatgcgatatgggtccagatggccgactattaagaggctatcatcagcacgcctatgatggaaaagactatattagtttaaatgaagacctaagaagctggacagcggctgacaccgtggctcagatcacccaaagattctatgaagccgaagagtatgcggaagagttccgcacatatcttgaaggggagtgtctcgaactgctccgccgatatcttgagaacgggaaagaaacgctacagcgggccgagcaatctccccagccaaccatcccaatagtgggaattgtggccggactggttgttctgggcgcagtggtgacgggtgccgtggtggccgctgtgatgtggagaaagaaaagctccgacaggaaccggggatcttactcccaagcagccgtgtag

SEQ ID NO: 38840 - DNA, 396 bp, Artificial Sequence
  derived and/or modified sequence
atggccccccggagcctgctgctgctgctgagcggcgccctggccctgacggacacatgggccggcagccattccctgaggtacttctcaacagctgtatcacggcccggccgcggagagccccggtatatagccgtggaatacgtggatgacacgcagtttctgaggttcgatagtgatgccgctatcccgcgcatggaaccccgagaaccctgggtagaacaagagggccctcagtactgggagtggaccaccggttatgccaaagctaatgctcagacagatcgggtggccttgagaaatcttctaaggcgctataatcagagcgaagccggctcacacacattgcaaggcatgaatgggtgtgacatggggcccgacgggagactgctatag

SEQ ID NO: 38841 - DNA, 765 bp, Artificial Sequence
  derived and/or modified sequence
atggccccccggagcctgctgctgctgctgagcggcgccctggccctcactgacacctgggcaggttcacactccttgagatatttctctacggcggtgtcgcggccagggagaggcgagcctcggtatatcgccgtggaatacgttgatgacacccagttcttaagattcgatagcgatgccgccatccctcggatggaaccgagggagccctgggttgagcaggaaggccctcaatattgggaatggactactggatacgctaaggccaacgctcagaccgacagggtggctttacggaatctcctcaggaggtataatcaaagcgaggcaggcagccataccctgcagggaatgaacggctgcgacatgggaccagatggacggctacttaggggataccatcagcacgcttacgacgggaaagactatattagtcttaatgaagatctgcggtcttggacggcggctgatacggtggcacagatcactcagcggttttacgaagctgaagagtatgccgaggagtttcggacgtatctggaaggagagtgtctggaacttctgcggaggtacttagaaaacggcaaagagaccctccagagggcagagcaatcccctcagccaaccattccaattgtcgggattgtggccggcctcgtagtgcttggagctgtagtcacgggcgctgtagtcgccgccgtgatgtggcggaagaagtcttctgacagaaacaggggttcctacagtcaggctgcagtttag

SEQ ID NO: 38842 - DNA, 396 bp, Artificial Sequence
  derived and/or modified sequence
atggccccccggagcctgctgctgctgctgagcggcgccctggccctcaccgacacatgggccgggtctcattcgctgaggtacttttccaccgcagttagtagaccaggcagaggcgaaccccgttacatcgccgttgagtatgtggatgacacgcaatttctcagattcgattctgacgctgcgattcctaggatggaaccgagggagccttgggttgagcaagaaggtcctcagtattgggaatggacaactggttatgctaaggccaacgcccagacagacagagtggctcttcgcaatctactcagaagatataaccaatcggaagccggcagccacacactacaaggaatgaacggctgtgacatgggtcccgacgggagactcctgtag

SEQ ID NO: 38843 - DNA, 765 bp, Artificial Sequence
  derived and/or modified sequence
atggccccccggagcctgctgctgctgctgagcggcgccctggccttaaccgatacctgggctggcagccattctctgcgctatttttcaactgctgtgagccggcctggtcgcggtgagcccaggtatattgctgtggagtacgtcgacgatactcagttcctcagattcgacagtgacgcagctattccgcggatggaaccccgagagccttgggtcgagcaggagggcccccaatattgggagtggacaactggatatgccaaggctaatgcgcaaacggatcgagtcgcactcagaaatcttctcaggaggtacaatcagtccgaggctggctctcacaccctgcaaggcatgaacggatgcgacatgggcccggacggaaggctgcttcggggttatcaccaacacgcctacgatgggaaagactacatcagccttaatgaagatctacgatcctggaccgcagccgatacggtcgcccagataactcagagattttatgaagcagaagaatatgctgaggaattccgcacctaccttgagggagagtgcttggagctccttaggcggtaccttgagaacgggaaggagacactgcaacgtgcggagcaatctccgcaacccaccatcccgatcgtgggaattgtggcagggctcgtcgtactgggtgccgtggtaactggggcagtggtagcggcagtcatgtggaggaaaaaatcctctgacaggaacaggggaagttatagtcaggctgcagtctag

SEQ ID NO: 38844 - DNA, 729 bp, Artificial Sequence
  derived and/or modified sequence
atggccccccggagcctgctgctgctgctgagcggcgccctggccctcactgacacttgggccggcagccactctctccggtacttctctaccgccgtgtcacggcctggcagaggggaacctcgctacatagcagttgaatatgtggatgacactcaattcttaaggttcgatagtgacgcagccattcccaggatggagccaagagagccctgggttgaacaagaaggtccacagtattgggaatggaccacaggatacgccaaagccaacgctcaaacggacagggtggcccttcgcaacctcctccgccgatacaaccagagtgaggcgggatctcacaccctgcaaggtatgaacggttgtgacatgggtcccgatggcaggctcctgagggggtatcaccagcacgcatacgacgggaaagattacatttctctgaacgaggatctgcgaagttggacggctgcagacaccgtcgcacagatcacccagagattttacgaagccgaggaatatgcagaagagtttagaacctacctggagggggaatgcttggaattgctcagacgataccttgagaacgggaaggagaccttgcaaagggccgagcagagtcctcagccaaccattccaattgtaggcatcgtcgctggcctagtggtacttggcgccgtagtcacaggggcagtcgtcgccgcggtaatgtggaggaagaaatcctcctag

SEQ ID NO: 38845 - DNA, 396 bp, Artificial Sequence
  derived and/or modified sequence
atggccccccggagcctgctgctgctgctgagcggcgccctggcccttacagacacttgggcaggctctcactctctgagatatttttcaacagcagtgagccgcccaggaagaggagagccccgctatattgccgttgaatacgttgacgacacacagttccttaggtttgattccgacgccgccatcccccggatggaaccaagagagccgtgggtagaacaggaaggcccacaatactgggagtggactaccggatatgcaaaagcgaacgctcagactgaccgggtggccctgcggaacctgttacgcaggtacaaccagagcgaggctggcagtcacactcttcagggtatgaacgggtgcgacatggggcccgacggccgactactgtag

SEQ ID NO: 38846 - DNA, 396 bp, Artificial Sequence
  derived and/or modified sequence
atggccccccggagcctgctgctgctgctgagcggcgccctggccctgactgacacgtgggccggttctcacagccttcggtacttcagcaccgccgtgtctcggccgggcagaggtgagccccggtatattgcagtagagtatgttgatgatacacagtttcttcgcttcgactctgatgcggctattcctaggatggaacctcgagagccctgggtggaacaagaaggcccccagtattgggagtggacgacgggatacgccaaagccaatgcccagaccgatcgggttgcgttgagaaatctcctgaggcgctataaccagagtgaggcagggagtcacaccctccaggggatgaatggctgtgacatggggccggacggtcgccttttgtag

SEQ ID NO: 38847 - DNA, 765 bp, Artificial Sequence
  derived and/or modified sequence
atggcaccacgtagtctactgttattgctgtctggagccctcgctctgactgatacctgggctgggagccactctttacgatacttttccacggcagtttctaggcctggccgaggtgagcctcggtacattgctgtagagtatgttgatgatactcaattcctgcggttcgacagtgacgctgctatacccagaatggagccacgtgaaccatgggttgagcaggagggtccccagtattgggaatggacgacaggatacgccaaagccaatgcccagacagacagggttgctctgcgaaacttattgcgacggtataatcagagcgaagctggcagccatactctgcaaggaatgaatggttgtgatatgggtccagacggacgactgttgagaggttaccaccagcacgcttatgacgggaaggactatatctcccttaacgaggacttgcgttcttggaccgccgcagacacagtggctcaaattacacagcgcttttacgaagcggaggaatacgctgaggagttcagaacctacctggagggggagtgcctcgagttattacgtcgatacctggagaatggtaaagagacactgcagagggccgaacagagtccacaaccaacaattccaattgtgggcattgtcgcaggcctggtggtgcttggtgctgtggtgacgggtgccgtggttgctgccgttatgtggaggaagaagtcatccgaccgaaacagaggcagttactcacaggcggctgtatag

SEQ ID NO: 38848 - DNA, 765 bp, Artificial Sequence
  derived and/or modified sequence
atggctccgaggtccttacttctcctcttgtcgggggctcttgctctcactgatacctgggcagggagccattctcttcgatatttttctactgccgtgtcccggcctggcagaggcgaacccagatatatcgccgtcgaatatgtcgacgacacacaattccttcggttcgactctgatgccgcaatcccaagaatggaaccacgcgaaccttgggtggagcaagaaggacctcagtactgggaatggactactggttacgcgaaggcaaatgcccagaccgatcgggtggctcttagaaacctactccgcaggtacaaccagtcagaggctggcagccatacgctgcaaggaatgaatggatgcgatatggggccagacggccgactgctgcgcggttatcatcagcacgcctatgacgggaaagattacatctcactgaacgaggacctgcgcagctggacagccgctgacaccgtcgcacaaattacacaaagattctacgaggccgaagaatatgccgaggaattcagaacttatctcgagggggaatgcctcgaactcctgaggaggtatctcgagaacggtaaggagaccctgcagcgggctgaacagtctccccagcctaccatacctatcgtgggcattgtagctggactagtggttctcggcgcagtggtgacaggagctgtcgtcgccgcagtcatgtggaggaagaagtcctcagaccgcaacagaggatcctatagtcaggccgcagtgtag

SEQ ID NO: 38849 - DNA, 765 bp, Artificial Sequence
  derived and/or modified sequence
atggctcctcgctctctgctgttgcttctgagtggagccctggccctcacagatacttgggctgggagccactccctccggtacttttcaaccgctgttagtcggcctggcaggggtgagcctcgatatattgccgtggaatacgtggacgacacacaattcttacggttcgactctgacgccgcaatccctaggatggagccacgggaaccttgggtcgaacaggagggaccccagtactgggagtggacaacaggctatgctaaagctaatgcacagactgacagggtcgccctgcgaaacctcctacgacgctataaccaatctgaggcgggatcccacacactacaagggatgaatggctgcgacatgggccctgacggtcggctactccggggataccaccagcacgcctacgacgggaaggattacatttcactcaacgaagacctcaggagctggaccgccgctgacactgtagcccagattacgcagaggttttacgaggcagaagaatacgccgaggagttccggacatacttggagggagaatgtctggagttgctccggagatatctggagaatgggaaggaaactttacagagagcggaacagagccctcagcccacaatccccatcgttggaattgtggcaggcctcgttgtgctgggtgccgtggtgactggtgcagtggtggccgcagtgatgtggagaaaaaagtcctccgatcgtaaccgaggtagttacagccaggcggcagtctag

SEQ ID NO: 38850 - DNA, 396 bp, Artificial Sequence
  derived and/or modified sequence
atggctcctcggagtctgcttctgttgctgagtggcgctctggccctgacggatacctgggctgggagccactctctccgatatttctcaacagctgtgtcaaggcccggtcgcggagagcccagatacatcgctgtggaatatgtggatgatacacagttcctgcgcttcgactccgacgcagctatccctcgtatggaacccagagagccatgggtggagcaggaaggaccccaatactgggagtggactaccggctacgccaaggccaacgctcagaccgacagagtcgccctcaggaatcttctgcgcaggtacaatcaatccgaggcgggttctcacaccctccagggaatgaatggctgcgacatgggcccagacgggcgacttctgtag

SEQ ID NO: 38851 - DNA, 396 bp, Artificial Sequence
  derived and/or modified sequence
atggcccctcgcagcctgttgctccttcttagtggggcactggccttaaccgatacttgggctggatcccacagcctgcgctacttctccactgccgtgtcccggccaggcaggggggaaccacgttacatcgcagtcgagtatgtcgatgacacacagtttttgcgttttgactccgatgctgccattcctaggatggaaccgagggagccttgggtcgagcaggaaggacctcagtactgggagtggaccacaggctatgccaaggctaacgcccagaccgatagggtcgcattgagaaaccttctccggcgttacaatcaatcagaggcaggtagccatactctccagggtatgaacggttgcgacatggggccagatgggcgtctgctgtag

SEQ ID NO: 38852 - DNA, 396 bp, Artificial Sequence
  derived and/or modified sequence
atggcaccgaggagtctgctgctgctcttaagtggagcccttgccctaaccgacacatgggcagggtctcattctttacgctactttagtactgctgtaagtcgtcccggtcgaggggagcccagatatattgctgttgagtatgtggacgacactcagtttctccgattcgactccgacgccgctatcccacgcatggagcctcgcgaaccttgggtcgagcaggaaggcccacagtactgggaatggaccaccggatatgctaaagcaaatgcacagaccgaccgcgtggcccttaggaatctgctcagacggtacaatcagtccgaggctgggtcacacacactccagggcatgaacggctgcgatatgggaccggacgggcgacttctgtag

SEQ ID NO: 38853 - DNA, 765 bp, Artificial Sequence
  derived and/or modified sequence
atggcacctcggagtttacttctgttgctgtctggggcacttgcactcaccgacacttgggctgggtcacacagccttaggtactttagcacagcggtttcgcgaccaggcaggggggaaccacgctacattgctgttgagtacgtcgacgatacacagtttctgaggttcgactccgatgccgcaatacctagaatggaaccccgagagccatgggtggaacaggaaggtccccaatactgggagtggaccaccggctacgcaaaagcaaatgcccagactgatcgggtggccctccgcaatctccttcgccgatataaccaatccgaagccggtagtcataccctgcagggaatgaatggttgtgatatgggacccgacgggcgtttgttacgtggctatcaccagcatgcatatgatggaaaggattatatttcactgaacgaagacttgagatcgtggaccgcagccgatacggtcgcccagattacacagaggttctacgaagcagaggagtacgctgaagaattccgtacctatttagagggtgagtgcctggagctgctgcggcgttacttggagaacggaaaggagacactgcaaagggctgagcagtccccacaaccgacgattccaattgtggggatagtggcagggctggtagtgcttggcgctgttgttacaggcgctgttgtcgccgctgtgatgtggcggaagaaatccagcgatcgcaatcggggaagctattcccaagccgctgtttag

SEQ ID NO: 38854 - DNA, 396 bp, Artificial Sequence
  derived and/or modified sequence
atggcccctcggagtctgctgctcctgctcagcggcgctctggccctgacagatacttgggctggaagtcactccctgcggtatttttccacggctgtgtcaagacctggcagaggcgaaccccgttacatagccgtggaatacgttgacgacacccagttcctgaggtttgattcggatgccgcaatacctcgtatggagcctagagaaccttgggtggaacaagaggggcctcaatattgggagtggacgaccggctacgcgaaagccaacgcgcaaaccgatcgtgtggctcttagaaatttacttagacgatataatcaaagtgaggctggatctcatactctacaggggatgaacggctgcgatatggggcctgacgggaggctgctgtag

SEQ ID NO: 38855 - DNA, 765 bp, Artificial Sequence
  derived and/or modified sequence
atggcacccaggtccctcctgctcctactctcaggtgcgctcgcacttactgatacttgggccggatcacactccctgcggtacttttctacggcagtgagccgtccaggacggggagagccgcgatacatagccgtggagtacgtggatgacacacagttcctgcgctttgattcagacgcagccataccgcgtatggagccaagggagccctgggtggagcaggaaggcccacagtactgggagtggaccacagggtacgccaaagccaatgcgcaaactgacagggtggctcttcggaatctattacggcgttataaccaaagcgaggccggaagccataccctgcaaggcatgaacggatgtgacatggggccagacggacggttactgagagggtatcaccaacacgcttacgacggaaaagattatatatcactaaatgaggacttgcgatcctggacagctgccgatacagttgcacagattacccagcgattctacgaagcagaggaatatgccgaggagttccgaacatatctcgagggtgagtgcctggagcttcttaggcgctaccttgaaaacggtaaggaaacactccagagagcagagcagtctccccagcccactatacccatcgtgggaatagttgctggactcgtggtgctcggagccgtagtgaccggagctgttgtggccgcagtgatgtggagaaagaaaagttcagaccgaaatagaggttcttattcccaggccgctgtctag

SEQ ID NO: 38856 - DNA, 396 bp, Artificial Sequence
  derived and/or modified sequence
atggctccacgatcactactgcttcttctgagtggggcattagcgcttactgacacttgggcaggaagtcatagcctgaggtacttcagcactgccgtcagcagacccggaagaggagagccaagatacattgcagtggagtacgtggacgacacccagtttctcaggttcgactccgacgccgcaatcccaagaatggaacctcgggagccatgggtcgaacaggagggaccccagtactgggaatggaccacagggtacgccaaagctaatgcacagaccgacagggtggcactgaggaacctcctccgtcggtataatcagtcagaggccggttcccacacactgcagggtatgaacggctgtgacatggggccagatggccgactgctgtag

SEQ ID NO: 38857 - DNA, 765 bp, Artificial Sequence
  derived and/or modified sequence
atggcgccaagaagcctccttctccttctgtcgggagcgttagccttgacagacacatgggctggcagtcacagtcttcggtattttagtaccgctgtgtcaaggccaggaagaggagagcccaggtatatcgctgttgaatacgttgatgatacccagttcctccgttttgacagcgatgccgctatccccaggatggaacctcgggagccatgggtggagcaggagggaccccagtattgggaatggactaccggttacgccaaggccaacgctcagacagatcgtgttgccctccgtaacttgctgagacggtataaccagtcagaggccggatcccataccctgcaagggatgaatggatgcgatatgggccctgatgggaggctgctgagaggctatcaccagcacgcctacgacggaaaagactatatctcgctgaacgaggatttacggtcatggacagcagctgataccgtcgcccagatcacacagcggttctatgaagccgaggagtacgctgaagaattccgtacatacctagaaggagagtgcctggagctgttacgacggtacctcgaaaatggcaaagaaacacttcagagggcagagcaaagcccgcagcctaccatccccatcgttggaatcgttgccggtctggtggtgttgggggctgtggttacaggcgctgtcgttgctgccgtgatgtggaggaagaaatctagtgatcggaataggggaagctattcacaggctgcagtgtag

SEQ ID NO: 38858 - DNA, 729 bp, Artificial Sequence
  derived and/or modified sequence
atggccccacggtctctgctgttgcttttgtccggagcactggccctgaccgatacttgggctggctctcattccctgcgatacttcagcacggcagtgtcaaggcctggtcgcggagaacccaggtatattgccgtggagtacgtggacgacacgcagttcctccgttttgacagcgacgcagctatcccacggatggagcccagggagccttgggtcgagcaagagggtccccagtactgggaatggaccacggggtatgcaaaggctaacgctcaaacggaccgtgtggcgctgcggaatctgctgcgccgatataaccagtcggaagccggaagccatacactccaggggatgaacgggtgcgatatgggacctgatggacggcttctgcggggttatcatcagcatgcttatgacgggaaagactacatttcactgaacgaggacttgcggagctggaccgccgctgataccgttgcgcagatcactcaacggttttacgaagccgaggagtatgccgaggagttccggacctacctggagggtgagtgcctggagttactcagacgatacttggagaatggcaaggagaccctccaacgggcagagcaaagtccccagccgactatccctattgtcggtatcgtggcgggactggtggtcctgggcgctgttgtcaccggtgctgtcgttgccgctgtgatgtggcgtaagaaatcaagttag

SEQ ID NO: 38859 - DNA, 396 bp, Artificial Sequence
  derived and/or modified sequence
atggccccacggtcactgctactccttctgagtggagctctcgcactcacagacacttgggctggcagtcacagtctgaggtactttagtactgcagtttcacgaccaggaaggggcgagccccgatacatcgccgtggagtacgttgacgatacacagttcctacgattcgactcagatgccgctattccacggatggagccacgcgagccctgggtggaacaagaggggcctcagtattgggaatggacaacaggctacgccaaagcaaatgctcagaccgatcgagtagcacttagaaacctgctaagacggtacaatcaatcggaagctggctcacatactctgcagggcatgaatggctgtgacatgggacctgatggcaggctcctttag

SEQ ID NO: 38860 - DNA, 396 bp, Artificial Sequence
  derived and/or modified sequence
atggccccaagaagtcttctgctcttattgtctggcgctttggcccttacagatacctgggccggttcccacagtctgagatattttagcaccgcggtttcaagaccgggacgtggcgagccacgttacatcgccgtggagtatgtggatgacacacagtttctacggttcgattccgacgcagctatcccccgtatggaaccacgcgaaccatgggtggagcaagagggtccacagtactgggagtggaccacaggatacgccaaggccaatgcccaaacggaccgagttgccttaagaaacttgcttcggcgatataaccagtcagaagccggttctcatacgctacaggggatgaatggatgtgacatgggcccagacggccgtctgttatag

SEQ ID NO: 38861 - DNA, 1025 bp, Artificial Sequence
  derived and/or modified sequence
tttctcactcccattgggcgtcgcgtttctagagaagccaatcagtgtcgccgcagttcccaggttctaaagtcccacgcaccccgcgggactcatatttttcccagacgcggaggttggggtcatggcgccccgaagcctcctcctgctgctctcaggggccctggccctgaccgatacttgggcgggctcccactccttgaggtatttcagcaccgctgtgtcgcggcccggccgcggggagccccgctacatcgccgtggagtacgtagacgacacgcaattcctgcggttcgacagcgacgccgcgattccgaggatggagccgcgggagccgtgggtggagcaagaggggccgcagtattgggagtggaccacagggtacgccaaggccaacgcacagactgaccgagtggccctgaggaacctgctccgccgctacaaccagagcgaggctgggtctcacaccctccagggaatgaatggctgcgacatggggcccgacggacgcctcctccgcgggtatcaccagcacgcgtacgacggcaaggattacatctccctgaacgaggacctgcgctcctggaccgcggcggacaccgtggctcagatcacccagcgcttctatgaggcagaggaatatgcagaggagttcaggacctacctggagggcgagtgcctggagttgctccgcagatacttggagaatgggaaggagacgctacagcgcgcagagcagtctccccagcccaccatccccatcgtgggcatcgttgctggccttgttgtccttggagctgtggtcactggagctgtggtcgctgctgtgatgtggaggaagaagagctcagatagaaacagagggagctactctcaggctgcagtgtgagacagcttccttgtgtgggactgagaagcaagatatcaatgtagcagaattgcacttgtgcctcacgaacatacataaattttaaaaataaagaataaaaatatatctttttatagataaaaaaaaaaaaaaaaaa

SEQ ID NO: 38862 - protein, 442 aa, Artificial Sequence
  derived and/or modified sequence
MAPRSLLLLLSGALALTDTWAGSHSLRYFSTAVSRPGRGEPRYIAVEYVDDTQFLRFDSDAAIPRMEPREPWVEQEGPQYWEWTTGYAKANAQTDRVALRNLLRRYNQSEAGSHTLQGMNGCDMGPDGRLLRGYHQHAYDGKDYISLNEDLRSWTAADTVAQITQRFYEAEEYAEEFRTYLEGECLELLRRYLENGKETLQRADPPKAHVAHHPISDHEATLRCWALGFYPAEITLTWQRDGEEQTQDTELVETRPAGDGTFQKWAAVVVPPGEEQRYTCHVQHEGLPQPLILRWEQSPQPTIPIVGIVAGLVVLGAVVTGAVVAAVMWRKKSSDRNRGSYSQAAAYSVVSGNLMITWWSSLFLLGVLFQGYLGCLRSHSVLGRRKVGDMWILFFLWLWTSFNTAFLALQSLRFGFGFRRGRSFLLRSWHHLMKRVQIKIFD

SEQ ID NO: 38863 - protein, 442 aa, Artificial Sequence
  derived and/or modified sequence
MAPRSLLLLLSGALALTDTWAGSHSLRYFSTAVSRPGRGEPRYIAVEYVDDTQFLRFDSDAAIPRMEPREPWVEQEGPQYWEWTTGYAKANAQTDRVALRNLLRRYNQSEAGSHTLQGMNGCDMGPDGRLLRGYHQHAYDGKDYISLNEDLRSWTAADTVAQITQRFYEAEEYAEEFRTYLEGECLELLRRYLENGKETLQRADPPKAHVAHHPISDHEATLRCWALGFYPAEITLTWQRDGEEQTQDTELVETRPAGDGTFQKWAAVVVPSGEEQRYTCHVQHEGLPQPLILRWEQSPQPTIPIVGIVAGLVVLGAVVTGAVVAAVMWRKKSSDRNRGSYSQAAAYSVVSGNLMITWWSSLFLLGVLFQGYLGCLRSHSVLGRRKVGDMWILFFLWLWTSFNTAFLALQSLRFGFGFRRGRSFLLRSWHHLMKRVQIKIFD

SEQ ID NO: 38864 - protein, 349 aa, Artificial Sequence
  derived and/or modified sequence
MAPRSLLLLLSGALALTDTWAGSHSLRYFSTAVSRPGRGEPRYIAVEYVDDTQFLRFDSDAAIPRMEPREPWVEQEGPQYWEWTTGYAKANAQTDRVALRNLLRRYLENGKETLQRADPPKAHVAHHPISDHEATLRCWALGFYPAEITLTWQRDGEEQTQDTELVETRPAGDGTFQKWAAVVVPPGEEQRYTCHVQHEGLPQPLILRWEQSPQPTIPIVGIVAGLVVLGAVVTGAVVAAVMWRKKSSDRNRGSYSQAAAYSVVSGNLMITWWSSLFLLGVLFQGYLGCLRSHSVLGRRKAQLLSVSTSQTSILIQEQFSHQRTLAMSGKMFCCHDWSEEEVLPASCGE

SEQ ID NO: 38865 - protein, 124 aa, Artificial Sequence
  derived and/or modified sequence
  misc_feature (1)..(1): Xaa can be any naturally occurring amino acid
XAVMWRKKSSGHFLPIDRNRGSYSQAAAYSVVSGNLMITWWSSLFLLGVLFQGYLGCLRSHSVLGRRKVGDMWILFFLWLWTSFNTAFLALQSLRFGFGFRRGRSFLLRSWHHLMKRVQIKIFD

SEQ ID NO: 38866 - protein, 442 aa, Artificial Sequence
  derived and/or modified sequence
MAPRSLLLLLSGALALTDTWAGSHSLRYFSTAVSRPGRGEPRYIAVEYVDDTQFLRFDSDAAIPRMEPREPWVEQEGPQYWEWTTGYAKANAQTDRVALRNLLRRYNQSEAGSHTLQGMNGCDMGPDGRLLRGYHQHAYDGKDYISLNEDLRSWTAADTVAQITQRFYEAEEYAEEFRTYLEGECLELLRRYLENGKETLQRADPPKAHVAHHPISDHEATLRCWALGFYPAEITLTWQRDGEEQTQDTELVETRPAGDGTFQKWAAVVVPSGEEQRYTCHVQHEGLPQPLILRWEQSPQPTIPIVGIVAGLVVLGAVVTGAVVAAVMWRKKSSDRNRGSYSQAAAYSVVSGLLMITWWSSLFLLGVLFQGYLGCLRSHSVLGRRKVGDMWILFFLWLWTSFNTAFLALQSLRFGFGFRRGRSFLLRSWHHLMKRVQIKIFD

SEQ ID NO: 38867 - protein, 259 aa, Artificial Sequence
  derived and/or modified sequence
MNGCDMGPDGRLLRGYHQHAYDGKDYISLNEDLRSWTAADTVAQITQRFYEAEEYAEEFRTYLEGECLELLRRYLENGKETLQRADPPKAHVAHHPISDHEATLRCWALGFYPAEITLTWQRDGEEQTQDTELVETRPAGDGTFQKWAAVVVPPGEEQRYTCHVQHEGLPQPLILRWEQSPQPTIPIVGIVAGLVVLGAVVTGAVVAAVMWRKKSSAYSVVSGNLMITWWSSLFLLGVLFQGYLGCLRSHSVLGRRKHF

SEQ ID NO: 38868 - protein, 124 aa, Artificial Sequence
  derived and/or modified sequence
  misc_feature (1)..(1): Xaa can be any naturally occurring amino acid
XAVMWRKKSSGHFLPIDRNRGSYSQAAAYSVVSGLLMITWWSSLFLLGVLFQGYLGCLRSHSVLGRRKVGDMWILFFLWLWTSFNTAFLALQSLRFGFGFRRGRSFLLRSWHHLMKRVQIKIFD

SEQ ID NO: 38869 - protein, 419 aa, Artificial Sequence
  derived and/or modified sequence
MAPRSLLLLLSGALALTDTWAGSHSLRYFSTAVSRPGRGEPRYIAVEPWVEQEGPQYWEWTTGYAKANAQTDRVALRNLLRRYNQSEAGSHTLQGMNGCDMGPDGRLLRGYHQHAYDGKDYISLNEDLRSWTAADTVAQITQRFYEAEEYAEEFRTYLEGECLELLRRYLENGKETLQRADPPKAHVAHHPISDHEATLRCWALGFYPAEITLTWQRDGEEQTQDTELVETRPAGDGTFQKWAAVVVPPGEEQRYTCHVQHEGLPQPLILRWEQSPQPTIPIVGIVAGLVVLGAVVTGAVVAAVMWRKKSSDRNRGSYSQAAAYSVVSGNLMITWWSSLFLLGVLFQGYLGCLRSHSVLGRRKVGDMWILFFLWLWTSFNTAFLALQSLRFGFGFRRGRSFLLRSWHHLMKRVQIKIFD

SEQ ID NO: 38870 - protein, 259 aa, Artificial Sequence [sequence omitted]

SEQ ID NO: 38871 - protein, 349 aa, Artificial Sequence
  derived and/or modified sequence
MAPRSLLLLLSGALALTDTWAGSHSLRYFSTAVSRPGRGEPRYIAVEYVDDTQFLRFDSDAAIPRMEPREPWVEQEGPQYWEWTTGYAKANAQTDRVALRNLLRRYLENGKETLQRADPPKAHVAHHPISDHEATLRCWALGFYPAEITLTWQRDGEEQTQDTELVETRPAGDGTFQKWAAVVVPSGEEQRYTCHVQHEGLPQPLILRWEQSPQPTIPIVGIVAGLVVLGAVVTGAVVAAVMWRKKSSDRNRGSYSQAAAYSVVSGNLMITWWSSLFLLGVLFQGYLGCLRSHSVLGRRKAQLLSVSTSQTSILIQEQFSHQRTLAMSGKMFCCHDWSEEKVLPASCGE

SEQ ID NO: 38872 - protein, 419 aa, Artificial Sequence
  derived and/or modified sequence
MAPRSLLLLLSGALALTDTWAGSHSLRYFSTAVSRPGRGEPRYIAVEPWVEQEGPQYWEWTTGYAKANAQTDRVALRNLLRRYNQSEAGSHTLQGMNGCDMGPDGRLLRGYHQHAYDGKDYISLNEDLRSWTAADTVAQITQRFYEAEEYAEEFRTYLEGECLELLRRYLENGKETLQRADPPKAHVAHHPISDHEATLRCWALGFYPAEITLTWQRDGEEQTQDTELVETRPAGDGTFQKWAAVVVPSGEEQRYTCHVQHEGLPQPLILRWEQSPQPTIPIVGIVAGLVVLGAVVTGAVVAAVMWRKKSSDRNRGSYSQAAAYSVVSGNLMITWWSSLFLLGVLFQGYLGCLRSHSVLGRRKVGDMWILFFLWLWTSFNTAFLALQSLRFGFGFRRGRSFLLRSWHHLMKRVQIKIFD

SEQ ID NO: 38873 - protein, 259 aa, Artificial Sequence
  derived and/or modified sequence
MNGCDMGPDGRLLRGYHQHAYDGKDYISLNEDLRSWTAADTVAQITQRFYEAEEYAEEFRTYLEGECLELLRRYLENGKETLQRADPPKAHVAHHPISDHEATLRCWALGFYPAEITLTWQRDGEEQTQDTELVETRPAGDGTFQKWAAVVVPSGEEQRYTCHVQHEGLPQPLILRWEQSPQPTIPIVGIVAGLVVLGAVVTGAVVAAVMWRKKSSAYSVVSGNLMITWWSSLFLLGVLFQGYLGCLRSHSVLGRRKHF

SEQ ID NO: 38874 - protein, 435 aa, Artificial Sequence
  derived and/or modified sequence
MAPRSLLLLLSGALALTDTWAGSHSLRYFSTAVSRPGRGEPRYIAVEYVDDTQFLRFDSDAAIPRMEPREPWVEQEGPQYWEWTTGYAKANAQTDRVALRNLLRRYNQSEAGSHTLQGMNGCDMGPDGRLLRGYHQHAYDGKDYISLNEDLRSWTAADTVAQITQRFYEAEEYAEEFRTYLEGECLELLRRYLENGKETLQRADPPKAHVAHHPISDHEATLRCWALGFYPAEITLTWQRDGEEQTQDTELVETRPAGDGTFQKWAAVVVPSGEEQRYTCHVQHEGLPQPLILRWEQSPQPTIPIVGIVAGLVVLGAVVTGAVVAAVMWRKKSSDRNRGSYSQAAAYSVVSGLLMITWWSSLFLLGVLFQGYLGCLRSHSVLGRRKAQLLSVSTSQTSILIQEQFSHQRTLAMSGKMFCCHDWSEEEVLPASCGE

SEQ ID NO: 38875 - protein, 349 aa, Artificial Sequence
  derived and/or modified sequence
MAPRSLLLLLSGALALTDTWAGSHSLRYFSTAVSRPGRGEPRYIAVEYVDDTQFLRFDSDAAIPRMEPREPWVEQEGPQYWEWTTGYAKANAQTDRVALRNLLRRYLENGKETLQRADPPKAHVAHHPISDHEATLRCWALGFYPAEITLTWQRDGEEQTQDTELVETRPAGDGTFQKWAAVVVPSGEEQRYTCHVQHEGLPQPLILRWEQSPQPTIPIVGIVAGLVVLGAVVTGAVVAAVMWRKKSSDRNRGSYSQAAAYSVVSGNLMITWWSSLFLLGVLFQGYLGCLRSHSVLGRRKAQLLSVSTSQTSILIQEQFSHQRTLAMSGKMFCCHDWSEEEVLPASCGE

SEQ ID NO: 38876 - protein, 419 aa, Artificial Sequence
  derived and/or modified sequence
MAPRSLLLLLSGALALTDTWAGSHSLRYFSTAVSRPGRGEPRYIAVEPWVEQEGPQYWEWTTGYAKANAQTDRVALRNLLRRYNQSEAGSHTLQGMNGCDMGPDGRLLRGYHQHAYDGKDYISLNEDLRSWTAADTVAQITQRFYEAEEYAEEFRTYLEGECLELLRRYLENGKETLQRADPPKAHVAHHPISDHEATLRCWALGFYPAEITLTWQRDGEEQTQDTELVETRPAGDGTFQKWAAVVVPSGEEQRYTCHVQHEGLPQPLILRWEQSPQPTIPIVGIVAGLVVLGAVVTGAVVAAVMWRKKSSDRNRGSYSQAAAYSVVSGLLMITWWSSLFLLGVLFQGYLGCLRSHSVLGRRKVGDMWILFFLWLWTSFNTAFLALQSLRFGFGFRRGRSFLLRSWHHLMKRVQIKIFD

SEQ ID NO: 38877 - DNA, 1329 bp, Artificial Sequence
  derived and/or modified sequence
atggcccccagaagcctgctgctgctgctgagcggcgccctggccctgaccgacacctgggccggcagccacagcctgagatacttcagcaccgccgtgagcagacccggcagaggcgagcccagatacatcgccgtggagtacgtggacgacacccagttcctgagattcgacagcgacgccgccatccccagaatggagcccagagagccctgggtggagcaggagggcccccagtactgggagtggaccaccggctacgccaaggccaacgcccagaccgacagagtggccctgagaaacctgctgagaagatacaaccagagcgaggccggcagccacaccctgcagggcatgaacggctgcgacatgggccccgacggcagactgctgagaggctaccaccagcacgcctacgacggcaaggactacatcagcctgaacgaggacctgagaagctggaccgccgccgacaccgtggcccagatcacccagagattctacgaggccgaggagtacgccgaggagttcagaacctacctggagggcgagtgcctggagctgctgagaagatacctggagaacggcaaggagaccctgcagagagccgacccccccaaggcccacgtggcccaccaccccatcagcgaccacgaggccaccctgagatgctgggccctgggcttctaccccgccgagatcaccctgacctggcagagagacggcgaggagcagacccaggacaccgagctggtggagaccagacccgccggcgacggcaccttccagaagtgggccgccgtggtggtgccccccggcgaggagcagagatacacctgccacgtgcagcacgagggcctgccccagcccctgatcctgagatgggagcagagcccccagcccaccatccccatcgtgggcatcgtggccggcctggtggtgctgggcgccgtggtgaccggcgccgtggtggccgccgtgatgtggagaaagaagagcagcgacagaaacagaggcagctacagccaggccgccgcctacagcgtggtgagcggcaacctgatgatcacctggtggagcagcctgttcctgctgggcgtgctgttccagggctacctgggctgcctgagaagccacagcgtgctgggcagaagaaaggtgggcgacatgtggatcctgttcttcctgtggctgtggaccagcttcaacaccgccttcctggccctgcagagcctgagattcggcttcggcttcagaagaggcagaagcttcctgctgagaagctggcaccacctgatgaagagagtgcagatcaagatcttcgactag

SEQ ID NO: 38878 - DNA, 1329 bp, Artificial Sequence
  derived and/or modified sequence
atggcccccagaagcctgctgctgctgctgagcggcgccctggccctgaccgacacctgggccggcagccacagcctgagatacttcagcaccgccgtgagcagacccggcagaggcgagcccagatacatcgccgtggagtacgtggacgacacccagttcctgagattcgacagcgacgccgccatccccagaatggagcccagagagccctgggtggagcaggagggcccccagtactgggagtggaccaccggctacgccaaggccaacgcccagaccgacagagtggccctgagaaacctgctgagaagatacaaccagagcgaggccggcagccacaccctgcagggcatgaacggctgcgacatgggccccgacggcagactgctgagaggctaccaccagcacgcctacgacggcaaggactacatcagcctgaacgaggacctgagaagctggaccgccgccgacaccgtggcccagatcacccagagattctacgaggccgaggagtacgccgaggagttcagaacctacctggagggcgagtgcctggagctgctgagaagatacctggagaacggcaaggagaccctgcagagagccgacccccccaaggcccacgtggcccaccaccccatcagcgaccacgaggccaccctgagatgctgggccctgggcttctaccccgccgagatcaccctgacctggcagagagacggcgaggagcagacccaggacaccgagctggtggagaccagacccgccggcgacggcaccttccagaagtgggccgccgtggtggtgcccagcggcgaggagcagagatacacctgccacgtgcagcacgagggcctgccccagcccctgatcctgagatgggagcagagcccccagcccaccatccccatcgtgggcatcgtggccggcctggtggtgctgggcgccgtggtgaccggcgccgtggtggccgccgtgatgtggagaaagaagagcagcgacagaaacagaggcagctacagccaggccgccgcctacagcgtggtgagcggcaacctgatgatcacctggtggagcagcctgttcctgctgggcgtgctgttccagggctacctgggctgcctgagaagccacagcgtgctgggcagaagaaaggtgggcgacatgtggatcctgttcttcctgtggctgtggaccagcttcaacaccgccttcctggccctgcagagcctgagattcggcttcggcttcagaagaggcagaagcttcctgctgagaagctggcaccacctgatgaagagagtgcagatcaagatcttcgactag

SEQ ID NO: 38879 - DNA, 375 bp, Artificial Sequence
  derived and/or modified sequence
tgagccgtgatgtggagaaagaagagcagcggccacttcctgcccatcgacagaaacagaggcagctacagccaggccgccgcctacagcgtggtgagcggcaacctgatgatcacctggtggagcagcctgttcctgctgggcgtgctgttccagggctacctgggctgcctgagaagccacagcgtgctgggcagaagaaaggtgggcgacatgtggatcctgttcttcctgtggctgtggaccagcttcaacaccgccttcctggccctgcagagcctgagattcggcttcggcttcagaagaggcagaagcttcctgctgagaagctggcaccacctgatgaagagagtgcagatcaagatcttcgactag

SEQ ID NO: 38880 - DNA, 1329 bp, Artificial Sequence
  derived and/or modified sequence
atggcccccagaagcctgctgctgctgctgagcggcgccctggccctgaccgacacctgggccggcagccacagcctgagatacttcagcaccgccgtgagcagacccggcagaggcgagcccagatacatcgccgtggagtacgtggacgacacccagttcctgagattcgacagcgacgccgccatccccagaatggagcccagagagccctgggtggagcaggagggcccccagtactgggagtggaccaccggctacgccaaggccaacgcccagaccgacagagtggccctgagaaacctgctgagaagatacaaccagagcgaggccggcagccacaccctgcagggcatgaacggctgcgacatgggccccgacggcagactgctgagaggctaccaccagcacgcctacgacggcaaggactacatcagcctgaacgaggacctgagaagctggaccgccgccgacaccgtggcccagatcacccagagattctacgaggccgaggagtacgccgaggagttcagaacctacctggagggcgagtgcctggagctgctgagaagatacctggagaacggcaaggagaccctgcagagagccgacccccccaaggcccacgtggcccaccaccccatcagcgaccacgaggccaccctgagatgctgggccctgggcttctaccccgccgagatcaccctgacctggcagagagacggcgaggagcagacccaggacaccgagctggtggagaccagacccgccggcgacggcaccttccagaagtgggccgccgtggtggtgcccagcggcgaggagcagagatacacctgccacgtgcagcacgagggcctgccccagcccctgatcctgagatgggagcagagcccccagcccaccatccccatcgtgggcatcgtggccggcctggtggtgctgggcgccgtggtgaccggcgccgtggtggccgccgtgatgtggagaaagaagagcagcgacagaaacagaggcagctacagccaggccgccgcctacagcgtggtgagcggcctgctgatgatcacctggtggagcagcctgttcctgctgggcgtgctgttccagggctacctgggctgcctgagaagccacagcgtgctgggcagaagaaaggtgggcgacatgtggatcctgttcttcctgtggctgtggaccagcttcaacaccgccttcctggccctgcagagcctgagattcggcttcggcttcagaagaggcagaagcttcctgctgagaagctggcaccacctgatgaagagagtgcagatcaagatcttcgactag

SEQ ID NO: 38881 - DNA, 33 bp, Artificial Sequence
  derived and/or modified sequence
tgagccgtgatgtggagaaagaagagcagctag

SEQ ID NO: 38882 - DNA, 780 bp, Artificial Sequence
  derived and/or modified sequence
atgaacggctgcgacatgggccccgacggcagactgctgagaggctaccaccagcacgcctacgacggcaaggactacatcagcctgaacgaggacctgagaagctggaccgccgccgacaccgtggcccagatcacccagagattctacgaggccgaggagtacgccgaggagttcagaacctacctggagggcgagtgcctggagctgctgagaagatacctggagaacggcaaggagaccctgcagagagccgacccccccaaggcccacgtggcccaccaccccatcagcgaccacgaggccaccctgagatgctgggccctgggcttctaccccgccgagatcaccctgacctggcagagagacggcgaggagcagacccaggacaccgagctggtggagaccagacccgccggcgacggcaccttccagaagtgggccgccgtggtggtgccccccggcgaggagcagagatacacctgccacgtgcagcacgagggcctgccccagcccctgatcctgagatgggagcagagcccccagcccaccatccccatcgtgggcatcgtggccggcctggtggtgctgggcgccgtggtgaccggcgccgtggtggccgccgtgatgtggagaaagaagagcagcgcctacagcgtggtgagcggcaacctgatgatcacctggtggagcagcctgttcctgctgggcgtgctgttccagggctacctgggctgcctgagaagccacagcgtgctgggcagaagaaagcacttctag

SEQ ID NO: 38883 - DNA, 375 bp, Artificial Sequence
  derived and/or modified sequence
tgagccgtgatgtggagaaagaagagcagcggccacttcctgcccatcgacagaaacagaggcagctacagccaggccgccgcctacagcgtggtgagcggcctgctgatgatcacctggtggagcagcctgttcctgctgggcgtgctgttccagggctacctgggctgcctgagaagccacagcgtgctgggcagaagaaaggtgggcgacatgtggatcctgttcttcctgtggctgtggaccagcttcaacaccgccttcctggccctgcagagcctgagattcggcttcggcttcagaagaggcagaagcttcctgctgagaagctggcaccacctgatgaagagagtgcagatcaagatcttcgactag

SEQ ID NO: 38884 - DNA, 1260 bp, Artificial Sequence
  derived and/or modified sequence
atggcccccagaagcctgctgctgctgctgagcggcgccctggccctgaccgacacctgggccggcagccacagcctgagatacttcagcaccgccgtgagcagacccggcagaggcgagcccagatacatcgccgtggagccctgggtggagcaggagggcccccagtactgggagtggaccaccggctacgccaaggccaacgcccagaccgacagagtggccctgagaaacctgctgagaagatacaaccagagcgaggccggcagccacaccctgcagggcatgaacggctgcgacatgggccccgacggcagactgctgagaggctaccaccagcacgcctacgacggcaaggactacatcagcctgaacgaggacctgagaagctggaccgccgccgacaccgtggcccagatcacccagagattctacgaggccgaggagtacgccgaggagttcagaacctacctggagggcgagtgcctggagctgctgagaagatacctggagaacggcaaggagaccctgcagagagccgacccccccaaggcccacgtggcccaccaccccatcagcgaccacgaggccaccctgagatgctgggccctgggcttctaccccgccgagatcaccctgacctggcagagagacggcgaggagcagacccaggacaccgagctggtggagaccagacccgccggcgacggcaccttccagaagtgggccgccgtggtggtgccccccggcgaggagcagagatacacctgccacgtgcagcacgagggcctgccccagcccctgatcctgagatgggagcagagcccccagcccaccatccccatcgtgggcatcgtggccggcctggtggtgctgggcgccgtggtgaccggcgccgtggtggccgccgtgatgtggagaaagaagagcagcgacagaaacagaggcagctacagccaggccgccgcctacagcgtggtgagcggcaacctgatgatcacctggtggagcagcctgttcctgctgggcgtgctgttccagggctacctgggctgcctgagaagccacagcgtgctgggcagaagaaaggtgggcgacatgtggatcctgttcttcctgtggctgtggaccagcttcaacaccgccttcctggccctgcagagcctgagattcggcttcggcttcagaagaggcagaagcttcctgctgagaagctggcaccacctgatgaagagagtgcagatcaagatcttcgactag

SEQ ID NO: 38885 - DNA, 780 bp, Artificial Sequence
  derived and/or modified sequence
atgaacggctgcgacatgggccccgacggcagactgctgagaggctaccaccagcacgcctacgacggcaaggactacatcagcctgaacgaggacctgagaagctggaccgccgccgacaccgtggcccagatcacccagagattctacgaggccgaggagtacgccgaggagttcagaacctacctggagggcgagtgcctggagctgctgagaagatacctggagaacggcaaggagaccctgcagagagccgacccccccaaggcccacgtggcccaccaccccatcagcgaccacgaggccaccctgagatgctgggccctgggcttctaccccgccgagatcaccctgacctggcagagagacggcgaggagcagacccaggacaccgagctggtggagaccagacccgccggcgacggcaccttccagaagtgggccgccgtggtggtgcccagcggcgaggagcagagatacacctgccacgtgcagcacgagggcctgccccagcccctgatcctgagatgggagcagagcccccagcccaccatccccatcgtgggcatcgtggccggcctggtggtgctgggcgccgtggtgaccggcgccgtggtggccgccgtgatgtggagaaagaagagcagcgcctacagcgtggtgagcggcctgctgatgatcacctggtggagcagcctgttcctgctgggcgtgctgttccagggctacctgggctgcctgagaagccacagcgtgctgggcagaagaaagcacttctag

SEQ ID NO: 38886 - DNA, 1260 bp, Artificial Sequence
  derived and/or modified sequence
atggcccccagaagcctgctgctgctgctgagcggcgccctggccctgaccgacacctgggccggcagccacagcctgagatacttcagcaccgccgtgagcagacccggcagaggcgagcccagatacatcgccgtggagccctgggtggagcaggagggcccccagtactgggagtggaccaccggctacgccaaggccaacgcccagaccgacagagtggccctgagaaacctgctgagaagatacaaccagagcgaggccggcagccacaccctgcagggcatgaacggctgcgacatgggccccgacggcagactgctgagaggctaccaccagcacgcctacgacggcaaggactacatcagcctgaacgaggacctgagaagctggaccgccgccgacaccgtggcccagatcacccagagattctacgaggccgaggagtacgccgaggagttcagaacctacctggagggcgagtgcctggagctgctgagaagatacctggagaacggcaaggagaccctgcagagagccgacccccccaaggcccacgtggcccaccaccccatcagcgaccacgaggccaccctgagatgctgggccctgggcttctaccccgccgagatcaccctgacctggcagagagacggcgaggagcagacccaggacaccgagctggtggagaccagacccgccggcgacggcaccttccagaagtgggccgccgtggtggtgcccagcggcgaggagcagagatacacctgccacgtgcagcacgagggcctgccccagcccctgatcctgagatgggagcagagcccccagcccaccatccccatcgtgggcatcgtggccggcctggtggtgctgggcgccgtggtgaccggcgccgtggtggccgccgtgatgtggagaaagaagagcagcgacagaaacagaggcagctacagccaggccgccgcctacagcgtggtgagcggcaacctgatgatcacctggtggagcagcctgttcctgctgggcgtgctgttccagggctacctgggctgcctgagaagccacagcgtgctgggcagaagaaaggtgggcgacatgtggatcctgttcttcctgtggctgtggaccagcttcaacaccgccttcctggccctgcagagcctgagattcggcttcggcttcagaagaggcagaagcttcctgctgagaagctggcaccacctgatgaagagagtgcagatcaagatcttcgactag

SEQ ID NO: 38887 - DNA, 780 bp, Artificial Sequence
  derived and/or modified sequence
atgaacggctgcgacatgggccccgacggcagactgctgagaggctaccaccagcacgcctacgacggcaaggactacatcagcctgaacgaggacctgagaagctggaccgccgccgacaccgtggcccagatcacccagagattctacgaggccgaggagtacgccgaggagttcagaacctacctggagggcgagtgcctggagctgctgagaagatacctggagaacggcaaggagaccctgcagagagccgacccccccaaggcccacgtggcccaccaccccatcagcgaccacgaggccaccctgagatgctgggccctgggcttctaccccgccgagatcaccctgacctggcagagagacggcgaggagcagacccaggacaccgagctggtggagaccagacccgccggcgacggcaccttccagaagtgggccgccgtggtggtgcccagcggcgaggagcagagatacacctgccacgtgcagcacgagggcctgccccagcccctgatcctgagatgggagcagagcccccagcccaccatccccatcgtgggcatcgtggccggcctggtggtgctgggcgccgtggtgaccggcgccgtggtggccgccgtgatgtggagaaagaagagcagcgcctacagcgtggtgagcggcaacctgatgatcacctggtggagcagcctgttcctgctgggcgtgctgttccagggctacctgggctgcctgagaagccacagcgtgctgggcagaagaaagcacttctag

SEQ ID NO: 38888 - DNA, 1308 bp, Artificial Sequence
  derived and/or modified sequence
atggcccccagaagcctgctgctgctgctgagcggcgccctggccctgaccgacacctgggccggcagccacagcctgagatacttcagcaccgccgtgagcagacccggcagaggcgagcccagatacatcgccgtggagtacgtggacgacacccagttcctgagattcgacagcgacgccgccatccccagaatggagcccagagagccctgggtggagcaggagggcccccagtactgggagtggaccaccggctacgccaaggccaacgcccagaccgacagagtggccctgagaaacctgctgagaagatacaaccagagcgaggccggcagccacaccctgcagggcatgaacggctgcgacatgggccccgacggcagactgctgagaggctaccaccagcacgcctacgacggcaaggactacatcagcctgaacgaggacctgagaagctggaccgccgccgacaccgtggcccagatcacccagagattctacgaggccgaggagtacgccgaggagttcagaacctacctggagggcgagtgcctggagctgctgagaagatacctggagaacggcaaggagaccctgcagagagccgacccccccaaggcccacgtggcccaccaccccatcagcgaccacgaggccaccctgagatgctgggccctgggcttctaccccgccgagatcaccctgacctggcagagagacggcgaggagcagacccaggacaccgagctggtggagaccagacccgccggcgacggcaccttccagaagtgggccgccgtggtggtgcccagcggcgaggagcagagatacacctgccacgtgcagcacgagggcctgccccagcccctgatcctgagatgggagcagagcccccagcccaccatccccatcgtgggcatcgtggccggcctggtggtgctgggcgccgtggtgaccggcgccgtggtggccgccgtgatgtggagaaagaagagcagcgacagaaacagaggcagctacagccaggccgccgcctacagcgtggtgagcggcctgctgatgatcacctggtggagcagcctgttcctgctgggcgtgctgttccagggctacctgggctgcctgagaagccacagcgtgctgggcagaagaaaggcccagctgctgagcgtgagcaccagccagaccagcatcctgatccaggagcagttcagccaccagagaaccctggccatgagcggcaagatgttctgctgccacgactggagcgaggaggaggtgctgcccgccagctgcggcgagtag

SEQ ID NO: 38889 - DNA, 1260 bp, Artificial Sequence
  derived and/or modified sequence
atggcccccagaagcctgctgctgctgctgagcggcgccctggccctgaccgacacctgggccggcagccacagcctgagatacttcagcaccgccgtgagcagacccggcagaggcgagcccagatacatcgccgtggagccctgggtggagcaggagggcccccagtactgggagtggaccaccggctacgccaaggccaacgcccagaccgacagagtggccctgagaaacctgctgagaagatacaaccagagcgaggccggcagccacaccctgcagggcatgaacggctgcgacatgggccccgacggcagactgctgagaggctaccaccagcacgcctacgacggcaaggactacatcagcctgaacgaggacctgagaagctggaccgccgccgacaccgtggcccagatcacccagagattctacgaggccgaggagtacgccgaggagttcagaacctacctggagggcgagtgcctggagctgctgagaagatacctggagaacggcaaggagaccctgcagagagccgacccccccaaggcccacgtggcccaccaccccatcagcgaccacgaggccaccctgagatgctgggccctgggcttctaccccgccgagatcaccctgacctggcagagagacggcgaggagcagacccaggacaccgagctggtggagaccagacccgccggcgacggcaccttccagaagtgggccgccgtggtggtgcccagcggcgaggagcagagatacacctgccacgtgcagcacgagggcctgccccagcccctgatcctgagatgggagcagagcccccagcccaccatccccatcgtgggcatcgtggccggcctggtggtgctgggcgccgtggtgaccggcgccgtggtggccgccgtgatgtggagaaagaagagcagcgacagaaacagaggcagctacagccaggccgccgcctacagcgtggtgagcggcctgctgatgatcacctggtggagcagcctgttcctgctgggcgtgctgttccagggctacctgggctgcctgagaagccacagcgtgctgggcagaagaaaggtgggcgacatgtggatcctgttcttcctgtggctgtggaccagcttcaacaccgccttcctggccctgcagagcctgagattcggcttcggcttcagaagaggcagaagcttcctgctgagaagctggcaccacctgatgaagagagtgcagatcaagatcttcgactag

SEQ ID NO: 38890 - DNA, 1329 bp, Artificial Sequence
  derived and/or modified sequence
atggctccccgcagcttactgctcctgctgtcaggagcgctggctttgactgatacttgggcggggtcccacagccttaggtatttcagcactgcagtgtccaggccaggtagaggtgagccaagatatatagccgtcgagtacgtcgacgatactcagttcctgagattcgacagcgacgccgccattccgagaatggagccaagagaaccttgggtcgagcaagagggcccgcagtactgggagtggaccaccggatacgcgaaggcaaatgcccaaactgaccgagtggctctcaggaacctccttagacgctacaatcagagcgaggccgggtctcataccttgcaggggatgaatgggtgcgacatgggacctgacggtaggctattacgcgggtatcaccagcacgcctacgacggcaaggactatatcagcctcaacgaggacctccggagctggactgcagcggatactgtagctcagatcactcaacgtttttacgaagctgaagaatatgctgaagagtttcggacatacctcgagggtgaatgtctagagctcctccgccggtacctggaaaacgggaaggaaaccttacagagggccgatcctcccaaggcccatgtggcccaccaccccataagcgaccacgaagcgacccttagatgttgggctctggggttttacccagcggaaatcaccctaacatggcagcgtgatggcgaagagcaaactcaggacaccgagctggtcgaaacacgacccgccggggacggtacgtttcagaagtgggcggccgtagtggtcccccccggcgaagaacagcgatacacttgccacgttcagcatgaaggcctaccccagcccctcatactgcgatgggaacagtcgccccagccaactattccgattgtcggcattgtagcagggctggtggtgctgggggctgtagttaccggggccgtggtggcagctgttatgtggcgaaaaaaaagtagtgacaggaaccgtgggagctactcccaggccgccgcttattctgtggtctctggaaatctaatgatcacatggtggtcgagcctcttcctgttgggtgtactcttccaggggtacctgggttgtttgcgctcacattcagtactgggccggcgtaaggttggcgatatgtggattctgttcttcctgtggctttggacgtccttcaatacggccttcttagccctgcagagcctgcgattcggatttggcttcaggcgcggtcggtctttcctgctcagaagctggcatcacctgatgaagagagtgcaaatcaaaatcttcgactag

SEQ ID NO: 38891 - DNA, 1329 bp, Artificial Sequence
  derived and/or modified sequence
atggccccacggagcctccttctccttctgtcaggcgccctggcactgactgacacttgggccgggtctcactcattgaggtacttttcgacagctgtgagccgtcccgggcgaggggaacctagatacatcgcggtcgaatacgtggatgatacacagttccttagatttgactccgacgccgccataccccgtatggagccccgcgaaccgtgggtggaacaggaggggccacagtactgggagtggacaacaggctatgccaaagctaacgcgcagacggatcgcgtcgcactgcggaatttattgcggcggtataaccagagcgaagcagggtcgcatacactgcaggggatgaatggttgcgacatgggacccgacgggaggctcctgcgggggtaccatcagcatgcatacgatggcaaagattacatatcattgaatgaggatcttagatcctggaccgccgcggatactgtggcccagataacccaacggttttatgaagccgaggagtatgctgaggaattcaggacttatctggagggtgagtgtctggaacttcttagacgctacctagaaaatggcaaggaaactttacagcgagccgacccgccaaaggcccacgtagcccatcacccaatttccgatcatgaagctacattgcgctgctgggcgctgggcttttaccctgccgagataacactcacgtggcagcgtgacggcgaagagcagacacaggacactgagctggtcgaaacacgaccagcgggcgacggcaccttccagaaatgggcagcagtggttgttccaagcggtgaggagcaaaggtatacgtgccatgtgcagcacgaaggacttccacaacctctcatccttcgctgggagcagagtcctcagcctaccatcccaatcgtgggcatagtggccggcttagtggttctgggcgctgtggtcaccggcgcagtagtagcagcggtcatgtggcgcaaaaagtcctctgaccgcaaccgtgggtcttattcacaggccgcagcttattccgtggtatcgggtaatctgatgatcacatggtggtctagtctcttcctgcttggagttctgtttcaaggatatctgggatgccttagaagtcactcagttttgggccgccggaaagtgggagacatgtggatccttttttttctctggttgtggactagcttcaatacagcttttctggccctgcagtcactgcggttcggttttggattccgtagaggtcgatcctttcttctacgctcctggcaccatctgatgaagcgcgttcagatcaaaatcttcgactag

SEQ ID NO: 38892 - DNA, 1329 bp, Artificial Sequence
  derived and/or modified sequence
atggctcctcggagcttgcttctcttgctaagtggggccctggccctcaccgacacttgggcgggatcacacagccttcgctacttctcaactgctgtaagtcgaccaggtaggggagaaccacggtacatcgctgttgagtacgtggacgatacacagttcctgaggttcgactcagacgccgctatcccccggatggagccgagagagccatgggtcgaacaggaggggccccagtactgggagtggacgactggctacgccaaggctaatgctcaaaccgatcgggtcgcactgagaaatctcctgcgccgatataatcagagcgaagccggttctcataccctgcaggggatgaacggttgtgacatggggcctgacggacgcctgcttcggggctaccaccagcacgcctatgatggcaaagactacatctcactgaacgaagaccttaggagctggacggctgccgataccgtggctcagatcactcaacgattttatgaagccgaagaatacgccgaggagttcagaacgtacctggagggtgagtgcctcgagctgttacggcgctacttggagaacggaaaggagaccttacagagagcagacccccccaaggcccacgttgcccatcatcccatctcagatcatgaagctaccctccggtgttgggccctggggttttatcctgctgagataactctcacctggcagagagacggggaagagcaaacacaagacactgagttagttgagacccgccctgctggggacggcacgttccagaagtgggctgccgtggtcgtgccctccggggaggagcagcggtacacctgccatgtacaacatgagggcctcccgcaacctctgatcctgcgttgggaacagtctcctcagcccaccattcccatcgttggcatagtggcagggttggtggtcctgggcgcagtggttactggcgccgtggtggccgccgtaatgtggcgtaaaaaaagtagtgacaggaacagaggttcatactcgcaagccgcggcctattccgtcgtgtcggggaatcttatgatcacttggtggagtagcctgttcttgttaggcgtactctttcagggctacctcggatgtcttcgtagccactccgtactggggcgcagaaaggtgggtgacatgtggatcctcttctttctctggctctggacatcgttcaataccgcttttcttgcgctccagagcctacggttcggtttcggtttcagaagaggacgatcatttttactgcggtcgtggcatcacctgatgaaaagagtccagatcaagattttcgattag

SEQ ID NO: 38893 - DNA, 375 bp, Artificial Sequence
  derived and/or modified sequence
tgagccgtgatgtggcggaagaaatccagtggacacttcctacccattgacagaaatcgaggttcttactcacaggccgccgcttacagcgtcgtcagcgggaatcttatgatcacctggtggtctagcctattcctattaggcgtattatttcagggatacctgggatgtttgaggtcacactcggttctggggagacgcaaagtgggcgacatgtggatcctgttctttctttggctctggactagttttaataccgcgttcctggctctccaatccctgagatttgggttcggctttcgtagaggtcgatcatttttgctcaggagttggcatcatctgatgaagagggtccagatcaaaattttcgactag

SEQ ID NO: 38894 - DNA, 375 bp, Artificial Sequence
  derived and/or modified sequence
tgagctgtaatgtggcgaaagaagagttctggccacttcctcccaattgaccgcaatcggggatcctattcccaagctgccgcgtatagcgtcgtgtcgggaaatctgatgattacctggtggtcaagtttattcctccttggtgtgctgttccaagggtaccttggctgccttaggagtcattccgtcctgggtcgtagaaaagtgggagatatgtggatcttgttctttctctggctctggacctcttttaatactgccttcttggccctccagagtctccgcttcgggttcggatttcgaagaggacgaagcttcctcctgagaagctggcaccatctgatgaagagagtgcaaatcaagatttttgactag

SEQ ID NO: 38895 - DNA, 1329 bp, Artificial Sequence
  derived and/or modified sequence
atggccccacggtcactgctgttattgttgtccggcgcactggcgttgaccgacacttgggctggcagtcattcactccggtactttagtaccgccgttagtcgccccgggaggggtgaaccccggtatatcgcagtggaatatgtggacgacacccagtttctgcgttttgacagtgacgccgcgatccctcgcatggagccgcgggaaccctgggtggaacaagaaggaccccagtattgggaatggacaaccggctacgcgaaagccaatgcacagactgacagagtagcattgaggaacctgctccggcgatataatcaaagtgaagccggctcccacaccctgcagggaatgaacggatgcgatatggggccagacggccggctgttgaggggttaccatcagcacgcctacgacgggaaagattatatatccctgaatgaggatcttaggagttggacagctgcggatacagttgcccagattactcagcggttttacgaagcagaggaatacgctgaggaattccgcacttatctggaaggagaatgtctggaattgttaaggagatatctcgaaaacggaaaagaaacacttcagagggccgacccccctaaagcacatgttgcccaccaccccatcagcgatcacgaggccacattacggtgctgggccctcggcttttatccagccgagattacactgacatggcaacgggatggagaggagcagactcaggatacagagctggtagagacccgacccgccggagacgggacttttcaaaaatgggcagcagtggtggtccccagcggggaggaacaacggtatacttgccacgtgcagcatgagggccttccacagcctttgatccttcggtgggagcagtcccctcagcctaccatacctatcgttggcattgtggctggcctggtggtgctgggcgccgtagtgactggcgctgttgtggccgctgtgatgtggcggaagaaatcctccgatagaaataggggtagctatagccaggccgcggcctactcggttgttagtggcaacctcatgattacatggtggtcatcactttttctcctgggcgtgcttttccaggggtatttaggatgccttcggtcacatagcgtccttggtagacggaaagtgggtgacatgtggattttgttctttttgtggttatggacctctttcaacacggcctttctagccctgcagagcctgcgcttcggatttggcttccgccgcggacggagtttcctgctgagatcctggcaccatctgatgaagcgggtgcagattaaaatatttgactag

SEQ ID NO: 38896 - DNA, 1329 bp, Artificial Sequence
  derived and/or modified sequence
atggcacctcgaagtctcctgctgctgctgagtggtgctctggcactgacggatacctgggcaggctcccactctttaaggtatttcagtaccgccgtaagcaggccaggccggggtgagccccggtatattgccgtggaatacgtggatgatacccagttccttagatttgatagcgatgctgcgattccacgaatggaaccacgagaaccctgggtcgagcaggagggcccacagtattgggaatggaccacaggctacgctaaggccaacgctcagactgatagggtggccctgagaaatctgctgaggcggtacaatcaatccgaagccggatcccatacgttgcaggggatgaatggttgtgacatggggcccgatggtaggctgctgcgcggttaccatcaacatgcttatgatggaaaagattatataagcctgaatgaggacctccgtagttggaccgctgccgacaccgtcgcccagattacccagaggttttacgaggcagaagaatacgccgaagaattcagaacatatcttgaaggcgagtgccttgagttgctgaggaggtatctagaaaatggcaaggagacccttcagcgcgccgacccacctaaggcccacgtggcccatcatccaatatccgaccatgaagccacactgagatgctgggcattaggtttctacccagcagagattacactgacgtggcaaagagacggggaggagcagacccaggacactgagctggtagagactcggcccgccggtgatggtacgttccagaagtgggctgccgtagtcgttccttcaggcgaggaacaacggtatacttgtcatgtgcagcacgaagggctgccccagccactcattctacggtgggagcagtctccacaaccgacgatcccaatagtggggatcgtggccgggctcgtggtgttaggggccgtggtcacaggtgccgtcgttgcagctgtgatgtggcggaaaaaatcctcggatcgtaatcgcggctcttactcccaggcagccgcgtattccgtcgtgagcggactgctgatgatcacttggtggagctcgcttttcctgctcggcgtgctgttccagggatacctgggctgtttgcggtcccactcagtgctgggtagaaggaaagtcggtgacatgtggatcttgttctttctgtggctgtggacatccttcaacacggcttttttagccctgcagtcactccggtttggttttggcttcagacgaggccgtagtttcttactgcgctcttggcatcacctgatgaaacgcgtgcagatcaaaatcttcgattag

SEQ ID NO: 38897 - DNA, 33 bp, Artificial Sequence
  derived and/or modified sequence
tgagccgtgatgtggaggaagaaaagtagttag

SEQ ID NO: 38898 - DNA, 780 bp, Artificial Sequence
  derived and/or modified sequence
atgaatggctgtgatatgggacccgatggtaggcttctcagggggtaccaccaacacgcgtatgacgggaaagattatatctcattgaacgaggatctgagatcctggaccgcagctgacacagttgctcagatcacgcaaaggttttatgaggctgaagagtatgctgaagagtttcgcacctatctggaaggcgaatgtcttgagctgctcagacggtacctggagaacgggaaggaaaccttacagcgtgccgatccaccaaaagcacacgtggcccaccatccaatctctgaccatgaggctacattacgttgttgggcactggggttttaccctgctgagatcactctcacatggcagagagatggggaagaacagactcaggacactgagctcgtggagacaaggcctgccggcgacggaacctttcagaagtgggcagccgtggtcgtgccgcccggagaagaacagcggtatacttgtcacgtccagcatgagggcttacctcagccattgatcctgcgatgggagcagtcccctcagcctactattccgatcgttggcattgtcgccggactggttgtgttaggcgctgtggtgacgggtgccgtggttgccgctgtgatgtggagaaaaaagtcatctgcctactcagtcgttagtggaaatcttatgataacatggtggtccagtttgttcctgctcggggtcctattccagggctacttgggatgtctcagatcacactcagtgctgggacgcagaaagcacttttag

SEQ ID NO: 38899 - DNA, 375 bp, Artificial Sequence
  derived and/or modified sequence
tgagcggtgatgtggagaaagaagtcatcaggacattttctccccatcgatagaaacagagggtcttactcacaagcggcagcctacagcgttgtgagtggcaacctgatgatcacgtggtggagttctcttttcctattgggggttctgttccagggctacctcgggtgcctacgctctcattccgtgttggggagaaggaaagtcggcgacatgtggatacttttttttctgtggctttggaccagctttaatactgctttccttgccctgcagtcactgcgcttcgggttcgggtttcgacggggacgcagtttccttcttagatcctggcatcacttgatgaagagggtgcagatcaagatcttcgactag

SEQ ID NO: 38900 - DNA, 1329 bp, Artificial Sequence
  derived and/or modified sequence
atggcacctcgcagcttgctcttgctgctgagcggtgcgctcgcactgactgacacatgggccggcagtcactcattaagatactttagcacagccgtgtcccgccctgggcgcggtgagcctaggtatatcgcagtggaatatgtcgacgatacccaattcctgcgattcgatagcgacgctgccatacctcgtatggagccgcgagagccatgggtcgagcaggaaggtccgcagtactgggagtggacaacagggtacgctaaagccaatgcacagacagacagagtggcactgcgcaacttgctccgccggtataaccagagtgaagcaggttcgcataccctgcagggaatgaacggctgcgatatggggcctgatgggaggctcttgcgagggtaccaccagcatgcctacgatgggaaggattatatctcactgaatgaggatctgcgctcctggacagctgctgacactgtagctcagatcacacagcgattctatgaggcggaagagtatgctgaggagtttagaacttacctcgaaggggaatgcttagagctactgcgaaggtatctcgagaacggaaaagagacgctgcagcgtgccgaccctccgaaggctcacgtggcacaccatcctatctctgaccacgaggccaccctgagatgctgggcactggggttctacccagcggaaatcacattgacatggcagcgcgacggtgaggaacagacacaagataccgagctggtggaaactcggcccgccggggacggaaccttccagaagtgggccgccgtggtggtcccttctggggaagagcaacggtacacctgccacgtgcagcatgaggggctgcctcagcccctcatcctgcggtgggagcagtctccccagcccaccattccaatcgtggggatcgtagctggattggtagtgctgggcgccgtcgtgacaggagctgtggtagcagccgtcatgtggagaaaaaagtccagtgataggaatcgcggctcctatagccaagctgcagcatactcagtcgtgagcggaaacctcatgattacttggtggagctcccttttcttgctgggcgtgttattccaggggtaccttggctgcctaagaagtcatagcgtgctgggtagaaggaaggttggtgacatgtggatcctgttcttcctgtggctctggaccagcttcaacacagcattcctcgctcttcagagcctgcgttttgggttcggctttaggcgagggcgcagtttcttgttgcgtagttggcatcatcttatgaaacgtgttcagatcaagattttcgactag

SEQ ID NO: 38901 - DNA, 375 bp, Artificial Sequence
  derived and/or modified sequence
tgagccgtgatgtggaggaagaagtcctccggacattttttgcctattgatcgcaaccgcggtagctatagtcaggcagccgcctactcagtggtaagcggactgctaatgatcacttggtggagctcattatttctgctcggggtgcttttccaagggtacttaggatgcttgcgctcccactcagtgctaggcagaaggaaagtaggtgacatgtggatactgtttttcctctggttgtggacttcttttaataccgctttcttggccctccagtccctgcggttcggattcggattccgcaggggcaggtcttttctcctgcgcagttggcatcatctcatgaaacgcgtgcagattaagatttttgactag

SEQ ID NO: 38902 - DNA, 1260 bp, Artificial Sequence
  derived and/or modified sequence
atggccccaagatctcttctgttactgctctccggcgcactcgccttgactgacacctgggctggatcccatagccttcggtatttttccacagccgtttccaggcccggtaggggagaaccacggtatattgcggtagaaccgtgggtggagcaggaaggtccccaatactgggagtggactacgggttatgctaaggcaaatgcccaaaccgatcgtgtggccttgagaaaccttttgcgacggtacaatcagtcggaagccggttcccacacgctgcaaggaatgaacggttgtgatatggggcctgatgggaggcttctccgagggtaccatcagcacgcgtatgatggcaaagattacattagtctgaatgaggacctccggtcttggaccgcggctgataccgtggcacaaataacacagcgcttttacgaggcggaggagtacgcagaagagttccggacttacctggaaggggagtgcctcgagcttctgcgaaggtatctcgagaacggcaaggaaacgctccaaagagccgaccctcctaaggctcacgttgcccatcaccctatctccgatcacgaagctacccttcgttgttgggccttgggcttttacccagccgagatcaccctgacctggcaacgtgacggcgaggaacagacacaggacacagagcttgtcgagacacggcctgctggcgatggaacttttcaaaaatgggccgcggtggtggttcctcccggagaagagcagcgatacacttgccacgtgcagcacgaaggtcttccacagcctctgatcttgcgctgggaacagtctccccaacccacaatccccatcgtggggattgtggcgggcctggtagtgctcggagcagtcgtgacaggggccgtggtggctgcagttatgtggagaaagaagagttcagatcgtaaccgcggatcatattcacaggccgccgcatactctgtcgtatcggggaacctgatgattacatggtggtcctccctttttcttcttggcgttctgttccaaggatatctgggttgcctgcggtcccattctgtacttggccggagaaaagtgggcgacatgtggatcctcttcttcctttggctctggactagctttaataccgcctttctcgcactgcaatcccttagatttggattcggcttccgacggggtcggtcttttctgttgaggtcatggcaccatctgatgaagcgggtgcagattaagatctttgactag

SEQ ID NO: 38903 - DNA, 375 bp, Artificial Sequence
  derived and/or modified sequence
tgagcggtgatgtggcggaagaagagttctggacactttctgcctatcgatcgtaaccggggctcgtattcacaagcagccgcgtacagtgttgtgtcgggaaacctgatgataacctggtggtccagcctgttcctgttaggcgtgttattccaaggctatctgggttgtcttagatcccattcagttctcggaagacggaaggtaggcgacatgtggatcctattctttttatggctctggacatccttcaacacggctttcctggcgctgcaaagtctgcgcttcggctttggcttcagacgcgggagaagcttcctgctgaggtcctggcatcatctgatgaagcgcgtgcagatcaagattttcgactag

SEQ ID NO: 38904 - DNA, 375 bp, Artificial Sequence
  derived and/or modified sequence
taagccgtcatgtggaggaaaaaaagcagtggccactttctgcccatcgaccggaatcgggggagttactcccaggccgctgcctactctgtcgtttctgggaatctgatgatcacttggtggagttctctgtttctgctgggagtgctgttccagggatacctgggctgtctcaggagccattccgtgctggggcggaggaaggtgggcgacatgtggattctgtttttcctgtggttgtggacatcattcaatacagcttttctggccctccagtccctgcgcttcggttttgggttccggaggggccgcagctttctgcttaggtcctggcatcatctgatgaagcgggtgcaaattaagattttcgattag

SEQ ID NO: 38905 - DNA, 780 bp, Artificial Sequence
  derived and/or modified sequence
atgaatggttgtgatatgggccctgacgggcgattgctccgtggctatcatcagcacgcttacgatggcaaggactatatttccttgaacgaggatctgagaagttggaccgcagccgataccgtcgcccagataacccagcgtttctacgaagccgaagagtacgctgaagagttccgtacttatctagagggcgagtgtcttgagctgctgagacgctatcttgaaaacgggaaggagactctccagcgggcagacccacctaaggctcatgtggcacaccatcccatttctgatcacgaggccactctgagatgttgggcgctcgggttctaccctgccgaaatcactttaacgtggcagcgagatggagaggagcagacccaggacacagagttggttgagactagacccgcaggagacggaacttttcaaaagtgggctgccgtggtggttccaagcggcgaggagcagcggtatacttgtcacgttcagcacgaaggactgcctcagcccctgattcttaggtgggagcagtcacctcagccgacaatacccattgtgggaattgtggccgggctagtcgtgctgggagcggtggttaccggagccgtcgtggccgccgtgatgtggcgtaaaaagtcaagcgcctattcagtggttagtggtttgctgatgataacctggtggtctagtttatttctgctaggcgttctgttccagggatatcttggctgtcttagatcacattccgtgctggggagacgcaagcacttctag

SEQ ID NO: 38906 - DNA, 1260 bp, Artificial Sequence
  derived and/or modified sequence
atggctccgagaagcctgctgctgctcctgagcggtgcgctggctctcacggatacctgggcagggtctcactctctccggtatttcagcaccgcagtgtccagaccgggccggggtgagcctcgctatatcgcagtggagccatgggtggagcaggaggggccccagtattgggagtggactacggggtacgcaaaggcaaacgctcaaaccgatcgggtggccctgaggaaccttctcagacgatacaatcagtccgaggcagggtcacacactcttcagggaatgaatgggtgcgatatgggccctgatggcaggcttcttcggggttatcaccagcacgcttacgacggaaaagactatatctcattgaatgaggaccttcgaagttggacagcggcagacaccgtagcgcagatcactcaacgcttctacgaagcagaggaatacgccgaagagttccggacatacctcgagggcgaatgtttagaactccttcgccgttatctggagaatgggaaagaaactctgcaacgtgccgatccacccaaagcccacgtcgctcatcaccctatctccgatcacgaagctacactgcgctgctgggctctgggattttaccctgcagagatcacattgacatggcagcgagacggcgaggaacaaacccaggacacggagctggtcgaaaccagacctgctggcgacggcactttccagaagtgggccgccgtcgtggtgccttctggcgaagaacaaaggtacacttgccacgtgcagcatgaaggcctcccacagcctctgattctgcgctgggagcaaagtccccagccaacaataccaatcgtcgggatagtagctggtttggtggttctgggggcagtcgtgacaggtgcagttgtggctgctgtgatgtggcgcaagaaatcctccgaccggaacagaggcagctattcacaggctgccgcatactctgtggtatctgggaatctcatgatcacctggtggagtagtttgtttctcttaggcgtgctgttccagggctatctgggatgtctgcggagccattcggtgctagggcgtcgaaaggttggggatatgtggatactgttctttctgtggctttggacatctttcaacactgcctttctcgccctgcagagcctgaggtttggattcgggttccgacgcgggcgaagcttcctgttacggtcctggcatcacttaatgaagcgcgtgcagatcaaaatttttgattag

SEQ ID NO: 38907 - DNA, 780 bp, Artificial Sequence
  derived and/or modified sequence
atgaacggatgtgacatgggaccagacggtagactgctccgaggataccaccagcacgcttacgatgggaaggactatatttccttaaatgaagacttgcggagttggacagccgcggacacggtcgcccaaataacccagcgcttttacgaggcggaggagtatgcggaagaatttaggacctacctcgaaggggagtgccttgaactcctcagaaggtatcttgagaacggaaaggaaactctccagagggctgatccccccaaggcacacgtggcacaccaccctatctctgaccacgaagcaacactgagatgctgggctttgggtttctatcccgccgagatcactctgacatggcagagagacggggaagagcaaactcaggacaccgaactggtcgaaactaggccagccggagatgggacctttcagaagtgggccgctgtggtcgttccttcaggggaggagcagaggtatacctgccatgtgcagcacgagggcttgccgcagcccctaattctccgctgggagcaatctccccagcctaccatcccaattgtgggtatcgtagccggactcgtggtgctgggggccgttgtaaccggcgccgtcgtcgccgcagtgatgtggcgaaaaaagtcgagtgcctacagtgtcgtctccgggaatttaatgattacatggtggtcatcactgtttctgctcggagtgctgtttcaggggtacctgggatgtctcaggtcgcatagtgtgcttggcaggcgcaagcatttttag

SEQ ID NO: 38908 - DNA, 780 bp, Artificial Sequence
  derived and/or modified sequence
atgaatggttgcgatatgggacctgatggaagattgctcaggggctaccaccagcacgcttacgatgggaaggattatatatccctgaatgaggatctcaggtcttggacagctgctgataccgtggcgcaaataacacagaggttttacgaggctgaggagtatgcggaagagtttaggacctacctggagggtgagtgcctggagctgctcagaagatacctagagaatgggaaggagaccttacagcgggccgatccacctaaggcacacgtggcgcatcaccctatcagtgatcatgaggcaaccctacggtgctgggcacttggtttctacccagccgagatcactctaacgtggcagcgagatggagaggagcagacacaagacaccgagcttgtggaaactcggccggctggagatggaacattccaaaagtgggctgctgttgtggtgccgagcggagaggagcaaaggtatacctgtcatgtccagcatgaggggctacctcagcccttgatactgagatgggagcagagccctcagcccactattccaatcgtgggaatagtcgcagggttggtagtcttgggagccgtggtgaccggggccgttgtggctgccgtgatgtggcggaaaaagagctctgcatacagcgtggtgagcgggaacttgatgattacttggtggtcctctttattcttgttaggcgtactgttccagggctacctgggttgcctgcggtcccattcagtgctaggtcgtcgcaagcacttttag

SEQ ID NO: 38909 - DNA, 1260 bp, Artificial Sequence
  derived and/or modified sequence
atggcccctagatcccttctgttgctcctgagcggggccctggcactcaccgatacctgggccggctctcacagcttacgctacttttctaccgctgtgtcccgtcctgggcgaggagaacctcggtacatcgccgtggagccatgggtggagcaggaaggcccgcagtattgggagtggacaacagggtacgccaaagccaatgcccagaccgatagagtcgcattgcgcaatttgttaagacggtataatcagagtgaagccggtagccacactttgcaaggcatgaatggatgcgacatgggaccagacgggcgactcctgagaggttatcatcagcacgcttatgatgggaaggactatatcagcctgaatgaagatcttcgctcttggacggctgccgataccgtggcccaaattacacaaaggttttatgaggccgaggagtatgccgaagagtttcgcacctaccttgagggggagtgtctcgagctgttgaggaggtacctagagaatggtaaggagactcttcagagggcagatccaccaaaggcacacgtcgctcaccacccgatctcagaccacgaagcaactctgcgctgctgggctctcggtttttaccccgcagagataacacttacttggcaaagagacggcgaggagcagacccaggacactgagcttgttgagacacgtcctgcgggcgacgggacgttccaaaaatgggctgccgttgtcgtgccatctggagaggagcaaagatacacatgtcatgtccagcatgaagggctaccacagcccctcattctccgctgggagcaatccccccagcctaccattcctatcgttgggattgtggctggccttgttgtcctcggcgctgtcgtcacaggcgctgtcgttgccgccgtgatgtggcgcaaaaaatcatccgaccggaacagggggtcatacagtcaggccgctgcatatagtgtggtctctggtaatttaatgataacatggtggagctcgttgttcctgctgggtgtgctttttcaggggtacctggggtgtctgaggtctcatagcgtcctgggaagaagaaaggtgggggatatgtggatcctgttttttctgtggttgtggacaagtttcaacacagcctttctggccctccagtctctacggtttggattcggctttcggcgggggcgaagttttctgttgcgatcgtggcaccatctgatgaagcgggtgcagatcaagatatttgattag

SEQ ID NO: 38910 - DNA, 1308 bp, Artificial Sequence
  derived and/or modified sequence
atggccccacggagcctgcttctcttgctgtcaggcgcgctggcactcaccgatacatgggcagggtctcattccctgaggtacttcagcactgccgtgtcgaggccaggcaggggggagccacgatacattgcagtggagtatgtggacgatacccagttcctgcggtttgattcagacgctgccattcccagaatggaaccccgtgaaccttgggtggagcaagaagggccccagtattgggagtggaccactggatacgctaaggctaacgcacagactgacagggtggccctgcggaacctgcttagacggtacaatcagtctgaagctggtagccatactttgcaagggatgaatggatgtgacatgggaccggatggacgcctgttgcggggttaccaccagcacgcctacgacggtaaggattatattagtcttaacgaggatctgcgcagctggacagctgcagacactgtcgctcaaattacgcagcgtttctacgaagccgaggagtatgccgaggaatttcgcacatatcttgagggtgaatgccttgagctgctgaggagatacctggagaatggtaaggaaaccctgcaacgtgctgacccccctaaggctcatgtcgcccaccatcctatttcagaccacgaggcaactctacgatgttgggcactaggcttctatcccgccgagataacattgacctggcaaagggacggcgaggaacagacgcaagacacggagctcgtcgaaacacgtcccgcaggggatggaactttccagaaatgggccgcagtggtcgtcccttcaggcgaggaacagcggtatacatgtcacgtgcagcatgaaggattgccccagcctttaattctgcgctgggagcagtctccccagcccacaattccgattgtgggtatcgtcgcggggctggtcgttcttggggcagtcgtcaccggcgccgtggtggctgcagtgatgtggcggaagaagagttccgaccgcaatcgcgggtcatattcccaagccgctgcctacagcgtggtgagcggactgcttatgatcacctggtggtcttctttgtttctactgggtgtgctctttcagggctatctgggctgtcttcgatcacactctgtcctgggaaggcggaaggcccagctcctcagcgttagtactagccagacatctattctgattcaggagcagttcagccaccagaggaccttggcaatgtcaggtaagatgttctgctgccacgactggtcagaggaggaggtactacccgcctcatgcggcgagtag

SEQ ID NO: 38911 - DNA, 780 bp, Artificial Sequence
  derived and/or modified sequence
atgaatggctgcgatatgggccccgatggacgcctccttcgcgggtatcaccagcacgcttatgatgggaaagattacatttcccttaacgaagacctcaggagctggactgccgccgacactgtagctcagattacccagcggttctacgaagccgaagagtacgctgaggagttccgtacatatttagaaggtgagtgcctggaactcttgcgtagatatttggagaacgggaaagagactttgcagcgcgcagatcctcccaaagcccatgtggctcaccatccaatctccgatcatgaggctacccttaggtgctgggcactcggtttctaccccgccgaaattacacttacctggcaaagggatggggaagagcagacacaagacacagagctggttgagaccagacctgcaggcgacggtactttccagaagtgggccgccgtggtggtgcccagcggggaggagcagcggtatacctgccacgttcagcacgaaggtctccctcagccccttatactgcgctgggaacagtctccccaacccaccattcctattgtcggaattgtggcgggcttggtcgtgctgggggccgtggttaccggcgcggtagtcgctgccgtcatgtggcgtaaaaaatccagcgcgtacagtgtggttagcggcaacttaatgataacgtggtggtcttccctttttttgcttggggtgctgttccaaggctatctagggtgtctgcgtagccactccgtactgggtagaagaaaacatttctag

SEQ ID NO: 38912 - DNA, 1260 bp, Artificial Sequence
  derived and/or modified sequence
atggcgccgaggagcctgcttctgctgctgtcaggagccctcgcactgaccgacacatgggcaggaagccacagtttacggtatttctcaacagctgtcagtagacctgggcgcggggagccaaggtatattgccgttgagccatgggtagaacaggaaggaccccagtactgggagtggactactgggtatgcgaaagctaatgctcagaccgacagagttgcccttaggaaccttctgcgccgctataatcagtccgaagctggatcccatactctccagggaatgaacggttgtgatatgggacccgacggacgtctgcttagaggctaccaccagcacgcatacgacggcaaggattacatcagcctcaacgaggacctgagatcttggacagccgccgacacagtggcccagatcacacagaggttctatgaggcggaagagtacgctgaggagtttcggacttatctcgaaggcgaatgcttagagttgctgcgccggtacctggagaatggaaaagaaaccctgcagcgcgctgatcctccaaaagctcatgtcgctcaccacccaatttcggaccatgaagcaacactaagatgctgggctctgggattctaccctgccgaaattaccttgacttggcagagagatggggaggagcagactcaggacacagagctggtggaaacccggccggcgggagacggcactttccaaaagtgggccgctgtcgttgtgccctcgggggaggaacagaggtacacatgtcacgttcagcacgagggcctgccgcagccgctcattcttcgctgggagcagtcaccccagccaaccatcccaatcgtggggatcgtggcagggttggtggtgcttggcgccgtggtgactggagctgtggtcgctgccgttatgtggaggaaaaagagttcagatcggaaccgggggtcttattcccaggcggcagcatatagcgtcgtttccgggaacctgatgattacttggtggtcctcactttttcttctgggggtgttgttccaggggtacctgggctgcctcagaagccactcggtgcttgggaggcgtaaagtcggggacatgtggattctgttcttcttgtggctctggacgtcattcaacacggccttcctggccttacagagcttacgatttggattcgggttccgccgaggtaggtctttcctcctgaggagctggcaccacctaatgaagcgagttcaaattaagatatttgattag

SEQ ID NO: 38913 - DNA, 780 bp, Artificial Sequence
  derived and/or modified sequence
atgaacggctgcgatatgggacctgacgggcgcctcttgcgaggataccaccagcacgcctacgacggcaaagattatatatccctaaacgaagacctccgaagctggaccgctgctgacacagtcgcccagatcactcaaaggttctatgaggctgaagaatacgccgaggagttcaggacctatttggagggtgaatgtctggaactgctgcggcgatacctagaaaatgggaaggaaacactgcagcgggccgatcccccaaaggctcacgtggctcatcaccccatctccgatcatgaagcgacactgagatgctgggcccttggtttctatcccgccgaaattaccctgacctggcaaagggatggggaggagcagactcaagacactgaactcgtagagaccagacctgcgggcgacggtacatttcagaagtgggccgcggtggtggtgccttccggggaggaacagaggtacacttgccatgtgcagcacgaggggctgcctcagcccctaattctgcgctgggaacaaagtccccagcctacaatccccattgtgggtattgttgcagggttggtggtgctgggggcagtggttacgggcgctgtggttgccgcggtgatgtggagaaaaaagtcttctgcgtacagcgttgtgtctggaaatttaatgatcacatggtggtccagcctattcttgctcggcgtgttattccagggatacctcggatgtctccgtagtcattctgttctcgggcgacgaaagcatttttag

SEQ ID NO: 38914 - DNA, 1260 bp, Artificial Sequence
  derived and/or modified sequence
atggcaccccgatctctcctgttgctgttaagcggcgccctagctctgaccgatacctgggctggcagccattcgctgaggtatttcagcaccgccgtgagtagaccgggacgtggtgagcccaggtatatcgccgtggaaccatgggtagaacaagaaggtccacagtattgggagtggactaccgggtacgcgaaggcgaatgcccagacggatagagttgctctccgcaatctactccgaaggtacaaccagagcgaggccggtagccacacgctccagggcatgaacgggtgcgatatgggccctgatgggagacttttacgcggttatcatcaacacgcctatgatgggaaagattacatctccctcaacgaagacttgcgttcctggacagccgccgacacagtggctcagatcacacagaggttttacgaggcggaggagtatgccgaagaattccggacctaccttgagggagagtgcttggaactgctcagacggtatcttgaaaacggaaaagaaacactgcaacgcgccgacccacctaaagcacacgttgctcaccaccctatctctgatcacgaggcaacactcaggtgttgggctctgggcttctaccctgcagaaatcacgctgacatggcagagggacggggaggaacaaacccaggacacggagcttgtggaaacccggcccgccggagacggcaccttccaaaaatgggcggccgtggtcgtgccgtcaggtgaggagcagagatacacctgccatgtgcagcacgaaggcctgcctcagccgctgatcctgcgttgggagcagagcccacaaccaactattccaatcgtgggcatcgtagctggcctcgttgtacttggagctgtggtgacaggcgctgtcgtcgcagccgtgatgtggcggaaaaaaagcagcgatcgtaatcgagggtcttattcccaggccgccgcatattcagttgtcagcggtaatcttatgattacatggtggtcatccctctttttattaggcgtgctgtttcagggctatctgggctgtctgaggtctcatagtgtccttggaaggcgtaaggtgggagacatgtggatcctgtttttcctctggttatggacaagttttaacaccgcttttctggccctgcagtctctgcgcttcggatttggcttccgtaggggaagatccttcttgctccgttcatggcaccatctgatgaaaagagttcagattaaaatctttgactag

SEQ ID NO: 38915 - DNA, 1260 bp, Artificial Sequence
  derived and/or modified sequence
atggccccccgttctttgctgctcctcctcagtggggctcttgctctgacagatacttgggcgggtagccattcacttagatatttttccactgcggtgagtcggccggggagaggagagccaagatatattgccgtggaaccatgggtggagcaggagggtccccagtattgggaatggacgactggctacgctaaagctaatgcccagactgacagagtggccttacggaacctgctgcggagatacaaccaaagtgaggctggatcccacacacttcaaggaatgaatgggtgtgatatgggcccagatggtcggttgctgagaggttaccatcagcacgcctatgacggaaaagactatattagcctcaatgaggacctccgtagttggactgccgctgataccgtggctcagatcacacaacgtttttacgaggccgaggagtatgccgaggagtttcgtacatatttggagggagagtgtctggagctcctgcggaggtatttggagaatgggaaggagaccttacagcgtgcagacccacctaaagcacatgtggcccaccatcccatttccgatcatgaggccaccttgagatgctgggccttgggcttctatccagcggagatcactctgacttggcagcgcgacggagaggagcagacgcaagacaccgagctagtggagaccagaccagctggcgacggaacgttccagaaatgggccgcagtggtcgtgcctagtggcgaggagcaaaggtatacctgtcacgtccagcatgagggtctgccgcagcctctgatcttgaggtgggaacagtccccccagcccactattcccatcgtggggatcgttgcagggttggtggtcctgggggctgtcgtaaccggtgccgtggttgctgctgtaatgtggcgcaagaaatcctcagaccggaatcgggggtcatactcccaggctgccgcgtatagcgtagttagcgggctgttgatgatcacctggtggagttccttgtttttgctcggggtgctgtttcagggatatctgggctgcctgcggtcccactctgtcctggggaggagaaaagtgggcgatatgtggatcctgttctttctgtggctgtggacttcattcaacacagcgttcttggccctacagtccttaaggtttggcttcggctttagaaggggacggagcttcctgcttagatcatggcaccacttgatgaagcgagtgcaaataaaaatttttgattag

SEQ ID NO: 38916 - DNA, 1506 bp, Artificial Sequence
  derived and/or modified sequence
aaagtcccacgcaccccgcgggactcatatttttcccagacgcggaggttggggtcatggcgccccgaagcctcctcctgctgctctcaggggccctggccctgaccgatacttgggcgggctcccactccttgaggtatttcagcaccgctgtgtcgcggcccggccgcggggagccccgctacatcgccgtggagtacgtagacgacacgcaattcctgcggttcgacagcgacgccgcgattccgaggatggagccgcgggagccgtgggtggagcaagaggggccgcagtattgggagtggaccacagggtacgccaaggccaacgcacagactgaccgagtggccctgaggaacctgctccgccgctacaaccagagcgaggctgggtctcacaccctccagggaatgaatggctgcgacatggggcccgacggacgcctcctccgcgggtatcaccagcacgcgtacgacggcaaggattacatctccctgaacgaggacctgcgctcctggaccgcggcggacaccgtggctcagatcacccagcgcttctatgaggcagaggaatatgcagaggagttcaggacctacctggagggcgagtgcctggagttgctccgcagatacttggagaatgggaaggagacgctacagcgcgcagatcctccaaaggcacacgttgcccaccaccccatctctgaccatgaggccaccctgaggtgctgggccctgggcttctaccctgcggagatcacgctgacctggcagcgggatggggaggaacagacccaggacacagagcttgtggagaccaggcctgcaggggatggaaccttccagaagtgggccgctgtggtggtgcctcctggagaggaacagagatacacatgccatgtgcagcacgaggggctgccccagcccctcatcctgagatgggagcagtctccccagcccaccatccccatcgtgggcatcgttgctggccttgttgtccttggagctgtggtcactggagctgtggtcgctgctgtgatgtggaggaagaagagctcagatagaaacagagggagctactctcaggctgcagcctactcagtggtcagcggaaacttgatgataacatggtggtcaagcttatttctcctgggggtgctcttccaaggatatttgggctgcctccggagtcacagtgtcttgggccgccggaaggtgggtgacatgtggatcttgttttttttgtggctgtggacatctttcaacactgccttcttggccttgcaaagccttcgctttggcttcggctttaggaggggcaggagcttccttcttcgttcttggcaccatcttatgaaaagggtccagattaagatttttgactgagtcattctaaagtaagttgcaagacccatgatactagaccactaaatacttcatcacacacctcctaagaataagaaccaacattatcacaccaaagaaaataaataattccataatatta

SEQ ID NO: 38917 - DNA, 1506 bp, Artificial Sequence
  derived and/or modified sequence
aaagtcccacgcaccccgcgggactcatatttttcccagacgcggaggttggggtcatggcgccccgaagcctcctcctgctgctctcaggggccctggccctgaccgatacttgggcgggctcccactccttgaggtatttcagcaccgctgtgtcgcggcccggccgcggggagccccgctacatcgccgtggagtacgtagacgacacgcaattcctgcggttcgacagcgacgccgcgattccgaggatggagccgcgggagccgtgggtggagcaagaggggccgcagtattgggagtggaccacagggtacgccaaggccaacgcacagactgaccgagtggccctgaggaacctgctccgccgctacaaccagagcgaggctgggtctcacaccctccagggaatgaatggctgcgacatggggcccgacggacgcctcctccgcgggtatcaccagcacgcgtacgacggcaaggattacatctccctgaacgaggacctgcgctcctggaccgcggcggacaccgtggctcagatcacccagcgcttctatgaggcagaggaatatgcagaggagttcaggacctacctggagggcgagtgcctggagttgctccgcagatacttggagaatgggaaggagacgctacagcgcgcagatcctccaaaggcacacgttgcccaccaccccatctctgaccatgaggccaccctgaggtgctgggccctgggcttctaccctgcggagatcacgctgacctggcagcgggatggggaggaacagacccaggacacagagcttgtggagaccaggcctgcaggggatggaaccttccagaagtgggccgctgtggtggtgccttctggagaggaacagagatacacatgccatgtgcagcacgaggggctgccccagcccctcatcctgagatgggagcagtctccccagcccaccatccccatcgtgggcatcgttgctggccttgttgtccttggagctgtggtcactggagctgtggtcgctgctgtgatgtggaggaagaagagctcagatagaaacagagggagctactctcaggctgcagcctactcagtggtcagcggaaacttgatgataacatggtggtcaagcttatttctcctgggggtgctcttccaaggatatttgggctgcctccggagtcacagtgtcttgggccgccggaaggtgggtgacatgtggatcttgttttttttgtggctgtggacatctttcaacactgccttcttggccttgcaaagccttcgctttggcttcggctttaggaggggcaggagcttccttcttcgttcttggcaccatcttatgaaaagggtccagattaagatttttgactgagtcattctaaagtaagttgcaagacccatgatactagaccactaaatacttcatcacacacctcctaagaataagaaccaacattatcacaccaaagaaaataaataattccataatatta

SEQ ID NO: 38918 - DNA, 495 bp, Artificial Sequence
  derived and/or modified sequence
ctgctgtgatgtggaggaagaagagctcaggacattttcttcccatagatagaaacagagggagctactctcaggctgcagcctactcagtggtcagcggaaacttgatgataacatggtggtcaagcttatttctcctgggggtgctcttccaaggatatttgggctgcctccggagtcacagtgtcttgggccgccggaaggtgggtgacatgtggatcttgttttttttgtggctgtggacatctttcaacactgccttcttggccttgcaaagccttcgctttggcttcggctttaggaggggcaggagcttccttcttcgttcttggcaccatcttatgaaaagggtccagattaagatttttgactgagtcattctaaagtaagttgcaagacccatgatactagaccactaaatacttcatcacacacctcctaagaataagaaccaacattatcacaccaaagaaaataaataattccataatatta

SEQ ID NO: 38919 - DNA, 1506 bp, Artificial Sequence
  derived and/or modified sequence
aaagtcccacgcaccccgcgggactcatatttttcccagacgcggaggttggggtcatggcgccccgaagcctcctcctgctgctctcaggggccctggccctgaccgatacttgggcaggctcccactccttgaggtatttcagcaccgctgtgtcgcggcccggccgcggggagccccgctacatcgccgtggagtacgtagacgacacgcaattcctgcggttcgacagcgacgccgcgattccgaggatggagccgcgggagccgtgggtggagcaagaggggccgcagtattgggagtggaccacagggtacgccaaggccaacgcacagactgaccgagtggccctgaggaacctgctccgccgctacaaccagagcgaggctgggtctcacaccctccagggaatgaatggctgcgacatggggcccgacggacgcctcctccgcgggtatcaccagcacgcgtacgacggcaaggattacatctccctgaacgaggacctgcgctcctggaccgcggcggacaccgtggctcagatcacccagcgcttctatgaggcagaggaatatgcagaggagttcaggacctacctggagggcgagtgcctggagttgctccgcagatacttggagaatgggaaggagacgctacagcgcgcagatcctccaaaggcacacgttgcccaccaccccatctctgaccatgaggccaccctgaggtgctgggccctgggcttctaccctgcggagatcacgctgacctggcagcgggatggggaggaacagacccaggacacagagcttgtggagaccaggcctgcaggggatggaaccttccagaagtgggccgctgtggtggtgccttctggagaggaacagagatacacatgccatgtgcagcacgaggggctgccccagcccctcatcctgagatgggagcagtctccccagcccaccatccccatcgtgggcatcgttgctggccttgttgtccttggagctgtggtcactggagctgtggtcgctgctgtgatgtggaggaagaagagctcagatagaaacagagggagctactctcaggctgcagcctactcagtggtcagcggactcttgatgataacatggtggtcaagcttatttctcctgggggtgctcttccaaggatatttgggctgcctccggagtcacagtgtcttgggccgccggaaggtgggtgacatgtggatcttgttttttttgtggctgtggacatctttcaacactgccttcttggccttgcaaagccttcgctttggcttcggctttaggaggggcaggagcttccttcttcgttcttggcaccatcttatgaaaagggtccagattaagatttttgactgagtcattctaaagtaagttgcaagacccatgatactagaccactaaatacttcatcacacacctcctaagaataagaaccaacattatcacaccaaagaaaataaataattccataatatta

SEQ ID NO: 38920 - DNA, 30 bp, Artificial Sequence
  derived and/or modified sequence
ctgctgtgatgtggaggaagaagagctcag

SEQ ID NO: 38921 - DNA, 1622 bp, Artificial Sequence
  derived and/or modified sequence
cccagacgcggaggttggggtcatggcgccccgaagcctcctcctgctgctctcaggggccctggccctgaccgatacttgggcgggctcccactccttgaggtatttcagcaccgctgtgtcgcggcccggccgcggggagccccgctacatcgccgtggagtacgtagacgacacgcaattcctgcggttcgacagcgacgccgcgattccgaggatggagccgcgggagccgtgggtggagcaagaggggccgcagtattgggagtggaccacagggtacgccaaggccaacgcacagactgaccgagtggccctgaggaacctgctccgccgctacaaccagagcgaggctgggaatgaatggctgcgacatggggcccgacggacgcctcctccgcgggtatcaccagcacgcgtacgacggcaaggattacatctccctgaacgaggacctgcgctcctggaccgcggcggacaccgtggctcagatcacccagcgcttctatgaggcagaggaatatgcagaggagttcaggacctacctggagggcgagtgcctggagttgctccgcagatacttggagaatgggaaggagacgctacagcgcgcagatcctccaaaggcacacgttgcccaccaccccatctctgaccatgaggccaccctgaggtgctgggccctgggcttctaccctgcggagatcacgctgacctggcagcgggatggggaggaacagacccaggacacagagcttgtggagaccaggcctgcaggggatggaaccttccagaagtgggccgctgtggtggtgcctcctggagaggaacagagatacacatgccatgtgcagcacgaggggctgccccagcccctcatcctgagatgggagcagtctccccagcccaccatccccatcgtgggcatcgttgctggccttgttgtccttggagctgtggtcactggagctgtggtcgctgctgtgatgtggaggaagaagagctcagcctactcagtggtcagcggaaacttgatgataacatggtggtcaagcttatttctcctgggggtgctcttccaaggatatttgggctgcctccggagtcacagtgtcttgggccgccggaagcatttctaaggactttcagtaatggagattctatattagcttagagagaattgtttcaaaacatcagaaatgtatacttgaatgaaggacaacatgcatggagaaaggtggacaaaccataagtgggccgtggattttcacaaagtgaacactcaggaaagttgactcatactggtgtccagtgaagaaacccaggcgcataagagggacagttggatctcaggtttgtgcttgatctggaaaaggaagagcagagaccactaggaggcaccactgcactgctcatgagcccaggaggtggatgccggggctgagctcagggtggagagatgtcattgctcatcctccaggttccaggtgaaaacccacctgcccagcccatctggttctccctggttcttcaattctagggaggactgtcttcttctcacctccccggacgatgcttcttgacacaggaaagaggatgtgctgctagggtcatcatgtcct

SEQ ID NO: 38922 - DNA, 495 bp, Artificial Sequence
  derived and/or modified sequence
ctgctgtgatgtggaggaagaagagctcaggacattttcttcccatagatagaaacagagggagctactctcaggctgcagcctactcagtggtcagcggactcttgatgataacatggtggtcaagcttatttctcctgggggtgctcttccaaggatatttgggctgcctccggagtcacagtgtcttgggccgccggaaggtgggtgacatgtggatcttgttttttttgtggctgtggacatctttcaacactgccttcttggccttgcaaagccttcgctttggcttcggctttaggaggggcaggagcttccttcttcgttcttggcaccatcttatgaaaagggtccagattaagatttttgactgagtcattctaaagtaagttgcaagacccatgatactagaccactaaatacttcatcacacacctcctaagaataagaaccaacattatcacaccaaagaaaataaataattccataatatta

SEQ ID NO: 38923 - DNA, 1504 bp, Artificial Sequence
  derived and/or modified sequence
tttctcactcccattgggcgtcgcgtttctagagaagccaatcagtgtcgccgcagttcccaggttctaaagtcccacgcaccccgcgggactcatatttttcccagacgcggaggttggggtcatggcgccccgaagcctcctcctgctgctctcaggggccctggccctgaccgatacttgggcgggctcccactccttgaggtatttcagcaccgctgtgtcgcggcccggccgcggggagccccgctacatcgccgtggagccgtgggtggagcaagaggggccgcagtattgggagtggaccacagggtacgccaaggccaacgcacagactgaccgagtggccctgaggaacctgctccgccgctacaaccagagcgaggctgggtctcacaccctccagggaatgaatggctgcgacatggggcccgacggacgcctcctccgcgggtatcaccagcacgcgtacgacggcaaggattacatctccctgaacgaggacctgcgctcctggaccgcggcggacaccgtggctcagatcacccagcgcttctatgaggcagaggaatatgcagaggagttcaggacctacctggagggcgagtgcctggagttgctccgcagatacttggagaatgggaaggagacgctacagcgcgcagatcctccaaaggcacacgttgcccaccaccccatctctgaccatgaggccaccctgaggtgctgggccctgggcttctaccctgcggagatcacgctgacctggcagcgggatggggaggaacagacccaggacacagagcttgtggagaccaggcctgcaggggatggaaccttccagaagtgggccgctgtggtggtgcctcctggagaggaacagagatacacatgccatgtgcagcacgaggggctgccccagcccctcatcctgagatgggagcagtctccccagcccaccatccccatcgtgggcatcgttgctggccttgttgtccttggagctgtggtcactggagctgtggtcgctgctgtgatgtggaggaagaagagctcagatagaaacagagggagctactctcaggctgcagcctactcagtggtcagcggaaacttgatgataacatggtggtcaagcttatttctcctgggggtgctcttccaaggatatttgggctgcctccggagtcacagtgtcttgggccgccggaaggtgggtgacatgtggatcttgttttttttgtggctgtggacatctttcaacactgccttcttggccttgcaaagccttcgctttggcttcggctttaggaggggcaggagcttccttcttcgttcttggcaccatcttatgaaaagggtccagattaagatttttgactgagtcattctaaagtaagttgcaagacccatgatactagaccactaaatacttcatcacacacctcctaagaataagaaccaacattatcacaccaaagaaaataaataattccataatatt

SEQ ID NO: 38924 - DNA, 1622 bp, Artificial Sequence
  derived and/or modified sequence
cccagacgcggaggttggggtcatggcgccccgaagcctcctcctgctgctctcaggggccctggccctgaccgatacttgggcaggctcccactccttgaggtatttcagcaccgctgtgtcgcggcccggccgcggggagccccgctacatcgccgtggagtacgtagacgacacgcaattcctgcggttcgacagcgacgccgcgattccgaggatggagccgcgggagccgtgggtggagcaagaggggccgcagtattgggagtggaccacagggtacgccaaggccaacgcacagactgaccgagtggccctgaggaacctgctccgccgctacaaccagagcgaggctgggaatgaatggctgcgacatggggcccgacggacgcctcctccgcgggtatcaccagcacgcgtacgacggcaaggattacatctccctgaacgaggacctgcgctcctggaccgcggcggacaccgtggctcagatcacccagcgcttctatgaggcagaggaatatgcagaggagttcaggacctacctggagggcgagtgcctggagttgctccgcagatacttggagaatgggaaggagacgctacagcgcgcagatcctccaaaggcacacgttgcccaccaccccatctctgaccatgaggccaccctgaggtgctgggccctgggcttctaccctgcggagatcacgctgacctggcagcgggatggggaggaacagacccaggacacagagcttgtggagaccaggcctgcaggggatggaaccttccagaagtgggccgctgtggtggtgccttctggagaggaacagagatacacatgccatgtgcagcacgaggggctgccccagcccctcatcctgagatgggagcagtctccccagcccaccatccccatcgtgggcatcgttgctggccttgttgtccttggagctgtggtcactggagctgtggtcgctgctgtgatgtggaggaagaagagctcagcctactcagtggtcagcggactcttgatgataacatggtggtcaagcttatttctcctgggggtgctcttccaaggatatttgggctgcctccggagtcacagtgtcttgggccgccggaagcatttctaaggactttcagtaatggagattctatattagcttagaaagaattgtttcaaaacatcagaaatgtatacttgaatgaaggacaacatgcatggagaaaggtggacaaaccataagtgggccgtggattttcacaaagtgaacactcaggaaagttgactcatactggtgtccagtgaagaaacccaggcgcataagagggacagttggatctcaggtttgtgcttgatctggaaaaggaagagcagagaccactaggaggcaccactgcactgctcatgagcccaggaggtggatgccggggctgagctcagggtggagagatgtcattgctcatcctccaggttccaggtgaaaacccacctgcccagcccatctggttctccctggttcttcaattctagggaggactgtcttcttctcacctccccagacgatgcttcttgacacaggaaagaggatgtgctgctagggtcaccatgtcct

SEQ ID NO: 38925 - DNA, 1504 bp, Artificial Sequence
  derived and/or modified sequence
tttctcactcccattgggcgtcgcgtttctagagaagccaatcagtgtcgccgcagttcccaggttctaaagtcccacgcaccccgcgggactcatatttttcccagacgcggaggttggggtcatggcgccccgaagcctcctcctgctgctctcaggggccctggccctgaccgatacttgggcgggctcccactccttgaggtatttcagcaccgctgtgtcgcggcccggccgcggggagccccgctacatcgccgtggagccgtgggtggagcaagaggggccgcagtattgggagtggaccacagggtacgccaaggccaacgcacagactgaccgagtggccctgaggaacctgctccgccgctacaaccagagcgaggctgggtctcacaccctccagggaatgaatggctgcgacatggggcccgacggacgcctcctccgcgggtatcaccagcacgcgtacgacggcaaggattacatctccctgaacgaggacctgcgctcctggaccgcggcggacaccgtggctcagatcacccagcgcttctatgaggcagaggaatatgcagaggagttcaggacctacctggagggcgagtgcctggagttgctccgcagatacttggagaatgggaaggagacgctacagcgcgcagatcctccaaaggcacacgttgcccaccaccccatctctgaccatgaggccaccctgaggtgctgggccctgggcttctaccctgcggagatcacgctgacctggcagcgggatggggaggaacagacccaggacacagagcttgtggagaccaggcctgcaggggatggaaccttccagaagtgggccgctgtggtggtgccttctggagaggaacagagatacacatgccatgtgcagcacgaggggctgccccagcccctcatcctgagatgggagcagtctccccagcccaccatccccatcgtgggcatcgttgctggccttgttgtccttggagctgtggtcactggagctgtggtcgctgctgtgatgtggaggaagaagagctcagatagaaacagagggagctactctcaggctgcagcctactcagtggtcagcggaaacttgatgataacatggtggtcaagcttatttctcctgggggtgctcttccaaggatatttgggctgcctccggagtcacagtgtcttgggccgccggaaggtgggtgacatgtggatcttgttttttttgtggctgtggacatctttcaacactgccttcttggccttgcaaagccttcgctttggcttcggctttaggaggggcaggagcttccttcttcgttcttggcaccatcttatgaaaagggtccagattaagatttttgactgagtcattctaaagtaagttgcaagacccatgatactagaccactaaatacttcatcacacacctcctaagaataagaaccaacattatcacaccaaagaaaataaataattccataatatt

SEQ ID NO: 38926 - DNA, 1622 bp, Artificial Sequence
  derived and/or modified sequence
cccagacgcggaggttggggtcatggcgccccgaagcctcctcctgctgctctcaggggccctggccctgaccgatacttgggcgggctcccactccttgaggtatttcagcaccgctgtgtcgcggcccggccgcggggagccccgctacatcgccgtggagtacgtagacgacacgcaattcctgcggttcgacagcgacgccgcgattccgaggatggagccgcgggagccgtgggtggagcaagaggggccgcagtattgggagtggaccacagggtacgccaaggccaacgcacagactgaccgagtggccctgaggaacctgctccgccgctacaaccagagcgaggctgggaatgaatggctgcgacatggggcccgacggacgcctcctccgcgggtatcaccagcacgcgtacgacggcaaggattacatctccctgaacgaggacctgcgctcctggaccgcggcggacaccgtggctcagatcacccagcgcttctatgaggcagaggaatatgcagaggagttcaggacctacctggagggcgagtgcctggagttgctccgcagatacttggagaatgggaaggagacgctacagcgcgcagatcctccaaaggcacacgttgcccaccaccccatctctgaccatgaggccaccctgaggtgctgggccctgggcttctaccctgcggagatcacgctgacctggcagcgggatggggaggaacagacccaggacacagagcttgtggagaccaggcctgcaggggatggaaccttccagaagtgggccgctgtggtggtgccttctggagaggaacagagatacacatgccatgtgcagcacgaggggctgccccagcccctcatcctgagatgggagcagtctccccagcccaccatccccatcgtgggcatcgttgctggccttgttgtccttggagctgtggtcactggagctgtggtcgctgctgtgatgtggaggaagaagagctcagcctactcagtggtcagcggaaacttgatgataacatggtggtcaagcttatttctcctgggggtgctcttccaaggatatttgggctgcctccggagtcacagtgtcttgggccgccggaagcatttctaaggactttcagtaatggagattctatattagcttagagagaattgtttcaaaacatcagtaatgtatacttgaatgaaggacaacatgcatggagaaaggtggacaaaccataagtgggccgtggattttcacaaagtgaacactcaggaaagttgactcatactggtgtccagtgaagaaacccaggcgcataagagggacagttggatctcaggtttgtgcttgatctggaaaaggaagagcagagaccactaggaggcaccactgcactgctcatgagcccaggaggtggatgcccaggctgagctcagggtggagagatgtcattgctcatcctccaggttccaggtgaaaacccacctgcccagcccatctgcttctccctggttcttcaattctagggaggactgtcttcttctcacctccccggacgatgcttcttgacacaggaaagaggatgtgctgctagggtcatcatgtcct

SEQ ID NO: 38927 - DNA, 1622 bp, Artificial Sequence
  derived and/or modified sequence
cccagacgcggaggttggggtcatggcgccccgaagcctcctcctgctgctctcaggggccctggccctgaccgatacttgggcgggctcccactccttgaggtatttcagcaccgctgtgtcgcggcccggccgcggggagccccgctacatcgccgtggagtacgtagacgacacgcaattcctgcggttcgacagcgacgccgcgattccgaggatggagccgcgggagccgtgggtggagcaagaggggccgcagtattgggagtggaccacagggtacgccaaggccaacgcacagactgaccgagtggccctgaggaacctgctccgccgctacaaccagagcgaggctgggaatgaatggctgcgacatggggcccgacggacgcctcctccgcgggtatcaccagcacgcgtacgacggcaaggattacatctccctgaacgaggacctgcgctcctggaccgcggcggacaccgtggctcagatcacccagcgcttctatgaggcagaggaatatgcagaggagttcaggacctacctggagggcgagtgcctggagttgctccgcagatacttggagaatgggaaggagacgctacagcgcgcagatcctccaaaggcacacgttgcccaccaccccatctctgaccatgaggccaccctgaggtgctgggccctgggcttctaccctgcggagatcacgctgacctggcagcgggatggggaggaacagacccaggacacagagcttgtggagaccaggcctgcaggggatggaaccttccagaagtgggccgctgtggtggtgccttctggagaggaacagagatacacatgccatgtgcagcacgaggggctgccccagcccctcatcctgagatgggagcagtctccccagcccaccatccccatcgtgggcatcgttgctggccttgttgtccttggagctgtggtcactggagctgtggtcgctgctgtgatgtggaggaagaagagctcagcctactcagtggtcagcggaaacttgatgataacatggtggtcaagcttatttctcctgggggtgctcttccaaggatatttgggctgcctccggagtcacagtgtcttgggccgccggaagcatttctaaggactttcagtaatggagattctatattagcttagagagaattgtttcaaaacatcagaaatgtatacttgaatgaaggacaacatgcatggagaaaggtggacaaaccataagtaggccgtggattttcacaaagtgaacactcaggaaagttgactcatactggtgtccagtgaagaaacccaggcgcataagagggacagttggatctcaggtttgtgcttgatctggaaaaggaagagcagagaccactaggaggcaccactgcactgctcatgagcccaggaggtggatgccggggctgagctcagggtggagagatgtcattgctcatcctccaggttccaggtgaaaacccacctgcccagcccatctggttctccctggttcttcaattctagggaggactgtcttcttctcacctccccggacgatgcttcttgacacaggaaagaggatgtgctgctagggtcatcatgtcct

SEQ ID NO: 38928 - DNA, 1432 bp, Artificial Sequence
  derived and/or modified sequence
tttctcactcccattgggcgtcgggtttctagagaagccaatcagtgtcgccgcagttcccaggttctaaagtcccacgcaccccgcgggactcatatttttcccagacgcggaggttggggtcatggcgccccgaagcctcctcctgctgctctcaggggccctggccctgaccgatacttgggcaggctcccactccttgaggtatttcagcaccgctgtgtcgcggcccggccgcggggagccccgctacatcgccgtggagtacgtagacgacacgcaattcctgcggttcgacagcgacgccgcgattccgaggatggagccgcgggagccgtgggtggagcaagaggggccgcagtattgggagtggaccacagggtacgccaaggccaacgcacagactgaccgagtggccctgaggaacctgctccgccgctacaaccagagcgaggctgggtctcacaccctccagggaatgaatggctgcgacatggggcccgacggacgcctcctccgcgggtatcaccagcacgcgtacgacggcaaggattacatctccctgaacgaggacctgcgctcctggaccgcggcggacaccgtggctcagatcacccagcgcttctatgaggcagaggaatatgcagaggagttcaggacctacctggagggcgagtgcctggagttgctccgcagatacttggagaatgggaaggagacgctacagcgcgcagatcctccaaaggcacacgttgcccaccaccccatctctgaccatgaggccaccctgaggtgctgggccctgggcttctaccctgcggagatcacgctgacctggcagcgggatggggaggaacagacccaggacacagagcttgtggagaccaggcctgcaggggatggaaccttccagaagtgggccgctgtggtggtgccttctggagaggaacagagatacacatgccatgtgcagcacgaggggctgccccagcccctcatcctgagatgggagcagtctccccagcccaccatccccatcgtgggcatcgttgctggccttgttgtccttggagctgtggtcactggagctgtggtcgctgctgtgatgtggaggaagaagagctcagatagaaacagagggagctactctcaggctgcagcctactcagtggtcagcggactcttgatgataacatggtggtcaagcttatttctcctgggggtgctcttccaaggatatttgggctgcctccggagtcacagtgtcttgggccgccggaaggcccagctcctgagtgtctctacctctcaaacaagtattctcatccaggagcaattttcccaccagaggacattagctatgtctggaaaaatgttttgttgccatgactggagtgaggaggaggtgctaccagcatcttgtggggaatga

SEQ ID NO: 38929 - DNA, 1384 bp, Artificial Sequence
  derived and/or modified sequence
tttctcactcccattgggcgtcgggtttctagagaagccaatcagtgtcgccgcagttcccaggttctaaagtcccacgcaccccgcgggactcatatttttcccagacgcggaggttggggtcatggcgccccgaagcctcctcctgctgctctcaggggccctggccctgaccgatacttgggcaggctcccactccttgaggtatttcagcaccgctgtgtcgcggcccggccgcggggagccccgctacatcgccgtggagccgtgggtggagcaagaggggccgcagtattgggagtggaccacagggtacgccaaggccaacgcacagactgaccgagtggccctgaggaacctgctccgccgctacaaccagagcgaggctgggtctcacaccctccagggaatgaatggctgcgacatggggcccgacggacgcctcctccgcgggtatcaccagcacgcgtacgacggcaaggattacatctccctgaacgaggacctgcgctcctggaccgcggcggacaccgtggctcagatcacccagcgcttctatgaggcagaggaatatgcagaggagttcaggacctacctggagggcgagtgcctggagttgctccgcagatacttggagaatgggaaggagacgctacagcgcgcagatcctccaaaggcacacgttgcccaccaccccatctctgaccatgaggccaccctgaggtgctgggccctgggcttctaccctgcggagatcacgctgacctggcagcgggatggggaggaacagacccaggacacagagcttgtggagaccaggcctgcaggggatggaaccttccagaagtgggccgctgtggtggtgccttctggagaggaacagagatacacatgccatgtgcagcacgaggggctgccccagcccctcatcctgagatgggagcagtctccccagcccaccatccccatcgtgggcatcgttgctggccttgttgtccttggagctgtggtcactggagctgtggtcgctgctgtgatgtggaggaagaagagctcagatagaaacagagggagctactctcaggctgcagcctactcagtggtcagcggactcttgatgataacatggtggtcaagcttatttctcctgggggtgctcttccaaggatatttgggctgcctccggagtcacagtgtcttgggccgccggaaggtgggtgacatgtggatcttgttttttttgtggctgtggacatctttcaacactgccttcttggccttgcaaagccttcgctttggcttcggctttaggaggggcaggagcttccttcttcgttcttggcaccatcttatgaaaagggtccagattaagatttttgactga

SEQ ID NO: 38930 - DNA, 1329 bp, Artificial Sequence
  derived and/or modified sequence
atggcccccaggagcctgctgctgctgctgagcggggccctggccctgacagacacctgggccggcagccacagcctgcgctacttcagcacagctgtgtcccggcccggccgcggggagccccgctacatcgctgtggagtatgtggatgacacccagttcctgcgctttgacagtgatgctgccatccccaggatggagccccgggagccctgggtggagcaggagggcccccagtactgggagtggaccaccggctacgccaaggccaatgcccagacagacagagtggccctgaggaacctgctgcggcgctacaaccagagcgaggccggcagccacaccctgcagggcatgaatggctgtgacatgggcccagatggccgcctgctgcggggctaccaccagcacgcctatgatggcaaggactacatcagcctgaatgaagacctgcgctcctggacagctgctgacacagtggcccagatcacccagcgcttctatgaggccgaggagtatgcagaggagttccgcacctacctggagggggagtgcctggagctgctgcggcgctacctggagaatggcaaggagaccctgcagagagctgacccccccaaggcccacgtggcccaccaccccatcagtgaccacgaggccaccctgcgctgctgggccctgggcttctacccagctgagatcaccctgacctggcagagagatggagaggagcagacccaggacacagagctggtggagaccaggcctgctggagatggcaccttccagaagtgggccgctgtggtggtgcccccaggagaggagcagcgctacacctgccacgtgcagcacgagggcctgccccagcccctcatcctgcgctgggagcagagcccccagcccaccatccccatcgtgggcatcgtggccggcctggtggtgctgggcgctgtggtgactggagctgtggtggccgctgtgatgtggaggaagaagagcagtgacaggaacagaggcagctacagccaggccgccgcctacagcgtggtgtctggcaacctgatgatcacctggtggagcagcctcttcctgctgggcgtgctcttccagggctacctgggctgcctgcggagccacagcgtgctgggccgcaggaaggtgggggacatgtggatcctcttcttcctgtggctgtggaccagcttcaacacagccttcctggccctgcagagcctgcgcttcggcttcggcttcagaagaggccgctccttcctgctgcgctcctggcaccacctgatgaagagggtgcagatcaagatctttgattag

SEQ ID NO: 38931 - DNA, 1329 bp, Artificial Sequence
  derived and/or modified sequence
atggcccccaggagcctgctgctgctgctgagcggggccctggccctgacagacacctgggccggcagccacagcctgcgctacttcagcacagctgtgtcccggcccggccgcggggagccccgctacatcgctgtggagtatgtggatgacacccagttcctgcgctttgacagtgatgctgccatccccaggatggagccccgggagccctgggtggagcaggagggcccccagtactgggagtggaccaccggctacgccaaggccaatgcccagacagacagagtggccctgaggaacctgctgcggcgctacaaccagagcgaggccggcagccacaccctgcagggcatgaatggctgtgacatgggcccagatggccgcctgctgcggggctaccaccagcacgcctatgatggcaaggactacatcagcctgaatgaagacctgcgctcctggacagctgctgacacagtggcccagatcacccagcgcttctatgaggccgaggagtatgcagaggagttccgcacctacctggagggggagtgcctggagctgctgcggcgctacctggagaatggcaaggagaccctgcagagagctgacccccccaaggcccacgtggcccaccaccccatcagtgaccacgaggccaccctgcgctgctgggccctgggcttctacccagctgagatcaccctgacctggcagagagatggagaggagcagacccaggacacagagctggtggagaccaggcctgctggagatggcaccttccagaagtgggccgctgtggtggtgcccagcggggaggagcagcgctacacctgccacgtgcagcacgagggcctgccccagcccctcatcctgcgctgggagcagagcccccagcccaccatccccatcgtgggcatcgtggccggcctggtggtgctgggcgctgtggtgactggagctgtggtggccgctgtgatgtggaggaagaagagcagtgacaggaacagaggcagctacagccaggccgccgcctacagcgtggtgtctggcaacctgatgatcacctggtggagcagcctcttcctgctgggcgtgctcttccagggctacctgggctgcctgcggagccacagcgtgctgggccgcaggaaggtgggggacatgtggatcctcttcttcctgtggctgtggaccagcttcaacacagccttcctggccctgcagagcctgcgcttcggcttcggcttcagaagaggccgctccttcctgctgcgctcctggcaccacctgatgaagagggtgcagatcaagatctttgattag

SEQ ID NO: 38932 - DNA, 375 bp, Artificial Sequence
  derived and/or modified sequence
tgagctgtgatgtggaggaagaagagcagcggccacttcctgcccatcgacaggaacagaggcagctacagccaggccgccgcctacagcgtggtgtctggcaacctgatgatcacctggtggagcagcctcttcctgctgggcgtgctcttccagggctacctgggctgcctgcggagccacagcgtgctgggccgcaggaaggtgggggacatgtggatcctcttcttcctgtggctgtggaccagcttcaacacagccttcctggccctgcagagcctgcgcttcggcttcggcttcagaagaggccgctccttcctgctgcgctcctggcaccacctgatgaagagggtgcagatcaagatctttgattag

SEQ ID NO: 38933 - DNA, 1329 bp, Artificial Sequence
  derived and/or modified sequence
atggcccccaggagcctgctgctgctgctgagcggggccctggccctgacagacacctgggccggcagccacagcctgcgctacttcagcacagctgtgtcccggcccggccgcggggagccccgctacatcgctgtggagtatgtggatgacacccagttcctgcgctttgacagtgatgctgccatccccaggatggagccccgggagccctgggtggagcaggagggcccccagtactgggagtggaccaccggctacgccaaggccaatgcccagacagacagagtggccctgaggaacctgctgcggcgctacaaccagagcgaggccggcagccacaccctgcagggcatgaatggctgtgacatgggcccagatggccgcctgctgcggggctaccaccagcacgcctatgatggcaaggactacatcagcctgaatgaagacctgcgctcctggacagctgctgacacagtggcccagatcacccagcgcttctatgaggccgaggagtatgcagaggagttccgcacctacctggagggggagtgcctggagctgctgcggcgctacctggagaatggcaaggagaccctgcagagagctgacccccccaaggcccacgtggcccaccaccccatcagtgaccacgaggccaccctgcgctgctgggccctgggcttctacccagctgagatcaccctgacctggcagagagatggagaggagcagacccaggacacagagctggtggagaccaggcctgctggagatggcaccttccagaagtgggccgctgtggtggtgcccagcggggaggagcagcgctacacctgccacgtgcagcacgagggcctgccccagcccctcatcctgcgctgggagcagagcccccagcccaccatccccatcgtgggcatcgtggccggcctggtggtgctgggcgctgtggtgactggagctgtggtggccgctgtgatgtggaggaagaagagcagtgacaggaacagaggcagctacagccaggccgccgcctacagcgtggtgtctggcctgctgatgatcacctggtggagcagcctcttcctgctgggcgtgctcttccagggctacctgggctgcctgcggagccacagcgtgctgggccgcaggaaggtgggggacatgtggatcctcttcttcctgtggctgtggaccagcttcaacacagccttcctggccctgcagagcctgcgcttcggcttcggcttcagaagaggccgctccttcctgctgcgctcctggcaccacctgatgaagagggtgcagatcaagatctttgattag

SEQ ID NO: 38934 - DNA, 33 bp, Artificial Sequence
  derived and/or modified sequence
tgagctgtgatgtggaggaagaagagcagctag

SEQ ID NO: 38935 - DNA, 780 bp, Artificial Sequence
  derived and/or modified sequence
atgaatggctgtgacatgggcccagatggccgcctgctgcggggctaccaccagcacgcctatgatggcaaggactacatcagcctgaatgaagacctgcgctcctggacagctgctgacacagtggcccagatcacccagcgcttctatgaggccgaggagtatgcagaggagttccgcacctacctggagggggagtgcctggagctgctgcggcgctacctggagaatggcaaggagaccctgcagagagctgacccccccaaggcccacgtggcccaccaccccatcagtgaccacgaggccaccctgcgctgctgggccctgggcttctacccagctgagatcaccctgacctggcagagagatggagaggagcagacccaggacacagagctggtggagaccaggcctgctggagatggcaccttccagaagtgggccgctgtggtggtgcccccaggagaggagcagcgctacacctgccacgtgcagcacgagggcctgccccagcccctcatcctgcgctgggagcagagcccccagcccaccatccccatcgtgggcatcgtggccggcctggtggtgctgggcgctgtggtgactggagctgtggtggccgctgtgatgtggaggaagaagagcagcgcctacagcgtggtgtctggcaacctgatgatcacctggtggagcagcctcttcctgctgggcgtgctcttccagggctacctgggctgcctgcggagccacagcgtgctgggccgcaggaagcacttctag

SEQ ID NO: 38936 - DNA, 375 bp, Artificial Sequence
  derived and/or modified sequence
tgagctgtgatgtggaggaagaagagcagcggccacttcctgcccatcgacaggaacagaggcagctacagccaggccgccgcctacagcgtggtgtctggcctgctgatgatcacctggtggagcagcctcttcctgctgggcgtgctcttccagggctacctgggctgcctgcggagccacagcgtgctgggccgcaggaaggtgggggacatgtggatcctcttcttcctgtggctgtggaccagcttcaacacagccttcctggccctgcagagcctgcgcttcggcttcggcttcagaagaggccgctccttcctgctgcgctcctggcaccacctgatgaagagggtgcagatcaagatctttgattag

SEQ ID NO: 38937 - DNA, 1260 bp, Artificial Sequence
  derived and/or modified sequence
atggcccccaggagcctgctgctgctgctgagcggggccctggccctgacagacacctgggccggcagccacagcctgcgctacttcagcacagctgtgtcccggcccggccgcggggagccccgctacatcgctgtggagccctgggtggagcaggagggcccccagtactgggagtggaccaccggctacgccaaggccaatgcccagacagacagagtggccctgaggaacctgctgcggcgctacaaccagagcgaggccggcagccacaccctgcagggcatgaatggctgtgacatgggcccagatggccgcctgctgcggggctaccaccagcacgcctatgatggcaaggactacatcagcctgaatgaagacctgcgctcctggacagctgctgacacagtggcccagatcacccagcgcttctatgaagctgaggagtatgcagaggagttccgcacctacctggagggagaatgtctggagctgctgcggcgctacctggagaatggcaaggagaccctgcagagagctgacccccccaaggcccacgtggcccaccaccccatcagtgaccacgaggccaccctgcgctgctgggccctgggcttctacccagctgagatcaccctgacctggcagagagatggagaggagcagacccaggacacagagctggtggagaccaggcctgctggagatggcaccttccagaagtgggccgctgtggtggtgcccccaggagaggagcagcgctacacctgccacgtgcagcacgagggcctgccccagcccctcatcctgcgctgggagcagagcccccagcccaccatccccatcgtgggcatcgtggccggcctggtggtgctgggcgctgtggtgactggagctgtggtggccgctgtgatgtggaggaagaagagcagtgacaggaacagaggcagctacagccaggccgccgcctacagcgtggtgtctggcaacctgatgatcacctggtggagcagcctcttcctgctgggcgtgctcttccagggctacctgggctgcctgcggagccacagcgtgctgggccgcaggaaggtgggggacatgtggatcctcttcttcctgtggctgtggaccagcttcaacacagccttcctggccctgcagagcctgcgctttggatttggcttccggcggggccgctccttcctgctgcgctcctggcaccacctgatgaagagggtgcagatcaagatctttgattag

SEQ ID NO: 38938 - DNA, 780 bp, Artificial Sequence
  derived and/or modified sequence
atgaatggctgtgacatgggcccagatggccgcctgctgcggggctaccaccagcacgcctatgatggcaaggactacatcagcctgaatgaagacctgcgctcctggacagctgctgacacagtggcccagatcacccagcgcttctatgaggccgaggagtatgcagaggagttccgcacctacctggagggggagtgcctggagctgctgcggcgctacctggagaatggcaaggagaccctgcagagagctgacccccccaaggcccacgtggcccaccaccccatcagtgaccacgaggccaccctgcgctgctgggccctgggcttctacccagctgagatcaccctgacctggcagagagatggagaggagcagacccaggacacagagctggtggagaccaggcctgctggagatggcaccttccagaagtgggccgctgtggtggtgcccagcggggaggagcagcgctacacctgccacgtgcagcacgagggcctgccccagcccctcatcctgcgctgggagcagagcccccagcccaccatccccatcgtgggcatcgtggccggcctggtggtgctgggcgctgtggtgactggagctgtggtggccgctgtgatgtggaggaagaagagcagcgcctacagcgtggtgtctggcctgctgatgatcacctggtggagcagcctcttcctgctgggcgtgctcttccagggctacctgggctgcctgcggagccacagcgtgctgggccgcaggaagcacttctag

SEQ ID NO: 38939 - DNA, 1260 bp, Artificial Sequence
  derived and/or modified sequence
atggcccccaggagcctgctgctgctgctgagcggggccctggccctgacagacacctgggccggcagccacagcctgcgctacttcagcacagctgtgtcccggcccggccgcggggagccccgctacatcgctgtggagccctgggtggagcaggagggcccccagtactgggagtggaccaccggctacgccaaggccaatgcccagacagacagagtggccctgaggaacctgctgcggcgctacaaccagagcgaggccggcagccacaccctgcagggcatgaatggctgtgacatgggcccagatggccgcctgctgcggggctaccaccagcacgcctatgatggcaaggactacatcagcctgaatgaagacctgcgctcctggacagctgctgacacagtggcccagatcacccagcgcttctatgaagctgaggagtatgcagaggagttccgcacctacctggagggagaatgtctggagctgctgcggcgctacctggagaatggcaaggagaccctgcagagagctgacccccccaaggcccacgtggcccaccaccccatcagtgaccacgaggccaccctgcgctgctgggccctgggcttctacccagctgagatcaccctgacctggcagagagatggagaggagcagacccaggacacagagctggtggagaccaggcctgctggagatggcaccttccagaagtgggccgctgtggtggtgcccagcggggaggagcagcgctacacctgccacgtgcagcacgagggcctgccccagcccctcatcctgcgctgggagcagagcccccagcccaccatccccatcgtgggcatcgtggccggcctggtggtgctgggcgctgtggtgactggagctgtggtggccgctgtgatgtggaggaagaagagcagtgacaggaacagaggcagctacagccaggccgccgcctacagcgtggtgtctggcaacctgatgatcacctggtggagcagcctcttcctgctgggcgtgctcttccagggctacctgggctgcctgcggagccacagcgtgctgggccgcaggaaggtgggggacatgtggatcctcttcttcctgtggctgtggaccagcttcaacacagccttcctggccctgcagagcctgcgctttggatttggcttccggcggggccgctccttcctgctgcgctcctggcaccacctgatgaagagggtgcagatcaagatctttgattag

SEQ ID NO: 38940 - DNA, 780 bp, Artificial Sequence
  derived and/or modified sequence
atgaatggctgtgacatgggcccagatggccgcctgctgcggggctaccaccagcacgcctatgatggcaaggactacatcagcctgaatgaagacctgcgctcctggacagctgctgacacagtggcccagatcacccagcgcttctatgaggccgaggagtatgcagaggagttccgcacctacctggagggggagtgcctggagctgctgcggcgctacctggagaatggcaaggagaccctgcagagagctgacccccccaaggcccacgtggcccaccaccccatcagtgaccacgaggccaccctgcgctgctgggccctgggcttctacccagctgagatcaccctgacctggcagagagatggagaggagcagacccaggacacagagctggtggagaccaggcctgctggagatggcaccttccagaagtgggccgctgtggtggtgcccagcggggaggagcagcgctacacctgccacgtgcagcacgagggcctgccccagcccctcatcctgcgctgggagcagagcccccagcccaccatccccatcgtgggcatcgtggccggcctggtggtgctgggcgctgtggtgactggagctgtggtggccgctgtgatgtggaggaagaagagcagcgcctacagcgtggtgtctggcaacctgatgatcacctggtggagcagcctcttcctgctgggcgtgctcttccagggctacctgggctgcctgcggagccacagcgtgctgggccgcaggaagcacttctag

SEQ ID NO: 38941 - DNA, 1308 bp, Artificial Sequence
  derived and/or modified sequence
atggcccccaggagcctgctgctgctgctgagcggggccctggccctgacagacacctgggccggcagccacagcctgcgctacttcagcacagctgtgtcccggcccggccgcggggagccccgctacatcgctgtggagtatgtggatgacacccagttcctgcgctttgacagtgatgctgccatccccaggatggagccccgggagccctgggtggagcaggagggcccccagtactgggagtggaccaccggctacgccaaggccaatgcccagacagacagagtggccctgaggaacctgctgcggcgctacaaccagagcgaggccggcagccacaccctgcagggcatgaatggctgtgacatgggcccagatggccgcctgctgcggggctaccaccagcacgcctatgatggcaaggactacatcagcctgaatgaagacctgcgctcctggacagctgctgacacagtggcccagatcacccagcgcttctatgaggccgaggagtatgcagaggagttccgcacctacctggagggggagtgcctggagctgctgcggcgctacctggagaatggcaaggagaccctgcagagagctgacccccccaaggcccacgtggcccaccaccccatcagtgaccacgaggccaccctgcgctgctgggccctgggcttctacccagctgagatcaccctgacctggcagagagatggagaggagcagacccaggacacagagctggtggagaccaggcctgctggagatggcaccttccagaagtgggccgctgtggtggtgcccagcggggaggagcagcgctacacctgccacgtgcagcacgagggcctgccccagcccctcatcctgcgctgggagcagagcccccagcccaccatccccatcgtgggcatcgtggccggcctggtggtgctgggcgctgtggtgactggagctgtggtggccgctgtgatgtggaggaagaagagcagtgacaggaacagaggcagctacagccaggccgccgcctacagcgtggtgtctggcctgctgatgatcacctggtggagcagcctcttcctgctgggcgtgctcttccagggctacctgggctgcctgcggagccacagcgtgctgggccgcaggaaggcccagctgctgtctgtgtccaccagccagaccagcatcctgatccaggagcagttcagccaccagaggaccctggccatgtctgggaagatgttctgctgccacgactggagcgaggaggaggtgctgcctgccagctgtggggagtag

SEQ ID NO: 38942 - DNA, 1260 bp, Artificial Sequence
  derived and/or modified sequence
atggcccccaggagcctgctgctgctgctgagcggggccctggccctgacagacacctgggccggcagccacagcctgcgctacttcagcacagctgtgtcccggcccggccgcggggagccccgctacatcgctgtggagccctgggtggagcaggagggcccccagtactgggagtggaccaccggctacgccaaggccaatgcccagacagacagagtggccctgaggaacctgctgcggcgctacaaccagagcgaggccggcagccacaccctgcagggcatgaatggctgtgacatgggcccagatggccgcctgctgcggggctaccaccagcacgcctatgatggcaaggactacatcagcctgaatgaagacctgcgctcctggacagctgctgacacagtggcccagatcacccagcgcttctatgaagctgaggagtatgcagaggagttccgcacctacctggagggagaatgtctggagctgctgcggcgctacctggagaatggcaaggagaccctgcagagagctgacccccccaaggcccacgtggcccaccaccccatcagtgaccacgaggccaccctgcgctgctgggccctgggcttctacccagctgagatcaccctgacctggcagagagatggagaggagcagacccaggacacagagctggtggagaccaggcctgctggagatggcaccttccagaagtgggccgctgtggtggtgcccagcggggaggagcagcgctacacctgccacgtgcagcacgagggcctgccccagcccctcatcctgcgctgggagcagagcccccagcccaccatccccatcgtgggcatcgtggccggcctggtggtgctgggcgctgtggtgactggagctgtggtggccgctgtgatgtggaggaagaagagcagtgacaggaacagaggcagctacagccaggccgccgcctacagcgtggtgtctggcctgctgatgatcacctggtggagcagcctcttcctgctgggcgtgctcttccagggctacctgggctgcctgcggagccacagcgtgctgggccgcaggaaggtgggggacatgtggatcctcttcttcctgtggctgtggaccagcttcaacacagccttcctggccctgcagagcctgcgctttggatttggcttccggcggggccgctccttcctgctgcgctcctggcaccacctgatgaagagggtgcagatcaagatctttgattag

SEQ ID NO: 38943 - DNA, 1329 bp, Artificial Sequence
  derived and/or modified sequence
atggccccccggagcctgctgctgctgctgagcggcgccctggccctaaccgatacatgggctggttcccactcactgcgctacttctcaactgccgttagccgaccaggcaggggtgaacctaggtacatcgcggtggagtatgtggacgatacacagtttctgcggtttgatagcgatgccgcaatccctaggatggaacctagggaaccctgggtggagcaggagggtccccagtactgggaatggaccaccggctacgccaaagccaatgctcagacagatagggtcgccctgaggaatctattacgacgttataatcagagcgaggccggctctcacacacttcagggcatgaacggatgcgacatgggccctgacggcagactgctccgggggtaccaccagcacgcctacgatgggaaagactatatcagtctaaatgaggacttaagaagctggactgctgcggacacagttgcacagattacccagcggttctacgaagccgaggagtacgcggaagaatttcggacctatctggaaggagagtgcctggagcttctgcggcggtacctcgaaaacggaaaagagaccctgcagagggcggatccccctaaagcccacgtggctcatcaccctatctcggatcacgaagcgactttaagatgttgggctctgggtttctaccctgcggagattaccctaacatggcagcgtgacggcgaggaacagacacaggataccgagctagtggagacaagacctgcgggggatggtactttccagaagtgggccgcggtggtagttccgccgggcgaagagcagaggtacacttgccacgtgcaacatgagggactgcctcagcctctcatcctacggtgggagcagagccctcagcccacaattccaattgtggggattgtggccggtctcgtagtgctgggtgccgttgtgaccggcgccgtggtagccgccgtcatgtggcgaaagaaaagcagtgacagaaatcgcggcagctatagccaggctgctgcttactctgtcgtctcagggaatcttatgataacgtggtggtcttctctatttctgctgggcgttctgttccaaggatacttggggtgcctcaggagccatagtgtcctggggcgtcgtaaggtcggcgacatgtggattttgttcttcttatggctttggacttccttcaacaccgcgtttttagctctgcaatcccttcgcttcggttttgggttccggcgcggacgctcttttctcctgcggagctggcaccatctcatgaagagggtgcaaattaaaattttcgactag

SEQ ID NO: 38944 - DNA, 1329 bp, Artificial Sequence
  derived and/or modified sequence
atggccccccggagcctgctgctgctgctgagcggcgccctggcccttaccgacacctgggccggaagccactcgttaagatatttctcgacagccgtgtcgagacctggtagaggagagccgcgctatatcgctgtggagtatgtggacgacacacagttcctccgtttcgattctgatgccgccataccccggatggaaccgagagagccttgggttgagcaggaggggccgcagtactgggagtggaccactgggtatgcaaaggccaatgcccaaacagaccgcgtggccctccgcaacctgttaaggcgttacaaccagtcagaggccggtagtcacacactgcaagggatgaacggctgtgacatgggccccgatggcaggttactgagggggtatcaccagcacgcatatgacggcaaggattacatctctctcaatgaggatctgaggtcatggacggcagccgacacagtcgcacaaattactcagcgtttttacgaggctgaggagtatgccgaagagttccggacgtacctggaaggtgaatgtctggagctcctgcgcaggtaccttgagaatggcaaggagactctccagcgtgcagacccacctaaggcccatgtcgctcaccacccgatctccgaccacgaggccacacttagatgctgggcactgggattttaccctgcggagatcacactcacgtggcagagggatggcgaggagcaaacacaggacaccgaacttgtcgagactcggcccgctggggatgggaccttccaaaaatgggccgccgtcgtggtgccaagtggggaagaacagcgctatacttgtcacgtgcagcacgagggcttaccccaacctttgatactgcgatgggagcaaagcccccagccgacgattcctatcgtgggcatcgtggctgggttagtcgtgctcggtgccgtggtgaccggggccgtagtcgcagccgtcatgtggcggaagaaatcatccgacaggaatcgagggtcctatagccaagccgctgcctattccgtcgtttcggggaacttaatgatcacgtggtggagctctctctttctgctgggtgtccttttccagggctacctcggctgtctgagaagccattcggttctgggaaggcggaaggtgggtgacatgtggatcttgttttttctttggctttggacgtcatttaacaccgcatttctggcattacagagtctgcggtttggatttgggtttcggcgcggcagatccttcctcctccgcagctggcatcacctgatgaaaagggttcagataaagatatttgattag

SEQ ID NO: 38945 - DNA, 1329 bp, Artificial Sequence
  derived and/or modified sequence
atggccccccggagcctgctgctgctgctgagcggcgccctggccctcaccgatacctgggctggctctcacagtctaaggtacttttccacagctgtgtccaggcccggacgtggtgaacccagatatattgctgtggagtacgtggacgatacacagttcttgcgcttcgatagcgatgctgccatccctaggatggagcctcgggagccctgggtagaacaagaggggccacagtactgggagtggaccaccggctatgctaaggccaacgcacagactgatagagtcgcgctgcggaacttactgcgacgctacaaccagagcgaggctggaagtcatactctgcaagggatgaatggttgtgatatggggccagatggcagattactacgagggtaccaccaacatgcctacgacggtaaagattatattagtctgaatgaagacctccgtagttggacagccgcagacacagttgctcagatcacgcagcgcttttacgaggcagaggaatacgccgaggagttccgtacgtacttggaaggagagtgtctggagttactaagacggtacctggagaacggcaaggaaactctccagcgcgcagacccaccaaaggcgcacgtggcccaccatccaatatccgaccatgaggccaccttgagatgctgggctctaggtttctaccccgcagaaattactctgacatggcagcgggacggtgaagagcagacccaggacaccgaactggttgagactcgcccagctggcgacggaacctttcagaagtgggctgctgtagtggtgcctagcggagaggagcagagatacacttgccacgtgcagcacgagggtctcccccagccccttattctccggtgggaacagtcccctcagcctacgattcccattgtgggtattgtggcaggactcgttgtactgggcgcagtggtcaccggcgccgtcgtggcggccgttatgtggcgtaaaaaatctagcgatcgaaatcgtgggagctacagtcaagccgcggcttacagcgttgtctccggcaaccttatgataacctggtggtcctcattgttcctgcttggagtgctgttccagggctacctgggatgtctgcgctctcattcagtgctggggcggagaaaagtaggcgacatgtggattcttttcttcctgtggttgtggacgtcttttaatactgcgttccttgccttgcaaagcctgcggttcggctttggttttagacgagggagaagttttctcctgcgcagttggcatcatctgatgaagagggtacaaatcaagattttcgattag

SEQ ID NO: 38946 - DNA, 375 bp, Artificial Sequence
  derived and/or modified sequence
tgagccgtgatgtggcggaagaagagcagcggccacttcctgcccatagaccgtaatagaggctcctactctcaggccgcggcttatagtgtcgtgtcaggaaatctgatgatcacttggtggtcctcgcttttcctccttggggtactgtttcaggggtatcttggatgcctgcgttctcatagtgtcttggggaggcgaaaagtgggagatatgtggatactcttctttctgtggctgtggaccagcttcaacactgcctttcttgctctccagagtctgcgcttcggcttcggctttaggcgagggcgctcgtttctgttgcgatcttggcatcacctaatgaaacgagtccaaattaagatcttcgattag

SEQ ID NO: 38947 - DNA, 375 bp, Artificial Sequence
  derived and/or modified sequence
tgagccgtgatgtggcggaagaagagcagcggccacttcctgcccatcgatcgcaatcgcggctcctatagtcaggcggccgcatattcagtcgtctccggcaatctgatgatcacgtggtggtcctccctttttttgctgggagtgctgttccagggctacctgggttgcttgagatctcactccgtgctggggcgtcggaaagttggtgatatgtggatccttttctttctgtggttgtggacctcatttaataccgccttcctggcacttcaatcccttagattcggcttcggattcagacgcggcagatcttttctcctgcggtcatggcaccacctgatgaagagagtccagataaaaatcttcgattag

SEQ ID NO: 38948 - DNA, 1329 bp, Artificial Sequence
  derived and/or modified sequence
atggccccccggagcctgctgctgctgctgagcggcgccctggccctgacggatacctgggctggcagccatagcttacgctacttcagcacagctgtttcccgaccaggccggggcgaacctcgatacattgccgtggagtacgttgatgacacacaattcctgagatttgactcagacgccgccatcccgcgaatggagcctcgcgaaccgtgggtggaacaggaggggcctcagtactgggagtggactactggctatgctaaggcgaacgcccagaccgatcgggtggccctgagaaacctgctgcgacggtacaaccagtccgaggctggcagccacaccctgcaaggcatgaatggatgtgatatggggccggacgggcggttgctgcgcgggtaccatcagcatgcttatgatggcaaggactacatttcacttaatgaggacctgagatcttggacagccgccgacactgtggcacaaatcacccagcggttctacgaggccgaggagtatgccgaggagttccggacctatctagaaggcgagtgtctagagttgctacgccggtacctcgagaacggaaaggaaaccctgcagcgagctgaccctccaaaggctcacgtggctcatcacccgattagcgaccatgaggccactctcaggtgttgggcgctcggattttaccctgcagaaatcacactcacgtggcaacgggacggggaagagcagacacaggatacagagttagttgagacacggcctgcaggggatggcacgttccagaagtgggcagccgtggttgtacctagcggggaggaacagaggtacacctgccacgtccaacacgagggcctgccacagcccctgatcctgcgctgggaacagtctccccaacctactattccaatcgtcgggatcgttgcaggtttagtggttctgggcgccgtggtgacgggcgccgttgtcgccgcagtgatgtggcgaaaaaaatccagtgatagaaataggggctcctattcccaggccgcagcttatagtgtggtgtcaggtaacctgatgataacctggtggtccagtttgttcctattaggtgttctcttccagggatacctgggatgtctccgaagccattctgtgcttgggaggcgcaaagtgggcgatatgtggatcctgttctttctatggctctggacctcctttaataccgctttcctcgccctgcagtccttgaggttcggctttggctttcgtcgcggcagatcgtttctgttgaggtcttggcatcacctgatgaaaagggtacagattaagatttttgactag

SEQ ID NO: 38949 - DNA, 1329 bp, Artificial Sequence
  derived and/or modified sequence
atggccccccggagcctgctgctgctgctgagcggcgccctggccctgactgatacttgggccgggtcacacagcctgaggtacttctcgacagccgtgtcgcggcccgggaggggggaacctaggtacatcgctgtggaatatgtcgacgatacccaattcctcaggttcgacagcgatgctgctataccacgaatggaaccaagagaaccatgggtggagcaggagggaccacagtattgggaatggactaccgggtacgcaaaggcgaacgcccagaccgatagggtcgccctgcgcaatctcttaaggaggtataatcaaagcgaagccgggtcccacacgctccaaggcatgaacggttgtgacatgggtccagacggcagactgctgcgtggctatcaccagcacgcatatgatggcaaagactatatcagcctcaacgaagacctgagatcctggaccgcagccgacactgtggctcagatcacccaacggttttatgaggcggaggaatacgctgaagaattccggacttatcttgagggggagtgcctagaactgttaaggaggtacctggaaaatgggaaagagacactccagcgagctgaccccccaaaagctcacgtggcccaccatcctataagcgatcacgaagccactctcagatgttgggccctcgggttctaccctgccgaaataactttaacatggcagagggatggagaggaacaaacacaggacacagaactggttgaaactaggcccgcgggtgacggaacattccagaagtgggccgccgtcgtcgtaccttcgggggaggagcagcgttatacctgtcacgtgcagcatgaaggactgccccagcctctgatacttaggtgggagcagtctccccagcctaccatcccgatcgtcggcattgtggcagggcttgttgtgctgggagcagtggtgacaggtgccgttgtcgctgccgtgatgtggagaaagaaaagctcagaccgaaacagggggtcttactctcaagctgccgcctacagcgtcgtgtccggcctgttgatgatcacctggtggagtagcctattcctgttaggtgttctgtttcaagggtatctaggctgtttgcgctcacactccgttctgggccgtcgaaaggttggcgacatgtggatcctattctttctttggctctggacctccttcaataccgcatttctggctctacagtccctgcgtttcggctttggtttcaggaggggcagatcttttcttttgcgctcttggcatcatttgatgaagagggtgcagattaagatctttgactag

SEQ ID NO: 38950 - DNA, 33 bp, Artificial Sequence
  derived and/or modified sequence
tgagccgtgatgtggcggaagaagagcagctag

SEQ ID NO: 38951 - DNA, 780 bp, Artificial Sequence
  derived and/or modified sequence
atgaacggctgcgacatgggccccgacggccggctgctgcggggctaccaccagcacgcttacgatgggaaggactacatcagtctcaacgaggaccttaggagttggaccgcggccgataccgtggcacagattacgcagaggttctacgaggctgaagagtatgccgaagaatttcggacctacctggagggcgaatgcctagaactgctgaggcgttatctggagaacggcaaagagacactacagcgagctgatccgcccaaggcccacgtagctcaccatccaatctccgaccacgaagcaaccttgcgctgctgggccttaggcttttaccccgcagagatcaccttaacatggcagcgagacggggaagagcagactcaagacactgagctcgtggagactaggcccgctggggatggcacattccaaaagtgggctgctgtggtcgttccacctggggaagaacagcgatacacatgccatgtgcagcacgaaggcctccctcagcctctcatactaagatgggagcaatctccccagcccacaatccccatagttggcatcgtggccggccttgtggttctgggcgccgtcgtaaccggggctgttgtggccgctgttatgtggcgcaagaagagcagtgcgtattctgttgtgtcagggaacctgatgatcacctggtggtcttcgttgtttctcttaggtgttttgttccagggctatctgggatgtctgagaagtcactcagtgctggggcgacggaagcatttctag

SEQ ID NO: 38952 - DNA, 375 bp, Artificial Sequence
  derived and/or modified sequence
tgagccgtgatgtggcggaagaagagcagcggccacttcctgcccatcgatcgcaatcgtggctcatattcacaggcagcggcctactcggtagtgtctggtaaccttatgataacttggtggagcagtctgttcctcttaggtgtactctttcaggggtacttaggctgcttgcgaagccacagtgtgctcggacggcgtaaggtcggagacatgtggatcctgttttttttatggctatggacctctttcaacacagccttcctggctctccaatccctaaggtttggcttcggattccggcgaggacgaagcttcttgctgagatcctggcaccacctgatgaaacgggtgcaaattaagatcttcgattag

SEQ ID NO: 38953 - DNA, 1329 bp, Artificial Sequence
  derived and/or modified sequence
atggccccccggagcctgctgctgctgctgagcggcgccctggccctaaccgacacatgggccggtagtcattcactcaggtacttctcgactgctgtgtctcgacccgggagaggggagccaaggtatatcgctgttgagtacgtggatgacacccagtttcttcggttcgattcggatgccgccattccacgaatggagccgcgcgaaccttgggtcgagcaagaagggccccagtactgggagtggaccaccggatatgccaaggctaatgcacagactgatcgagtggccttaagaaatcttctgcgacggtacaatcagagtgaggccggctcgcataccctgcagggaatgaatggttgtgatatggggcccgacggccgtttgttacgaggctaccatcaacacgcctacgatgggaaagactacattagcctgaacgaggatcttagaagctggacagctgccgacaccgtagcacagatcacccagagattttacgaggcagaagagtatgccgaggaattccgaacttatttggagggtgagtgtctcgagcttctccgacggtatctcgagaatgggaaagagacgctgcagcgggctgatccgccgaaggctcacgtcgctcaccatcccatatccgaccacgaagcaactctgagatgctgggcccttggattctatcctgctgagatcacactcacctggcaacgcgacggcgaagagcaaacccaagacaccgaattggtcgagactaggccagctggcgatggaactttccagaaatgggccgccgtagtggttccatcaggggaggagcagcgatatacatgccacgtgcagcacgaaggactgccacagcccctgatcctgcgctgggagcaaagtccccagcctacgattcctatcgtggggatcgtcgctggcctggtggtcctgggggcggtcgtgacgggggccgtggtggctgccgtgatgtggagaaaaaaatcctctgaccggaatcggggttcttacagccaagcagcggcttatagcgtggtttcaggcaatctgatgattacttggtggagttcgcttttcctactaggtgtcctttttcagggctacctggggtgcctacgcagccatagtgtgcttggcagaagaaaagtgggggacatgtggattctgttcttcttgtggctgtggacctcgttcaacactgcatttttggcactgcaatctctgcggtttggtttcggttttaggaggggccgaagttttctgcttaggtcatggcaccacctcatgaagcgggttcagatcaagatctttgattag

SEQ ID NO: 38954 - DNA, 375 bp, Artificial Sequence
  derived and/or modified sequence
tgagccgtgatgtggcggaagaagagcagcggccacttcctgcccattgataggaaccgcggatcatacagccaggccgccgcatatagtgtggtcagcggactgctgatgatcacttggtggtcttccctgttcttgctgggggtcttattccagggatatctggggtgcctccgttctcactcagttctgggtaggagaaaagtgggggacatgtggatcctgttttttctgtggctttggaccagcttcaatacagcttttctggctctgcaatcgctcagattcggctttgggttccgccgcggcaggtcctttttactcagatcttggcaccatttaatgaaacgagtgcagattaagattttcgattag

SEQ ID NO: 38955 - DNA, 1260 bp, Artificial Sequence
  derived and/or modified sequence
atggccccccggagcctgctgctgctgctgagcggcgccctggccttgaccgacacttgggctggtagtcattcactgcgctattttagcaccgcagtaagtaggccaggccggggcgagccacgctatattgctgtggagccctgggtggaacaggagggaccacagtactgggaatggacaacagggtatgcaaaggctaatgctcagacagatcgcgtagccttgcggaatcttctcagacgatacaaccagtccgaagcaggatctcatacactccagggaatgaatggttgcgacatgggtccagatggcagactgttacggggctaccaccagcatgcctacgatggaaaggactatatatcccttaacgaagaccttcggagctggactgctgccgacacagtggcgcagatcacacagcggttctacgaggctgaggaatatgcagaggagtttcgcacctatctggagggcgaatgcctggagttactgcggcggtatctcgagaatggtaaagaaacactacagcgagctgatcctcctaaagctcatgttgcccatcacccgataagcgaccacgaagcaacattacggtgttgggccctgggcttttatcccgccgagatcacattgacctggcagagagatggtgaagagcaaacccaggacaccgagctggttgaaacccggccagctggcgatgggacctttcagaaatgggccgcagtcgtcgtgccccctggagaagagcaacggtacacctgtcacgtccagcatgaaggcctacctcagccactcatcctcaggtgggagcaaagcccccagcccacaattccaatcgtgggcatcgtcgctggactcgttgttctgggggctgtagtgactggggccgttgtggctgcagttatgtggagaaagaagtctagtgatcgtaacagagggtcgtatagtcaggctgcggcttatagtgttgttagtggaaacctcatgatcacctggtggtcctcgctgttcctgcttggtgttttgttccagggatatctgggctgcttacggagccattcagttctgggacgccgaaaggtcggggacatgtggatcctgtttttcctgtggctttggacctcatttaatacagccttcctagcgctccaatctctgaggttcggatttggttttaggaggggacggagcttcctgttgcgaagctggcatcaccttatgaagagggttcagataaagatctttgattag

SEQ ID NO: 38956 - DNA, 375 bp, Artificial Sequence
  derived and/or modified sequence
tgagccgtgatgtggcggaagaagagcagcggccacttcctgcccatcgataggaatcggggcagttactcccaggcagcagcgtacagcgttgtgtctggcaatctgatgattacttggtggagttctctgtttttgcttggcgtcctattccagggctacctcgggtgtttacgctctcactctgtcctgggcaggcgcaaggtgggagatatgtggatattgtttttcctatggctctggacatcttttaacaccgccttcctggccttgcagagcctccggttcggatttgggttccgtagaggccgatctttcttgctgcggagctggcaccacttaatgaaacgcgtgcaaattaaaatttttgactag

SEQ ID NO: 38957 - DNA, 375 bp, Artificial Sequence
  derived and/or modified sequence
tgagccgtgatgtggcggaagaagagcagcggccacttcctgcccattgataggaatcgtggctcctactcgcaggccgccgcttacagtgtggtgtccggaaatttgatgataacatggtggagttctctgttcctgcttggcgtgctattccagggctacctcggatgcctccggagccacagcgtattaggccgccgaaaggtaggagatatgtggatcctctttttcctctggttatggacctccttcaacactgccttcctggcgctacaatcactccggtttgggtttgggtttaggaggggacgttccttccttctgagaagctggcaccacctcatgaaacgggtgcagataaagatatttgactag

SEQ ID NO: 38958 - DNA, 780 bp, Artificial Sequence
  derived and/or modified sequence
atgaacggctgcgacatgggccccgacggccggctgctgcggggctaccatcagcatgcctatgacggcaaagactacatttcactaaacgaggatttgcggagctggaccgctgctgatacagtggcccagatcacccagaggttctatgaggcagaagaatacgccgaagagttccggacatacctagagggcgagtgcctcgagcttctgcgccggtatctcgagaatggaaaggagaccttgcaaagagctgaccctcctaaggcacacgtggctcaccacccgatctctgaccatgaggcaacacttagatgttgggcccttgggttctatccagccgagatcacactcacatggcagcgggacggcgaagaacagacacaggatactgagctggtagagacacgtcctgcaggggatggaacatttcagaaatgggcggccgtggtggtgccatctggagaggagcagagatatacgtgccacgtgcagcacgagggtctgccccagccactgattctcagatgggagcagtctccccagcccacaatcccaattgtcggaatcgtcgcgggcctggtcgtcctgggcgcggtcgttacgggggcggtggtcgccgccgttatgtggcggaagaaatcttccgcctacagtgtggtgtcaggcttgctgatgatcacgtggtggtcctcgcttttccttctcggggttctgtttcagggatacttagggtgcctgcgctcacacagcgtgctgggcagacgtaagcacttttag

SEQ ID NO: 38959 - DNA, 1260 bp, Artificial Sequence
  derived and/or modified sequence
atggccccccggagcctgctgctgctgctgagcggcgccctggccttgaccgacacctgggcagggtcacatagtttgcggtactttagcaccgctgtgagtcggcccgggcggggcgaaccgagatacattgccgtggagccctgggtcgagcaggagggtccacaatactgggaatggacgacaggctacgcaaaagcaaacgcacagacagacagggtcgctctacggaatctgctgcggcgctataaccaatctgaggccggttcacacaccttacagggcatgaacggatgtgatatggggcctgatggccgcctccttcggggataccaccagcatgcatacgatggaaaagattacatcagcctgaacgaagacctgcgaagctggactgccgctgatacagtagcgcagattacacagaggttctatgaggccgaggaatatgccgaagagtttagaacatatctagaaggggagtgtttagagctgttaaggcggtatctcgagaatggaaaggagaccctacagcgggctgatccgcccaaggcccacgtcgcacatcaccccatcagcgaccatgaagctacactaaggtgctgggctctcggcttttatcccgccgagattaccctcacgtggcagagggatggcgaggagcagactcaggatactgagctggtggaaacaaggccagcaggtgatgggactttccaaaaatgggctgccgtcgtggtgccatccggcgaggaacagcggtacacctgccatgtccagcatgagggtctgcctcagcctctgattctgcggtgggagcagtcaccacagccaacaatcccgattgtcggaattgtggctggactggttgtattgggggccgtcgtgacaggggctgtcgtggctgccgtgatgtggcgtaagaagtccagcgaccggaataggggctcatatagtcaggctgccgcctatagcgtggtgagtggaaatctgatgatcacttggtggtcttccctgtttctactcggggtgcttttccaaggatatctgggatgcttgaggagtcactccgtgcttggtcgccgcaaggttggcgacatgtggatcctcttctttctatggctgtggactagtttcaatacagcttttcttgccttacagtctctgagatttgggttcggctttagacgcggccggtcctttctcctccgctcatggcaccacctcatgaaaagagtgcagattaaaatttttgattag

SEQ ID NO: 38960 - DNA, 780 bp, Artificial Sequence
  derived and/or modified sequence
atgaacggctgcgacatgggccccgacggccggctgctgcggggctaccatcagcacgcttacgacggaaaggactacatttcgctgaatgaggatcttcgaagctggaccgcagctgataccgtagcacagattacccagcgcttctacgaggcagaggaatacgctgaagaatttcggacctacctggagggggaatgcctggagctactgcggaggtatctggagaacggtaaagagacgctgcagcgggccgacccgcctaaggcacacgtggcgcaccaccctatctcagaccatgaagccacacttcggtgttgggccctcggcttctatcccgcagagataacgctgacgtggcagcgggacggagaagaacagacccaagacacagagctggtggagactcgccctgcgggcgacggaaccttccagaagtgggccgccgtggtggtgccgagcggcgaagagcagcgttatacgtgccacgtccagcacgaagggctgcctcagccactaatactccggtgggagcagtcgcctcagcccaccatccccattgtgggcattgtcgctggtctggtcgtgctcggcgcagtggtgacaggggcagtagtggccgctgtgatgtggaggaaaaagagctcagcctactcggtagtgtctggaaatctgatgataacatggtggtcttccctgtttttgttgggtgttctttttcaaggatacctgggatgcttgcggtcccatagcgtccttggcaggagaaagcacttttag

SEQ ID NO: 38961 - DNA, 780 bp, Artificial Sequence
  derived and/or modified sequence
atgaacggctgcgacatgggccccgacggccggctgctgcggggctaccatcaacatgcgtacgacggcaaggactatatctctttgaacgaggatctgaggtcttggaccgccgctgatacggtggcccagatcacacagcggttttacgaagctgaggagtatgccgaggaattccgcacataccttgagggtgaatgcttagagctgctccgaagatatctggagaatggcaaggagaccctgcagagagcagatccacctaaggctcatgtagcacatcaccccattagcgaccacgaagcaacactgaggtgttgggccctgggattttaccctgctgaaattacactgacatggcagcgagacggtgaagaacagactcaggatacggagctggtagagactcgtcctgcaggtgacggaacattccagaagtgggctgcggtcgtcgtgccatcaggagaggagcaacgatacacgtgccatgtccagcacgaggggctccctcagcctctcatactgaggtgggagcagtcaccccaacccacaataccaattgtgggtatcgtcgcaggactggtcgtgttgggggcggtggtgaccggcgcagtggtggcagcagtgatgtggcggaagaaatctagcgcatactctgtcgtgtccggtaatttaatgataacttggtggagctctctgtttctcttaggcgtccttttccaaggctacctcgggtgtctgcggagtcacagtgtgctgggcaggcgcaagcatttttag

SEQ ID NO: 38962 - DNA, 1260 bp, Artificial Sequence
  derived and/or modified sequence
atggccccccggagcctgctgctgctgctgagcggcgccctggcccttactgatacatgggctggaagccactctctgcgctatttcagcacggctgtgtccagaccgggtcggggcgagccaaggtacattgccgtcgaaccttgggtcgaacaggaaggtccccagtactgggaatggactacagggtatgctaaggcaaacgctcagacggaccgggttgccctacgcaatctgctgcggcgctacaaccaatcagaggcggggtctcacactctgcaaggaatgaatggttgtgatatggggcctgacggaaggctgctccgcggatatcaccagcatgcatatgatggaaaggactatatttcactgaacgaggatctgcgcagctggactgccgccgacacagtggctcaaattactcagcgcttctacgaggcagaagagtatgcagaagagttccggacctacctcgagggggagtgcctagagctcctgcggcgatatctggagaacggtaaggagactctacagcgggcagatccacccaaggcccacgtagcccaccacccaattagtgaccacgaggccacattgaggtgctgggccttggggttttatccagcagagattaccctgacctggcaaagagatggggaggaacaaactcaggacacagaactcgtcgagacccgtccagctggcgacggaacctttcagaagtgggctgccgttgtggtccctagtggagaggaacagcgctacacctgccacgtgcaacacgaaggtctgccacaacccttgatcctccggtgggaacaatcacctcagccgactatccccatcgtgggcattgtagcgggactggtagttctgggagccgtagtcacaggggcggtggtcgccgcagtcatgtggagaaagaagagctcagaccgtaatcgtggtagttacagccaggcagcggcctactctgtggtgtctgggaatttgatgatcacttggtggagttccttattccttctcggagtgttgtttcaggggtatctcggctgtctgcggtctcattccgtcctcgggcggaggaaggtgggcgacatgtggatattattcttcctatggttatggacctcttttaataccgcattcctcgcactacaatcactgaggttcgggttcggattcaggcgcggtagaagcttcctgttacggtcttggcaccacttgatgaaacgagtgcaaatcaagatttttgattag

SEQ ID NO: 38963 - DNA, 1308 bp, Artificial Sequence
  derived and/or modified sequence
atggccccccggagcctgctgctgctgctgagcggcgccctggccctgactgacacatgggcaggctctcatagccttcgctatttctcaactgccgtgagcagacctggtagaggagagccgcggtacattgcagtggagtatgtagatgatacacagttcctgcggtttgactctgacgccgccattccaagaatggagccgcgcgaaccttgggttgaacaggagggaccacagtactgggaatggaccacaggatatgccaaggccaatgcacaaacggatcgcgtcgctctacggaacctgctacgccgttacaatcagtcagaggctggatcgcataccttgcagggcatgaacggctgcgatatgggccctgatggcaggctactgcgcggttaccaccagcacgcctacgatggaaaggactacataagcctaaacgaggacttgcgcagttggaccgctgctgacacagtggcacagattactcagcggttctatgaggctgaggaatacgcagaagagttccgtacctacttggaaggtgagtgtttagagctgctgaggagatatttagagaatggaaaggagaccctgcagcgggccgatcctcccaaagcccacgtcgcccatcacccaattagtgaccatgaagcaactcttagatgttgggctctggggttttatcctgccgaaatcacactgacttggcagagagacggagaagaacagacacaggataccgaactcgtcgaaactcgccccgccggggatgggacgttccagaaatgggctgccgtggttgtgccctcaggcgaggagcagcgttacacatgtcatgtgcaacatgaagggctgccccaaccattaattctaagatgggagcagagtccccaacccaccattcctattgtgggcattgttgctgggcttgtggtgctaggggctgtggtcaccggcgcagtggtcgccgcggtgatgtggagaaagaagtccagtgaccgcaataggggcagctattcacaggcggcggcctactctgttgtgtcgggtctgttaatgatcacatggtggagcagcctctttttattgggagttctgtttcagggatacctagggtgtcttcgctcacactctgtcttagggcgcaggaaggcccagctgctcagcgtgagcacctcccagacctctatcctgattcaggaacaattcagtcatcaaagaaccctcgccatgtcaggtaaaatgttctgttgtcacgactggagcgaggaggaagtgctgccagcttcttgcggcgagtag

SEQ ID NO: 38964 - DNA, 780 bp, Artificial Sequence
  derived and/or modified sequence
atgaacggctgcgacatgggccccgacggccggctgctgcggggctaccatcagcatgcctacgatggcaaggactatatctcgctgaacgaagacctgcggagttggactgccgctgacacggttgcacagatcacacagagattctacgaggccgaggagtacgcagaggaatttcgcacataccttgagggcgaatgccttgaacttctgcggcgctaccttgagaacggaaaagagacattgcagcgagcggatcctcccaaagctcatgtggcacatcacccgatcagcgaccacgaagccacgctaaggtgttgggccttgggattctatcccgcagaaatcacgctgacctggcagcgcgacggtgaggaacagactcaggataccgagcttgtggagacccggccagcaggggatgggaccttccagaaatgggcagccgtggttgtgccttcaggtgaggagcagcgctatacatgtcacgtgcagcatgaagggctgccgcagcccctcatactccggtgggaacagtccccacagccaacaatccccattgtaggaattgtcgctgggctggtcgttctgggcgcagtcgtgactggagccgtggtcgccgcagtcatgtggcggaagaaatcaagtgcatactcagttgttagtgggaacctgatgattacctggtggagcagtctctttctcttaggtgtcctgttccaaggatacctgggttgtctaaggagccatagcgtgctagggcggagaaaacatttttag

SEQ ID NO: 38965 - DNA, 1260 bp, Artificial Sequence
  derived and/or modified sequence
atggccccccggagcctgctgctgctgctgagcggcgccctggccttaacggacacatgggccggctcgcatagcctgagatacttctccacagcagtttcccgccccggccgtggcgagccaagatatatagccgtagaaccctgggtggagcaagaagggcctcagtattgggagtggactaccggatatgctaaagcgaatgcacaaactgatagagtagcactcagaaacctgctacgccggtacaatcaaagcgaggccgggtcccatacactgcagggcatgaacggttgtgatatgggccccgacgggcgccttctcagggggtatcaccaacacgcatatgacggaaaggattatatttctctgaacgaggacctcaggtcatggaccgccgccgatactgtagcccagattacgcaacgattttacgaggcagaggaatatgccgaagagtttcgtacgtacctggagggcgagtgccttgagctgctgcgtcgatatctagagaatgggaaagagaccctgcaaagggcagaccctcccaaggctcacgtggctcaccatccaataagcgaccacgaagcgactctcagatgctgggctctgggtttctaccctgctgaaatcacactaacatggcaacgcgatggggaggagcaaacccaagataccgagcttgtcgagacacggcccgctggtgatggtacctttcagaaatgggccgccgtcgtggtgccgtccggagaggagcagcgttatacctgccacgtgcagcacgaaggattaccgcagccgttaatcctgcgttgggagcagagcccccagcctaccataccgatcgtgggaattgtggccgggctggtggtgctgggggctgttgtcacgggggccgtggtggccgcggttatgtggcgcaagaaaagctcagatagaaaccgcggatcatactcacaggctgcagcttattcggtcgtgtccggaaatctcatgatcacatggtggtcaagccttttcctgctcggggtgcttttccaggggtacttaggctgtttgaggtctcattcggtcctgggtaggcgcaaggtaggtgacatgtggatactattctttctctggctgtggacatcctttaatacggctttccttgcactgcagtccctgcggttcggcttcggcttccgcagagggaggagttttttactcagatcatggcaccacctgatgaagcgggtccagataaaaattttcgactag

SEQ ID NO: 38966 - DNA, 780 bp, Artificial Sequence
  derived and/or modified sequence
atgaacggctgcgacatgggccccgacggccggctgctgcggggctaccatcagcacgcatacgacggcaaagactacatctctctgaatgaggatctcagatcttggacagccgctgacacagtagcccaaattacccagcggttttacgaagctgaagagtatgcagaagagtttcgaacatatctggagggcgagtgtctcgagctgctgcggcgctatctggaaaatggtaaggagactctccagcgcgccgatcctccaaaggctcacgtggcccatcatcccatcagtgaccatgaggcgacactgcggtgctgggccctgggtttctacccagcagaaatcacacttacatggcagcgggacggggaagagcagacccaagacaccgagttggtcgagacccggcccgcaggggacgggaccttccagaagtgggcagccgtggtcgtgccaagcggagaggagcagaggtatacttgtcacgttcagcatgagggacttccgcagcccctcattctgcgatgggaacagtcgccacagcccaccatacccatcgtggggatcgtggctggattggtggttctcggcgcagtggtcaccggggctgtggtcgccgccgtgatgtggaggaagaagagcagcgcatatagcgttgtatctgggaatctgatgattacatggtggtcctcgcttttcctgttaggggtgctgttccagggatacctcggctgtctacgctcccactctgttctagggagaaggaaacacttttag

SEQ ID NO: 38967 - DNA, 1260 bp, Artificial Sequence
  derived and/or modified sequence
atggccccccggagcctgctgctgctgctgagcggcgccctggccctgacggatacttgggccggaagccactctctgcggtacttctcaaccgcggtgagcagacccggccgaggcgaaccaagatacattgcagtggagccatgggtggagcaagagggtccacagtattgggaatggactaccggatatgctaaggcaaacgctcagactgacagggttgccctcaggaacttgcttcgacgctataaccaaagtgaggctgggagccacacattacagggaatgaacggctgtgacatggggcctgacggacgactgctgaggggctaccaccagcacgcttatgacggcaaggattatatcagcctaaacgaggacctcagaagctggactgccgcagatacggttgctcagattactcaaaggttctatgaggctgaagagtacgcggaagagtttagaacctatctggagggggaatgtttagaattgttacggagatatctggaaaatggcaaggagacgctgcagcgagccgaccctccgaaggcacatgtggcacaccaccccatcagcgatcatgaagctaccctcagatgttgggccctaggtttttacccagccgaaattaccctgacttggcagcgggatggggaggaacagacacaggatactgaactggttgagaccaggcctgcaggcgatggcacattccaaaaatgggcagcagtggtcgtccccagcggggaagaacagcgctacacttgccatgttcagcatgagggtcttcctcagccactcatcctgcgctgggagcaatctccccagcctacaattccgattgtgggcattgtagccgggctggtcgtgttgggagctgtggttaccggagctgtggtagctgcggtcatgtggagaaaaaagtcctccgatcggaatagaggatcctactcccaggcggcggcatattctgttgtatctggcaacctgatgattacctggtggagcagcctttttctcctgggggttctgttccaggggtatttaggatgtctcagaagccacagcgtgctgggccgtcggaaggtgggggatatgtggatcctgttttttttatggctgtggacttctttcaacacagctttcctagcacttcagtctctaaggtttggattcggatttaggagagggcgttctttcttgctgcggtcttggcatcaccttatgaaacgggtgcagattaagatctttgactag

SEQ ID NO: 38968 - DNA, 1260 bp, Artificial Sequence
  derived and/or modified sequence
atggccccccggagcctgctgctgctgctgagcggcgccctggcccttacagatacatgggccgggtcgcacagtttgcgatactttagtactgctgtatcaaggcctggtaggggcgagccgcgatacatcgccgtggaaccttgggtggaacaggaaggaccccagtactgggagtggaccacgggatatgccaaggctaacgcacagacagaccgcgtggccctgcggaacttactgaggcggtacaaccagagtgaggcgggctcccataccttacagggaatgaacggctgtgatatgggccccgacggtcgcctcttgcgtggatatcatcagcacgcatatgatggtaaagactatatcagcctcaatgaagacctgaggagctggaccgcggcggataccgttgcacaaattacacagaggttttacgaagccgaagagtacgccgaagagtttaggacctacttagaaggcgagtgtcttgagctcctccgcaggtatctggagaatgggaaagagacactacagcgggccgacccaccaaaagcccatgtggcccatcacccgattagtgaccatgaagccaccttgagatgctgggcacttgggttctacccagccgaaatcactctcacatggcagagagatggcgaggagcagacacaggacacggagctggttgaaacgagacccgccggcgatgggacatttcaaaaatgggcggctgtggtggttccaagcggtgaggagcaacgatacacctgtcatgtgcagcatgagggcctgccacaaccacttattctgcggtgggagcaaagtccccaacctactatccctatcgtgggcatcgtcgccgggttggtggtcctgggcgcggttgtgactggcgccgtggttgctgccgtaatgtggagaaagaagtcttccgatcgaaacaggggaagctattctcaggctgccgcatacagtgtggtctctggcctgctcatgatcacgtggtggtccagtcttttcctgctgggggtactcttccaaggatacttaggatgtctgaggagtcattctgtgctggggaggcggaaggtgggtgacatgtggattctgtttttcctttggctgtggacttcttttaacacagccttcctggctctccagtctctgcgcttcggttttggctttagaagggggcgctcatttttgctgcggagttggcatcacctaatgaaaagagtgcagattaagatttttgattag

SEQ ID NO: 38969 - DNA, 1329 bp, Artificial Sequence
  derived and/or modified sequence
atggcgccaaggagtctgcttctgctgcttagtggtgccctggcactcacggacacctgggcaggttctcactccctgaggtacttttctaccgccgtttcccggcctggcaggggagaacctcgatacattgccgtggaatacgtcgacgatactcaattcttgcggttcgacagtgatgcggctattcccaggatggagccacgtgagccctgggtggaacaggagggaccccagtattgggaatggacaactggttatgctaaagcaaacgctcaaaccgacagagtcgcgctccggaatctgctacggaggtataaccagtctgaggccggaagccatactcttcagggcatgaacggctgcgacatgggtcccgacggcaggctcttgaggggctatcatcagcacgcttatgatggtaaagactatatctccttgaatgaggacctgaggtcctggaccgcagccgacactgtggctcagataactcagaggttctatgaggccgaagagtacgctgaagaatttcgcacctacctagaaggggagtgtctggagcttctgaggaggtatctggagaatggtaaggaaactctgcaaagagcagacccccctaaggctcacgtcgcccatcatcccatttcagaccatgaggctacactgaggtgctgggctctaggattttacccggctgagatcaccttgacctggcaacgggacggggaagagcagacccaagatacagagctggtggaaacacgcccagcgggagacgggaccttccagaagtgggccgctgttgttgtgcctcccggagaggaacaaaggtatacttgtcacgttcagcacgaagggctaccccaacctctgattctccggtgggaacagtccccccagcccacgattcctatcgtggggatcgtggctggcctagtggtgctcggagcggtggttaccggggcagttgtcgctgcggtgatgtggcggaagaaatcttcagatcggaaccggggatcctacagccaggccgcagcctatagcgtagtctctggaaacttaatgatcacatggtggtccagcctctttttgttgggcgtgctcttccaaggctacctgggctgcctgcgatcacattccgtgcttgggcgaagaaaggttggagacatgtggatcctttttttcctgtggttatggacctccttcaatactgcgttcctggccctacagtcactgaggttcgggtttggttttcggagggggagaagtttcctgctgcgctcgtggcaccatcttatgaagcgcgtgcaaatcaagatcttcgactag

SEQ ID NO: 38970 - DNA, 1329 bp, Artificial Sequence
  derived and/or modified sequence
atggccccaagaagtttactgcttctcttgtccggagcgctggccctgacagacacgtgggccggatcacactccctgcgctacttctcaactgcagtgagtaggcctggcaggggtgaacctcgatatatagctgtggagtacgtggacgatactcagtttctgaggtttgactctgatgccgctattcctcgtatggagcctcgcgagccctgggtggaacaagagggcccacagtattgggaatggaccaccggctacgctaaggcaaatgcacagacggatcgggtggccctgaggaatcttctgcggcgatacaatcaaagcgaggctgggtctcacactctgcagggaatgaacggctgcgacatgggtcctgacgggagactgctcagaggctaccaccagcacgcctacgatggaaaggactatatttccttaaacgaggatctccggtcctggacagccgctgacaccgtcgcccaaatcacacagcggttctatgaagcagaagagtatgccgaagaatttcggacttacttggagggtgaatgtctcgaactacttcgaaggtacttggagaatggaaaggagaccctgcagcgagccgacccaccaaaggctcatgtggcccatcacccaatttctgaccacgaagccacactgaggtgctgggcacttggcttctatcctgcagaaattacacttacatggcagcgtgatggtgaagagcagacgcaggacactgaactcgttgagacccggcctgctggagatggaacgttccagaaatgggccgcagtcgtggtcccttcaggcgaggaacagagatacacatgccatgtgcaacatgaggggcttccccaaccactgatcctgaggtgggagcagagcccacagccaacaatccctattgtcggcatcgtggctggcttagtggtgctcggtgcggtggtgactggggcagtggtggcagctgttatgtggcgaaagaaatcgtccgaccggaaccggggatcttattcccaagctgccgcatactccgtggttagcggtaatttaatgatcacatggtggtcttctttgtttctactaggcgttctgttccaagggtatttgggctgtctgaggagccatagcgttctcggcaggcgcaaagtcggagacatgtggatcctgttctttctgtggctgtggaccagctttaacacagcattcctcgctctccaatctctccgcttcgggttcgggtttagaagaggacgtagctttttactgcgttcctggcaccatctgatgaagcgcgttcagatcaaaattttcgactag

SEQ ID NO: 38971 - DNA, 1329 bp, Artificial Sequence
  derived and/or modified sequence
atggctccgaggagcctactgctgctcctgagcggagccctggcactcacagacacatgggccggaagccattccctcaggtacttctctacggcagtaagcaggcctgggagaggagagccaagatacattgccgtggagtacgtagacgatacacagtttcttagatttgattccgacgctgcaatcccacgtatggagccccgtgagccatgggttgagcaggagggtcctcagtattgggagtggacaacaggttatgctaaggcaaacgctcagactgatagagtggccctgcggaacctgctcaggaggtacaatcagagtgaagctggatcacataccttgcaggggatgaatggatgcgacatggggcctgacggcaggctcctgagagggtatcaccagcacgcttacgacgggaaggattacatttcactgaacgaagacctgaggtcctggaccgcggctgacaccgttgcgcagatcacccagcggttttatgaggcagaggagtacgccgaagagttccgtacttatctcgaaggagaatgtctggagctcctcagacgctatctcgagaacggaaaagaaaccctgcaacgcgcagaccccccaaaagcccacgttgcccaccaccccatttctgatcatgaggcgaccctgcgatgttgggcccttggcttctaccctgcagagatcacgcttacttggcagcgtgacggagaagaacagactcaggacacagagttggtggagactcgtcctgcaggggatggaaccttccagaagtgggcagccgtggtggtgccttctggggaagaacagagatacacatgccacgtgcaacacgaaggcttgccacagccactgattctgcgatgggaacaatcacctcaaccgactatccccattgtcggtattgtggctggtctggtagtactcggggcagtggtgacaggagctgtggtggcagccgtgatgtggcggaagaagagttctgatcgtaatcgcggatcatattcccaggccgctgcctattcggttgttagcggtaacctgatgatcacatggtggagcagtctcttcctgctcggggtgctatttcagggatacttaggatgccttcggagccactcggtgcttggacgtcgtaaggttggcgatatgtggatcttgttttttctatggctgtggaccagctttaacaccgcatttttggcgctgcaaagcctgagattcggattcggattcagacggggacggtctttcctcctacgttcctggcaccacctgatgaaacgggtgcagattaaaatctttgactag

SEQ ID NO: 38972 - DNA, 375 bp, Artificial Sequence
  derived and/or modified sequence
tgagcagtgatgtggagaaagaaatcctctggacacttcctaccgatagatcgtaataggggcagttatagtcaggcggcagcatattccgttgtgagtgggaatctgatgatcacttggtggtcctcgctgtttcttctaggggttctctttcaaggatatctggggtgcttgcgttcgcactccgtcctaggcagacgcaaagttggggacatgtggattctgttttttctgtggctgtggacttcttttaacactgcctttctggccctgcagagcctgcggtttggcttcggcttcaggcgcggacggtcatttttgctgcgatcatggcatcacttgatgaaacgggtgcaaatcaaaatttttgactag

SEQ ID NO: 38973 - DNA, 375 bp, Artificial Sequence
  derived and/or modified sequence
taagccgtgatgtggagaaaaaagtctagcggacactttctcccaatcgaccgtaataggggctcctactcgcaagccgctgcatattcagttgtctccgggaacctgatgattacatggtggtctagtctatttctcctgggggttctatttcagggatacttaggatgtctgagatcccactccgtactgggcaggcgcaaagttggagacatgtggattctctttttcttgtggctgtggacttccttcaacacagcgtttctagccctccagagccttcggttcgggtttgggtttcgtagagggagaagcttcctgctgcgcagctggcaccacttgatgaagagggtgcagatcaagatctttgactag

SEQ ID NO: 38974 - DNA, 1329 bp, Artificial Sequence
  derived and/or modified sequence
atggccccacgaagcttgctcctgctgctgtcgggggctctggccctgacagatacctgggccggtagccattctctgcggtattttagcaccgccgtctcaaggcctggtcgtggcgaaccccgttatattgccgtcgagtacgtggacgatactcagtttctgcggttcgattcagatgcggcaattcctcgcatggaaccacgagagccatgggttgagcaggaaggtcctcaatactgggagtggactacaggctacgccaaagcaaatgcgcagaccgatcgcgtcgcattgcggaatctcctgcgcaggtacaaccagtctgaggctgggtctcacactctacaggggatgaatggctgtgatatgggaccggacggtagactgctgaggggctaccaccagcacgcatatgacggaaaggattatatttccttgaacgaggatctgcgctcttggacggctgctgacacagtcgcgcagattacccagcgattttacgaagctgaggaatacgcagaggagtttaggacatatttagagggggaatgcttggagctgctacgcagatatctggaaaatggcaaggaaactcttcaacgggcagatcccccaaaagcccacgtcgcacaccaccccatatcggatcatgaagccaccctgaggtgttgggctttgggtttctacccagccgaaattaccttaacttggcagcgtgacggcgaggaacagacccaagatactgaactagtagaaacacgccctgctggggacggaacatttcagaagtgggcagcagtggtggtcccttccggagaagaacagagatatacatgccatgtacagcacgaagggttgccacagcctctgatcctcagatgggaacagtcaccgcagcctaccatcccgatcgtcggaatcgtcgcagggcttgtagtgctcggtgcggtcgtcacaggcgcagttgtggccgcagtgatgtggcgcaaaaagtcttctgatcgtaatagaggttcttattcacaggccgctgcttactccgttgtgtctggcaatctaatgatcacgtggtggtcgtccctatttttgctcggcgtgttgtttcagggttatctaggatgcctgcggtcacacagcgtgctggggagacgcaaagtaggagatatgtggatcctgttttttttgtggctctggacttcgtttaacacagcgtttctcgctcttcagagtctgaggtttgggtttggtttcagaaggggcaggagctttcttttacggtcctggcatcacctcatgaaaagagtgcagattaagatattcgattag

SEQ ID NO: 38975 - DNA, 1329 bp, Artificial Sequence
  derived and/or modified sequence
atggcccctcggagtttactgcttctattgtccggcgctttggctttgaccgacacctgggctggatcgcattccttacgctatttctccactgcagttagtaggccgggacgaggcgagcctcgttatattgcagtggagtacgtcgacgatacccaattcctgagatttgacagcgatgccgctataccacggatggaaccccgtgaaccctgggtggagcaagagggaccacagtattgggagtggactacaggttacgccaaggcaaatgctcagacggacagagtcgctctcagaaatcttctgaggcggtacaatcagtcagaggccggaagtcatacactccagggcatgaatggctgcgacatgggtcccgatggacgtttactgaggggttaccatcagcacgcctatgatgggaaggactacatctccctaaacgaagatctgcggtcctggaccgcagctgatacggtggcgcagataacccagcgattttatgaggctgaggagtatgccgaagagtttcggacttatctcgaaggcgagtgcctggagttattgcgccgatacttggagaatgggaaagaaactttacagagagccgatcctccaaaggcccatgtggcgcatcacccaatctccgaccatgaggctaccctgagatgttgggcactggggttctacccagccgagattaccttaacctggcagagggatggggaagagcagacacaggacactgaattggttgaaaccaggcctgccggtgatgggacatttcaaaagtgggcagctgtggtggtgccctcgggcgaagagcagagatacacctgccatgtccagcatgaaggccttccccaacctttgatacttcggtgggaacagtctccacagccaaccatacctattgttggaatcgttgctgggctggtcgtgctcggagccgtcgtcacgggagccgtggtggcagcggtgatgtggcgtaaaaagtcaagcgacagaaacagaggctcttactctcaggccgctgcatattcggtggtgtccggcctgctaatgatcacctggtggtcttctttgttcctgttgggcgtactctttcaggggtacctgggctgcctgcgctcccattccgtgctcgggagacgcaaggttggcgacatgtggatactttttttcctttggctatggacatcttttaataccgccttcttggccctgcagagtctgcgatttggttttgggttccgaagagggaggagcttccttctgcgcagctggcaccacctgatgaaaagggtccagataaaaatcttcgactag

SEQ ID NO: 38976 - DNA, 33 bp, Artificial Sequence
  derived and/or modified sequence
tgagcagtgatgtggaggaagaaaagctcctag

SEQ ID NO: 38977 - DNA, 780 bp, Artificial Sequence
  derived and/or modified sequence
atgaatggttgtgacatggggcctgacggccgactgctcagaggttaccaccaacatgcctatgatggcaaggattatatttccctgaatgaggatctacggagctggaccgccgcagacaccgttgcccagatcacacagcgattttacgaggctgaagagtacgccgaggaattccggacttatctggagggcgaatgcctggaactgttgaggagatacttagagaatggcaaggagactctgcagcgtgcagaccctccgaaggcccatgtggcccaccacccgatcagtgaccacgaagccactctgagatgttgggccttgggcttctatcctgctgaaattaccttaacctggcaaagagacggagaagagcagacgcaggatacggagcttgtggagactcgccctgcgggagacggtacattccagaaatgggctgctgtggtggtacctcccggagaggagcagaggtatacttgtcatgtgcaacatgaaggcctgccacagcctctgatcctcagatgggaacagtccccccaacctacaatccctattgttggcatagtcgcagggctggtcgtcctcggtgctgttgtcacaggagcagtggtggctgctgtgatgtggaggaaaaagtcctccgcatacagcgtggtgagcggcaacttgatgataacctggtggtctagcctgtttctgcttggtgtgctgtttcagggatacctcgggtgcctgagatcacattcagtccttggtagacgtaaacacttctag

SEQ ID NO: 38978 - DNA, 375 bp, Artificial Sequence
  derived and/or modified sequence
tgagctgtcatgtggagaaagaaaagcagtggccatttcctccctattgacaggaaccgcggtagctattctcaagctgcagcttatagcgttgtgagcgggaatcttatgattacatggtggtcttcattgttcctgttaggggtactctttcagggctacctaggatgcttgagatctcacagcgtactgggcagaagaaaagtgggagacatgtggatcttattttttctatggctttggaccagctttaacacggccttcctggccctacagagtttgaggttcggttttggcttccggagaggcagatcatttctcctgcgctcttggcaccatctgatgaagcgagtgcaaatcaagatattcgactag

SEQ ID NO: 38979 - DNA, 1329 bp, Artificial Sequence
  derived and/or modified sequence
atggcgccacggagcttgctcctactactcagcggtgcattagcacttaccgacacctgggccggtagtcacagcctgcggtatttttcaactgcggttagccgcccagggaggggcgagccccgttacattgctgtcgagtatgtcgatgatactcaatttctgaggttcgatagcgacgccgcaatcccgagaatggagccaagggaaccatgggtggaacaggaaggccctcaatattgggaatggaccactggatatgccaaggctaacgcgcagaccgacagggtagcgctgagaaatctccttcgcaggtataaccaatctgaagctggttcacacaccctgcaaggtatgaatggctgtgatatggggccagatggcagactcttgaggggctatcaccagcacgcttatgacgggaaggattatatctcgttaaatgaagaccttcgcagctggacagccgctgatacagtggcacaaattacgcagaggttctatgaagccgaagaatacgcggaggaatttaggacctatctggaaggggaatgcttagaattgctacggaggtaccttgaaaatggaaaagagactctgcagcgggcagatccgccaaaagcgcatgttgcgcaccatcccattagcgaccacgaggctacattgaggtgctgggccttaggtttctatcctgccgagatcactttgacctggcaacgcgatggcgaggaacaaacccaagataccgaactagtcgaaacacggcctgccggtgatggtacgtttcagaagtgggccgctgtggtagtgccttcgggcgaagagcagagatacacttgccacgtgcagcacgaggggctcccacagcctctaatcttgcgctgggagcagtccccccaaccaaccatccctatcgtgggtattgttgctggcctggtggtactcggggctgtggtgaccggagccgtagtggccgcagttatgtggcggaagaagtcatccgaccgcaacaggggcagctattctcaagcggctgcatatagtgtcgttagtggaaatttgatgattacttggtggagctccctcttcctactcggcgtattgttccagggataccttgggtgtttgcggagccattccgtgctcggcaggcgcaaagttggagatatgtggatccttttcttcctgtggctctggacatccttcaacactgcttttcttgcgcttcagtcattgagatttggattcggatttcgccgagggagaagtttcttacttcgcagttggcatcacctgatgaagagggtgcagatcaaaatcttcgactag

SEQ ID NO: 38980 - DNA, 375 bp, Artificial Sequence
  derived and/or modified sequence
tgagccgtgatgtggcgaaaaaaaagtagcgggcactttttgccaatcgaccgcaaccggggatcttacagccaggccgctgcctacagcgtcgtgtcgggactgttgatgattacctggtggtctagcctgtttctcctcggcgtcctgtttcaaggctacctcggatgtctccggagtcacagcgtgttaggcagacggaaggtcggcgacatgtggattctcttttttctgtggctgtggacttcttttaacaccgcgtttctggccttacagtctttaagattcggattcggatttaggcgcggtagatcatttctgctgcgctcctggcatcacttaatgaaaagggtccagattaagatatttgattag

SEQ ID NO: 38981 - DNA, 1260 bp, Artificial Sequence
  derived and/or modified sequence
atggcacccaggtccctcctgctgctgttatctggagccctggccctgacggatacctgggctggcagccatagtctcagatattttagcaccgccgtctccagacccggacgcggtgaacccaggtacatagctgtcgagccgtgggttgagcaggaggggccacagtattgggagtggacaacggggtatgcaaaggcgaatgctcagacagacagggtggcattgaggaacctgttgcgacggtataatcaaagcgaggccggaagccataccctgcaaggaatgaacggctgtgacatgggccctgacggcagactactgcggggttaccaccaacacgcgtacgatggcaaagactacatatctctaaacgaggatttgcggtcgtggactgcagctgatacggtagcccagattacacagagattctacgaagcagaagagtacgccgaagaattcaggacctatttggaaggggaatgcttggaactcctgaggcggtatctggaaaacggcaaagaaacgctccagcgcgcagacccccctaaggcacatgtggcccaccatcccatcagtgaccacgaggctaccctgagatgttgggcattagggttttatccagcagagatcacactcacatggcagagggacggcgaagaacagacgcaggacacagaattggtggagacgcggccagcgggtgatggcaccttccagaaatgggctgccgttgtggtcccacctggcgaagagcagcgctatacatgtcacgttcagcacgaagggcttccccaacccctcatcctgagatgggagcagtcaccccagcctacgatcccaatcgtgggaatagttgcgggtctcgtggttctaggtgcagtcgtgactggagcagtagtcgccgctgtgatgtggcgcaagaaatcaagtgatcgaaacaggggctcctatagccaggcggcagcatattccgtggtatcgggtaaccttatgattacctggtggtcatccctgtttcttctgggggtcctcttccagggctacctgggctgcttacggtctcactcagtgttgggacgtagaaaggtcggggacatgtggatcctgtttttcttgtggttgtggacgtccttcaacactgcctttctcgcactgcagtcactaaggtttggatttggatttagaagagggaggtcctttttgctgaggagttggcatcacctgatgaaaagggtgcagatcaagatcttcgactag

SEQ ID NO: 38982 - DNA, 375 bp, Artificial Sequence
  derived and/or modified sequence
taagctgtgatgtggcgcaaaaagtcgagtggacacttcttacctatcgataggaaccggggaagctacagccaagctgctgcctattctgttgttagcggtaacctgatgataacatggtggagctctctttttttactcggagtgttgtttcagggatatttaggatgccttaggtctcactccgtgctcggtagaagaaaggtgggtgatatgtggatactatttttcctgtggctgtggacttcttttaacaccgcgtttttagccctgcagtccctgaggtttggcttcggttttaggcgaggacgtagctttctcctccggagctggcaccaccttatgaagcgggtgcagatcaagatcttcgactag

SEQ ID NO: 38983 - DNA, 375 bp, Artificial Sequence
  derived and/or modified sequence
tgagcagtcatgtggcgaaagaaatccagtggccatttcctgcccattgatcggaatcggggttcctattcccaggcagccgcatactctgtcgtctcaggcaacttgatgatcacgtggtggtcaagcctgttcctcctgggtgttctgttccagggctacctgggatgccttaggtctcattctgtgctcgggaggcgcaaagtgggagacatgtggatactgttctttctgtggctgtggacttcattcaatacagctttcctggccctccaatccctacggttcgggttcggttttcgcagagggagaagttttctgctcaggtcttggcatcatcttatgaaaagggtccagatcaagattttcgactag

SEQ ID NO: 38984 - DNA, 780 bp, Artificial Sequence
  derived and/or modified sequence
atgaatggctgtgacatgggtcctgatggaaggctcctccgtgggtaccatcagcatgcatacgacggcaaagactacatttccctcaatgaagacttgagatcttggactgcagcggataccgtggcccagattacacagcgcttctacgaagccgaggaatacgccgaggagtttaggacctacctggagggggagtgcctggagcttctgcgcagatatctggagaacggcaaggaaactttgcaacgggctgacccacctaaagcacacgtagcccatcatcctattagtgatcacgaggcaacactccggtgctgggccctcgggttttacccagccgaaatcactctgacctggcagcgggacggtgaagagcagacgcaagacactgaactggtcgaaacgaggcccgctggagacggtactttccaaaagtgggcagctgtagtcgtgccttccggagaggagcaacgttatacctgtcatgtgcagcatgaaggtctgccccagccattgattctgcgatgggagcagtcccctcagcccaccatcccaattgtcgggattgtggcaggcctggtcgttcttggggctgtcgtcaccggtgccgtggtcgccgcagtgatgtggaggaaaaagagctctgcctactctgttgtgtctgggctgctgatgatcacttggtggtcgagtctgttcctgttaggagtgttatttcagggctacctgggctgtcttcgatcccacagtgtcctcggaagacggaaacacttctag

SEQ ID NO: 38985 - DNA, 1260 bp, Artificial Sequence
  derived and/or modified sequence
atggcccctaggtccttgctgcttctcctgtccggagctcttgccctcaccgatacctgggccggttcccattcactcagatacttttccaccgccgtgtcccggcctgggcgaggggagcccagatacatcgccgtagagccttgggtcgagcaggagggtccacagtattgggagtggacaactgggtacgcaaaagccaacgcacagacagacagggtcgccttgcgcaatctgctcaggcgttacaatcagagcgaagccggttcgcatactctgcagggcatgaacggctgcgatatgggtccagacggccgacttctgcggggataccaccagcatgcgtacgatgggaaagattacattagcttgaacgaagatctgcgcagttggacagctgccgacacggttgcacagatcactcaacgattctacgaagccgaggagtatgctgaagaatttcggacgtatctggaaggcgagtgcctggagctactcagacgctacctagagaatggcaaggaaacactgcagcgggctgatccacccaaagcccacgtggctcatcatccgattagtgatcacgaggccacattgaggtgctgggcgttgggtttctacccggcagagatcacgctgacctggcagagggacggcgaggaacagacccaggacacagagctggtcgagacccgtcccgcaggcgacggtacctttcagaagtgggcggctgttgttgtcccttcaggagaggaacagaggtatacatgccatgtacagcacgagggcctcccacagcctctgattctacgctgggaacagtctccccagcctaccatcccaatcgttgggatcgtggcaggcctcgttgtgctcggcgctgtggttaccggtgccgtagtggcggctgtgatgtggcggaagaagtcttctgacagaaaccggggatcatattctcaggctgccgcttattccgtggttagcgggaatctgatgatcacttggtggtcttcgttgtttttattgggggtgctgtttcagggatacctcggctgcctgagatctcattcggtcctgggcagacggaaggttggcgatatgtggattttgttcttcctctggctgtggacatccttcaacactgcctttcttgcactgcagtctctgcgctttggcttcgggttcagacgcggtcgctccttcctcttacgttcctggcatcacttgatgaagagagtccagattaaaattttcgattag

SEQ ID NO: 38986 - DNA, 780 bp, Artificial Sequence
  derived and/or modified sequence
atgaacggctgtgacatgggtccagacggacgtctgctgagaggttaccatcagcatgcttacgatggaaaagattatatctcattaaacgaggatcttcgctcatggaccgcggctgataccgttgcccagatcacccaaagattctatgaggcagaagaatacgcagaagagttccgcacgtacctggagggtgagtgccttgagctcctgcggagatacttggaaaacgggaaggagacccttcagagagctgatccaccgaaggctcacgtcgcccaccatcctatttctgaccacgaagcaacgctcagatgttgggccctagggttctacccagctgagatcactcttacgtggcagcgggacggcgaagaacagacccaggacacagagctggtggagacacgccctgcaggtgatgggacatttcagaagtgggctgccgtagttgttccctctggggaagagcagaggtacacctgtcatgttcagcacgaaggcctgccacagccactgattttgcgctgggaacagtctccacagcctaccatacctatcgttggcatcgtggctggccttgttgttctcggggctgtggtgacaggtgcggttgtcgcagccgtgatgtggcgaaaaaaaagttccgcttactctgtcgtgtcaggaaatctgatgatcacctggtggagttcactttttctgctcggagttctgtttcaagggtatttgggatgtttgaggtcccactccgtcctgggtaggcgcaagcatttctag

SEQ ID NO: 38987 - DNA, 780 bp, Artificial Sequence
  derived and/or modified sequence
atgaatgggtgtgatatgggacctgatgggagattactgcggggttatcaccagcatgcctacgacggaaaggattacatatcactgaacgaagatttgagatcctggacagctgccgatacggtggcccagatcacgcagcggttttacgaggctgaagagtatgctgaagaattccgcacttatctggagggcgagtgcctggaactcctaagacggtatttggaaaacggaaaggagactctccagcgagctgatccgcctaaagcccatgtggcccatcaccctattagtgatcacgaggccacactgcgttgttgggccctgggcttttacccggcagagattaccctaacatggcagcgagatggcgaggagcaaactcaggataccgaactggttgaaaccagaccggctggggacggtacttttcaaaagtgggcggctgtggtcgtgccttctggagaagagcagaggtacacatgccatgtgcagcatgaagggttaccccagccccttatcctgaggtgggagcaaagcccccagcccactatccccatagtgggcattgtggcaggccttgtcgtcctaggcgctgtagtgactggggcagttgtggcagccgtgatgtggagaaaaaaaagtagtgcttattctgttgtctccggaaatttgatgataacctggtggagctcactgtttttgctaggggttcttttccagggttacctcggctgtctgcgatcgcatagcgtactcggtcgtcgaaagcacttctag

SEQ ID NO: 38988 - DNA, 1260 bp, Artificial Sequence
  derived and/or modified sequence
atggcgccaaggagcctcttgctactgcttagtggcgcactagcgctgacagacacttgggctgggtcccacagcctgagatatttttccaccgccgttagccgtccaggacgcggagaacccaggtatatagccgttgagccatgggtggaacaggaaggtccacagtactgggaatggactactggatacgccaaagcgaatgcccagaccgatagggtggccttgcgcaatctgcttcgacgttataaccagtccgaggcgggaagccacaccttacaaggtatgaatggatgtgacatgggcccagacggcaggctcttgcgcggttatcatcagcacgcttacgacggaaaggactacataagtctcaacgaggacctgaggtcatggaccgctgcggacactgtggcccaaattactcaacgcttctacgaagctgaagagtacgcagaggagttccgtacctacctcgaaggcgaatgcttagagctgctcaggagatatctcgaaaatggtaaagaaaccctgcagcgtgcggatcccccaaaagcgcacgtggctcaccatccaatctcagaccacgaagccacattgcggtgttgggcgctgggtttttacccagcagagataactctgacatggcagcgcgacggggaagagcagactcaggatacagagctagtggaaacacgacccgctggagacggcacgtttcaaaagtgggccgcagtggtggtgccctcaggagaggaacagcgttatacctgtcacgttcaacacgagggactgcctcaacccctaatcctgcgctgggagcagagcccacagccaacaatccccattgtcggaatagtagccggattagtggtattgggagcagtcgttaccggagccgtggtggccgcagtgatgtggcggaagaagagttctgataggaaccgcggtagttacagtcaggcagccgcttattcggtcgtgtctggcaatctgatgatcacatggtggtcctctttatttctcttgggcgttctctttcaggggtacctcggttgcttgcgaagccacagcgtgctaggacgtcgaaaggtgggagacatgtggatattatttttcctgtggctttggacttcctttaacaccgccttcttggctttgcaatcattgcgtttcggttttggatttcgcaggggcagatctttcctgctgagatcttggcaccacttgatgaagagggtccaaataaagattttcgattag

SEQ ID NO: 38989 - DNA, 1308 bp, Artificial Sequence
  derived and/or modified sequence
atggcgcctaggtctctgctgctattactctctggagcattagccctgacagacacatgggctggttcccatagcttgcgatacttcagcactgctgtctcccgcccaggtcggggagagcctagatacatcgctgtcgagtacgtcgatgacacacagttcttgcgctttgactccgacgcagctataccaagaatggaaccccgagaaccctgggtggagcaggaggggcctcaatactgggagtggactacggggtatgctaaggccaatgcacagacggaccgcgtcgctcttcgaaacctgttgagaaggtataaccagtccgaggcgggatcccacactctgcagggtatgaatggttgtgatatgggcccagatggcaggttgctgagggggtatcatcagcatgcttatgacggaaaggactatatttccctgaatgaggacttgcgatcctggacagccgctgatacagtggcgcagatcacccaacgattctacgaggcggaagagtatgccgaggaattccgaacttacttggagggcgaatgtctcgagctcctgcggagatatcttgaaaacgggaaggagaccctccagagagcggacccaccaaaggcccatgtcgcgcaccatcccatctccgaccacgaagcaacccttaggtgttgggcgctcggcttctacccagctgagattacactgacttggcagagagacggcgaagagcagacccaggacaccgagctagtagaaacgcgccctgctggcgacggcaccttccagaagtgggccgcagtggtggtgcccagtggcgaggaacagagatatacctgccacgtacaacatgaaggcctgccccagcctttgatcctccggtgggaacaaagccctcagcccaccattccgatagtcggtatcgtcgccggactggttgtcctcggcgcagtagtcactggtgcagtggttgctgccgtcatgtggcgtaagaagtccagcgaccgcaatcgaggatcttatagccaagccgcagcttactctgttgtatccggactgctgatgattacatggtggagctcgttgtttttattaggagtgctcttccagggctaccttggatgtctgcgatcacatagcgtactgggaaggcgaaaagcccagctcttgtctgtgtctacgtcacagaccagcattcttatccaggaacagttctctcaccaacggacactggcgatgtccgggaagatgttttgttgccacgactggtccgaggaagaggtactgccagcaagttgcggcgaatag

SEQ ID NO: 38990 - DNA, 780 bp, Artificial Sequence
  derived and/or modified sequence
atgaacggctgtgacatgggacccgatgggaggctccttcgtggatatcatcaacatgcatatgatggtaaagattacatatctctcaacgaggatctcaggtcctggaccgccgcagatacagtggcgcaaatcacccagaggttctacgaagccgaagagtacgccgaggagtttcgcacctatctcgagggtgagtgtctggagctactacggaggtatctggagaatggaaaggagactcttcaacgcgcagatccccctaaggcacacgtggcacatcaccccatctcagaccatgaggcgacactccgttgttgggccctgggattctatccggctgagattacgttgacttggcagcgcgacggcgaagagcaaacccaggatactgagctagtggaaacaagacccgctggcgacgggactttccagaagtgggccgcagtggtggtacctagtggcgaagagcagcgatatacatgccacgtgcagcacgagggattgcctcagccactcatactgcgatgggaacaaagcccccaaccgactattcctattgtgggcatcgtggccggactggtggtgctcggggctgtggtcaccggtgccgtcgtcgcggcagtgatgtggcggaaaaagtcaagcgcctacagtgtggtgtccggcaacctgatgattacgtggtggtcatcactgtttttacttggcgtcctgttccagggctacctcggctgtctccgatcccacagcgtgctggggagaaggaaacatttctag

SEQ ID NO: 38991 - DNA, 1260 bp, Artificial Sequence
  derived and/or modified sequence
atggctccgagaagtctcctcctgcttctctcgggtgccctcgcccttactgacacttgggccggttctcattctctgcgctatttctccaccgctgtatccagacctggtaggggcgagcctcggtatatcgctgtagagccttgggtggagcaggaaggcccacagtactgggaatggaccaccggatacgcaaaagccaacgcacagactgatcgtgtcgccctgagaaatctattgcggagatataaccaatcagaggccggaagccacaccttgcagggcatgaatggttgtgacatggggcctgatggcaggctgcttcgcggttatcaccagcacgcgtacgatgggaaagattacatcagcctgaatgaggatttacgatcctggacagcggctgacacagtggcacagatcacacaacgcttttacgaagctgaagaatatgctgaagaattcagaacctatctggaaggggagtgcctggagctgctgaggcggtatctggaaaatgggaaggaaaccctgcaacgggctgatccaccaaaggcccacgtggcccaccacccaatcagtgaccacgaggccacgctccgttgttgggccttgggcttctatccggcagagataactttgacctggcagagggacggagaggagcaaactcaggataccgagctggttgaaacaagacccgctggggatggcactttccagaagtgggccgcagttgtggttccctcaggtgaggagcaaaggtatacgtgtcatgtacagcacgaaggactccctcagcctctgattctgagatgggagcagagtccccagccgacaatacccattgtcggtatagtcgcaggactggttgtcctgggggctgtcgtcacaggggctgtcgtggcagcggtgatgtggagaaaaaagtctagcgacaggaaccgaggatcttattcccaggctgctgcttactctgtagtgagcggtaatttaatgattacctggtggagctcactctttctgctcggagtgctcttccagggataccttggatgcctccgaagccacagtgtcttgggcaggcgaaaagtgggtgatatgtggatcctattttttctgtggttatggacgagtttcaatacggcgttcctcgcgctgcagagtctcagatttggctttgggttcaggaggggtagaagctttctcctgcgcagttggcaccatcttatgaaacgcgtacaaattaagatcttcgattag

SEQ ID NO: 38992 - DNA, 780 bp, Artificial Sequence
  derived and/or modified sequence
atgaacgggtgtgatatgggcccagacggccgactgctgcgcggataccaccagcacgcgtacgacgggaaggactacatctctctgaacgaagacttaagatcctggacggcagccgatacagtcgcccagatcacccagcgtttctacgaagccgaggagtatgctgaggagttccggacttatttggagggggagtgcctggaattgctccggcgatatctggagaatggcaaagagaccttgcagagagctgacccaccaaaagctcatgttgcgcaccacccaatttccgatcatgaagccaccttgcgctgttgggcactgggcttctatcccgctgagattactctcacctggcaaagagatggtgaagagcagacccaagatactgagctcgtagaaacccgtccagccggagatgggactttccagaagtgggccgctgtagtggtgccgagtggtgaagaacaacgttacacatgccacgttcagcacgaagggcttccccagccgcttattttgcgatgggagcagtcgcctcaacctactatccctatagtaggaattgtcgctggacttgtcgtcctgggtgctgtagtgacgggtgcagtagtggccgcagtgatgtggagaaagaaaagtagtgcgtattccgtggtcagtggcaatttgatgattacatggtggtccagcctgttcctgctgggtgtattatttcagggttacctcgggtgcctacgctcgcactccgtgctgggccgtcgcaaacatttttag

SEQ ID NO: 38993 - DNA, 1260 bp, Artificial Sequence
  derived and/or modified sequence
atggcccctcgaagtctgctgttactgctaagtggtgcgttagcccttactgatacctgggctggatctcactctctgcgctacttttccacagcagtcagtagaccgggacgaggggagcctcgatatatcgctgtcgagccttgggtcgagcaagaagggccacagtattgggagtggaccaccgggtacgccaaggccaatgctcaaactgacagggtggccctaagaaacctccttcgtagatataatcagagcgaggccggttcacacaccctgcaaggcatgaacggctgtgacatggggcctgacggcaggctgctgagagggtaccatcaacacgcttatgacggtaaagattatatcagcctgaatgaagacctgcgttcctggaccgccgctgataccgttgctcagatcacccagaggttttacgaggccgaggaatatgctgaggagttccggacctatttagagggcgagtgcttggaactgctgaggcgctatctcgaaaacggaaaagaaaccctgcagcgggctgatccacctaaagcacatgtcgcccaccaccccatttccgaccacgaagctaccctgagatgctgggcccttggtttctatccagcagagatcacccttacctggcagcgtgacggcgaagaacagacacaagacaccgagctggtcgaaacaagaccagcaggcgacggtacatttcagaaatgggccgcagtggttgtaccttctggcgaagaacaacgctatacatgccacgttcagcacgaaggtctgccccaacctctgatcctccgctgggaacagagcccccaaccaacgataccaattgtcggaatagttgcaggactggtcgtcctcggcgcagtggtgacaggcgctgtcgtggctgccgtgatgtggcgaaaaaaatctagcgaccgaaataggggatcatattcacaggcagctgcttactccgtggtctccgggaacctgatgatcacctggtggagttcactttttctcctgggggtcttgtttcagggttacctgggctgtctgaggagccactctgtgttgggtcgcagaaaggtcggggacatgtggatcctcttcttcctctggctctggacaagtttcaacacagcttttcttgctcttcagtcactccgattcggcttcggtttccgccgaggtagatcttttctgctacgttcgtggcaccatttaatgaagagggtccaaattaaaatcttcgactag

SEQ ID NO: 38994 - DNA, 1260 bp, Artificial Sequence
  derived and/or modified sequence
atggctccccgaagtctgctgctgttgctgagcggcgcattggcactaactgacacatgggctggcagccactcactgaggtacttctccaccgccgtgagccgcccagggagaggggaaccaaggtacatagctgtggagccctgggtggagcaggaaggccctcaatattgggagtggacaacagggtatgctaaggctaatgctcagaccgacagagttgctctccgcaacctccttcgccgatataatcagagcgaagcaggatcccatacgcttcagggtatgaacggatgcgatatgggcccagatgggaggttgctgagagggtatcaccagcacgcatatgatggcaaagattatatctccttgaatgaagaccttaggtcgtggacagcagcagacaccgtagcgcagattacacagcgattctatgaggcagaggagtatgccgaggaattccgaacttatctggagggcgaatgtctggagctgctgagaagatatctcgaaaacggcaaagagaccctacagagggccgaccccccaaaggcgcatgtggcacaccacccgatcagcgatcatgaggctaccctgaggtgttgggctctgggattttacccagcagaaataaccctaacatggcagagggatggagaagaacagacccaggacactgaattagttgagactaggccagccggtgacggcacttttcaaaaatgggccgctgtggtcgtcccctcgggagaagagcagagatacacatgccacgtgcagcacgagggcttgccacagccactgattcttagatgggaacagagcccccagcctacaatcccaatagtagggatcgtggcaggacttgtggtgctgggcgctgtggttactggagcagtcgtggctgccgtcatgtggagaaagaagtcttctgacaggaatagaggctcttactctcaagcggcagcctactccgtagttagcgggcttctgatgattacttggtggagctctctgtttttgcttggagttctcttccagggttatctcggctgcctcagatctcattcagtcttggggaggagaaaggttggcgacatgtggatcctcttctttctgtggctttggacatccttcaacacggcctttctggcattgcaatcgctgcgattcggattcggttttaggaggggtcgctcttttttgctccgcagctggcaccacttgatgaagcgggtgcaaataaagatctttgactag

SEQ ID NO: 38995 - DNA, 1591 bp, Artificial Sequence
  derived and/or modified sequence
tttctcactcccattgggcgtcgcgtttctagagaagccaatcagtgtcgccgcagttcccaggttctaaagtcccacgcaccccgcgggactcatatttttcccagacgcggaggttggggtcatggcgccccgaagcctcctcctgctgctctcaggggccctggccctgaccgatacttgggcgggctcccactccttgaggtatttcagcaccgctgtgtcgcggcccggccgcggggagccccgctacatcgccgtggagtacgtagacgacacgcaattcctgcggttcgacagcgacgccgcgattccgaggatggagccgcgggagccgtgggtggagcaagaggggccgcagtattgggagtggaccacagggtacgccaaggccaacgcacagactgaccgagtggccctgaggaacctgctccgccgctacaaccagagcgaggctgggtctcacaccctccagggaatgaatggctgcgacatggggcccgacggacgcctcctccgcgggtatcaccagcacgcgtacgacggcaaggattacatctccctgaacgaggacctgcgctcctggaccgcggcggacaccgtggctcagatcacccagcgcttctatgaggcagaggaatatgcagaggagttcaggacctacctggagggcgagtgcctggagttgctccgcagatacttggagaatgggaaggagacgctacagcgcgcagatcctccaaaggcacacgttgcccaccaccccatctctgaccatgaggccaccctgaggtgctgggccctgggcttctaccctgcggagatcacgctgacctggcagcgggatggggaggaacagacccaggacacagagcttgtggagaccaggcctgcaggggatggaaccttccagaagtgggccgctgtggtggtgcctcctggagaggaacagagatacacatgccatgtgcagcacgaggggctgccccagcccctcatcctgagatgggagcagtctccccagcccaccatccccatcgtgggcatcgttgctggccttgttgtccttggagctgtggtcactggagctgtggtcgctgctgtgatgtggaggaagaagagctcagatagaaacagagggagctactctcaggctgcagcctactcagtggtcagcggaaacttgatgataacatggtggtcaagcttatttctcctgggggtgctcttccaaggatatttgggctgcctccggagtcacagtgtcttgggccgccggaaggtgggtgacatgtggatcttgttttttttgtggctgtggacatctttcaacactgccttcttggccttgcaaagccttcgctttggcttcggctttaggaggggcaggagcttccttcttcgttcttggcaccatcttatgaaaagggtccagattaagatttttgactgagtcattctaaagtaagttgcaagacccatgatactagaccactaaatacttcatcacacacctcctaagaataagaaccaacattatcacaccaaagaaaataaataattccataatattaaaaaaaaaaaaaaaaaa

SEQ ID NO: 38996 - protein, 650 aa, Artificial Sequence
  derived and/or modified sequence
MATSNNPRKFSEKIALHNQKQAEETAAFEEVMKDLSLTRAARLQLQKSQYLQLGPSRGQYYGGSLPNVNQIGSGTMDLPFQPSGFLGEALAAAPVSLTPFQSSGLDTSRTTRHHGLVDRVYRERGRLGSPHRRPLSVDKHGRQADSCPYGTMYLSPPADTSWRRTNSDSALHQSTMTPTQPESFSSGSQDVHQKRVLLLTVPGMEETTSEADKNLSKQAWDTKKTGSRPKSCEVPGINIFPSADQENTTALIPATHNTGGSLPDLTNIHFPSPLPTPLDPEEPTFPALSSSSSTGNLAANLTHLGIGGAGQGMSTPGSSPQHRPAGVSPLSLSTEARRQQASPTLSPLSPITQAVAMDALSLEQQLPYAFFTQAGSQQPPPQPQPPPPPPPASQQPPPPPPPQAPVRLPPGGPLLPSASLTRGPQPPPLAVTVPSSLPQSPPENPGQPSMGIDIASAPALQQYRTSAGSPANQSPTSPVSNQGFSPGSSPQHTSTLGSVFGDAYYEQQMAARQANALSHQLEQFNMMENAISSSSLYSPGSTLNYSQAAMMGLTGSHGSLPDSQQLGYASHSGIPNIILTVTGESPPSLSKELTSSLAGVGDVSFDSDSQFPLDELKIDPLTLDGLHMLNDPDMVLADPATEDTFRMDRL

SEQ ID NO: 38997 - DNA, 1953 bp, Artificial Sequence
  derived and/or modified sequence
atggccacctccaacaacccccggaagttttcggagaaaatcgctttgcataatcaaaagcaagcagaagaaactgcagcttttgaagaggttatgaaggatcttagcctgactagggctgcccgcctacagctgcaaaaatcccagtatctccagctgggccccagcagaggtcaatattacggcggctcacttccaaatgtgaaccagataggaagcggcaccatggatctccctttccagcccagcggttttctcggagaagcactggcggccgcgccggtctcactcaccccctttcagtcctcaggtctggacaccagtcggaccactcgccaccacggtcttgtcgatcgcgtttacagagagcggggccgcctcgggtccccccataggcggcctctgtccgtggataaacacggcagacaggccgatagctgcccctatggaactatgtatctgtcacctccagccgatacctcttggcgccgaactaatagcgactcagccctacatcagtccaccatgacgccaacacagcccgaatcttttagctctggaagccaggatgttcaccagaaacgagtactgttgctcacggtgcccggcatggaagagacaaccagcgaggccgacaagaacctgagcaagcaagcatgggatacgaagaagactgggtcccgcccaaagtcatgtgaagtacctgggattaatatcttcccaagcgcggatcaggaaaataccaccgccttgatacctgctacacacaacactggaggtagcctccccgacctgacgaatattcattttccaagcccccttccgaccccgctagatcccgaggagccaacctttcccgcccttagcagttcatcttccactggtaacctcgctgctaatctcacgcatcttggaattggcggcgccgggcagggcatgtctactcccggctcttccccccaacacagaccagccggcgtgtcgccgctgagcctgagtacggaggcccgtaggcagcaagcttcgcctacactctcccctctgtcaccaattacccaggctgttgctatggacgctctgtccctcgagcaacagctgccttacgcctttttcacacaagcaggcagccagcagcccccaccacagcctcagccaccacctccacccccccctgctagccagcagcctcctcctcctccacccccacaggcccccgtcagattgcccccgggcggcccattgttaccatccgccagcttgacgaggggcccccagccaccccctctggctgtgaccgtgccctctagtctgccgcagtctcccccagagaatcctgggcagccttccatgggcatagatatcgccagcgcccctgccctgcaacagtacaggacttccgcaggaagtcccgccaaccagagcccaacatcccctgtgagcaatcaaggctttagccctggaagttccccccagcatacgagcaccctcggcagcgtttttggagatgcttactatgagcagcagatggccgcacgacaggcaaatgctctgagccaccagctggagcagtttaacatgatggagaacgccattagtagctcttccctctactcacctgggtctactcttaactactcgcaggcagccatgatgggtcttactggtagtcatggatcattgcctgactcccagcaactgggatacgcgtcccactcaggaatcccaaacatcatactcactgtcaccggcgaatcccctccaagcctcagcaaagagctgacaagttctcttgcaggcgtcggcgatgtgagcttcgattcagactcccagtttcccttggatgaactgaagatcgacccactgacacttgacggcctgcacatgttgaacgatccagatatggtcctggctgaccccgctaccgaggatacgtttcggatggatagactgtag

SEQ ID NO: 38998 - DNA, 1953 bp, Artificial Sequence
  derived and/or modified sequence
atggccaccagcaacaaccccaggaagttcagcgagaagatcgccctgcacaaccagaagcaggccgaggagacagctgcctttgaggaggtgatgaaggacctgagcctgacccgggccgcccggctgcagctgcagaagagccagtacctgcagctgggccccagccggggccagtactatggaggcagcctgcccaacgtgaaccagatcggcagcggcaccatggacctgcccttccagcccagcggcttcctgggggaggccctggccgccgcccctgtgtccctgacccccttccagagcagcggcctggacaccagcaggaccaccaggcaccacggcctggtggacagagtgtaccgggagcggggccgcctgggcagcccccaccggcggcccctgtctgtggacaagcacggccggcaggccgacagctgcccctacggcaccatgtacctgagccccccagctgacacctcctggaggaggaccaacagcgacagcgccctgcaccagagcaccatgacccccacccagcctgagagcttcagcagcggcagccaggatgtgcaccagaagagggtgctgctgctgactgtgcccggcatggaggagaccaccagcgaggccgacaagaacctgagcaagcaggcctgggacaccaagaagacaggcagccggcccaagagctgtgaggtgcccggcatcaacatcttccccagcgctgaccaggagaacaccacagccctgatcccagccacccacaacacaggaggcagcctgcctgacctgaccaacatccacttccccagccccctgcccacccccctggaccctgaggagcccaccttccctgccctgagcagcagcagcagcacaggcaacctggccgccaacctgacccacctgggcatcggcggggccggccagggcatgagcaccccaggcagcagcccccagcacaggcctgctggggtgagccccctgagcctgagcacagaggcccggcggcagcaggccagccccaccctgagccccctgagccccatcacccaggccgtggccatggatgccctgagcctggagcagcagctgccctatgccttcttcacccaggccggcagccagcagcccccaccccagccccagcccccacctcctcctcctccagccagccagcagcccccacctcctcctccaccccaggcccctgtgcggctgcccccaggcggccccctgctgcccagcgccagcctgacccggggcccccagcccccacccctggccgtgacagtgcccagcagcctgccccagagccccccagaaaatcctggccagcccagcatgggcatcgacatcgccagcgccccagccctgcagcagtaccgcaccagcgctggcagccctgccaaccagagccccaccagccctgtgagcaaccagggcttcagccctggcagcagcccccagcacaccagcaccctgggctctgtgtttggagatgcctactatgagcagcagatggccgcccggcaggccaatgccctgagccaccagctggagcagttcaacatgatggagaatgccatcagcagcagcagcctgtacagccctggcagcaccctgaactacagccaggccgccatgatgggcctgaccggcagccacggcagcctgcctgacagccagcagctgggctacgccagccacagcggcatccccaacatcatcctgactgtgactggagagagcccccccagcctgagcaaggagctgaccagcagcctggccggcgtgggagatgtgtcctttgacagcgacagccagttccccctggatgagctgaagattgaccccctgaccctggatggcctgcacatgctgaatgaccctgacatggtgctggccgaccctgccacagaggacaccttcaggatggaccggctgtag

SEQ ID NO: 38999 - DNA, 1953 bp, Artificial Sequence
  derived and/or modified sequence
atggccaccagcaacaacccccggaagttcagcgagaagatcgccttgcataaccagaaacaggcagaggagacagctgcatttgaggaagtgatgaaggacctctccctgactagggctgcacgcctgcagctccagaaaagccagtacctccagctggggccaagccgcggccaatactacggcgggagtctcccaaatgtgaatcagataggttccgggacaatggacctgcctttccagccttcaggcttccttggggaagcactggcagccgcccccgtcagtctaaccccctttcagagttctggcctcgacaccagcaggacaactagacatcatggtcttgttgatcgggtctaccgcgagagaggtagactggggtcaccccataggagaccactatcagtcgataaacatggtaggcaggcagacagctgtccttatggtactatgtacctctccccacccgcagatacgtcttggcggcggactaactctgatagtgctcttcatcaaagtaccatgactcctacccaacctgaatcctttagctcaggtagccaggacgtgcaccagaaacgtgttcttctgctaacagtgccaggaatggaggagacaacttctgaagccgacaaaaacctctccaagcaggcatgggatactaagaagactggcagtagacctaagtcttgcgaggttccaggaatcaatatctttccaagcgcagaccaggagaacactacagcgctcattccggcaacacacaatactggcgggtctctgccagacctcacaaacatccatttcccaagtcctcttcctacccccctagacccagaggagcccacctttcccgcgctgagttcctcctcttccactggaaacctcgctgctaacctgacacatttgggcattggcggcgcaggtcaggggatgagtacaccgggcagcagcccacagcatagacccgcaggggtttcgccattgtccctcagtaccgaggcccggcgccagcaggcttctcctacacttagccctttgagccccatcactcaggcggtggctatggatgcactgtcactggagcaacagttgccgtacgcatttttcactcaggcgggttcacaacagccacctccccagcctcagccccccccaccccctcctcctgcaagccaacagcctccccctccaccgcccccacaagccccggtgcgcttgcctcccggcggtcccttgctgccctcagcttcactcaccagaggcccacagcctcctccgctcgctgtgacagtgccctcgagcctccctcagtccccgcctgagaatcccggccaaccatccatgggtattgacatagccagtgcccccgccctccagcagtatcgaacttctgcagggtcacccgccaatcagagccctacctcacccgtgtccaaccaggggtttagccctggatccagtccccagcataccagtacgttgggctccgtctttggtgatgcatactacgagcagcaaatggcagcgcgacaagccaatgccctgagtcaccagctggagcagttcaatatgatggaaaatgctatctcgtcttctagtttgtactcaccgggaagtacactcaactatagtcaggccgcgatgatgggtcttacagggtcccacgggagcctgcccgatagtcagcagctaggctatgcctcacactcaggcatcccaaacatcattctgactgtgactggcgagagtccacccagtctcagcaaagagttaactagctccctggccggggtgggcgacgtgagcttcgatagcgactcgcaattccccctcgacgaattgaagattgatccccttacccttgacgggcttcacatgctgaacgacccagacatggtcctcgctgaccccgcaactgaagatacatttcgcatggacaggctatag

SEQ ID NO: 39000 - DNA, 1953 bp, Artificial Sequence
  derived and/or modified sequence
atggccacctcaaataatcctcgcaaatttagtgagaagatagcccttcacaatcagaaacaagcagaagaaacggcggctttcgaggaggtgatgaaggatttgtctcttaccagagctgctcggctacaactgcagaagagtcaatatcttcagctgggacccagccgcggacaatactacggaggctctctgccgaacgtgaaccaaattggctcaggtaccatggacctgccctttcagccttctggctttctcggagaggcactcgcggctgctcccgtctcgctgaccccttttcagagctcaggcctcgatacctctcggacaaccagacaccatggtctggtggatcgggtttaccgagagagggggcgactggggagcccccaccgaaggccattgagcgtggataagcatggtaggcaggctgactcgtgtccctatggcacaatgtatctgtctcccccagccgatacaagctggaggcggaccaatagcgattccgccctccatcagtcaaccatgacccctacgcagcccgagagtttcagtagtggatctcaggacgtgcaccagaaacgcgtactactgctgactgtccccggtatggaagagaccacgagcgaggcagacaaaaatctgagtaagcaggcctgggacaccaaaaaaacagggagtcgtcctaagagttgcgaagtgccaggcattaacatatttccctccgcggatcaggagaacactacagcactgataccagcgacgcataacactgggggaagcttgccggatctgactaacatacacttccctagccctctccctacccctttagaccccgaagaaccgacattccccgcactttcatcaagctcttcgaccgggaaccttgctgccaacttaacccacctggggatcggcggagcaggtcaaggaatgagtacccccggaagctccccgcagcatcgcccagccggagtgtcacctctgtcactttctaccgaggccagacgtcagcaggcctctccaacgctttccccattaagccctatcacccaggccgttgctatggatgctttgtcactggagcagcagcttccctatgcgttcttcactcaggccggatcacagcagcctcctccccagccacaacccccacccccaccccctccagcatcccagcagccaccgcctcctccacccccacaagctcccgtcaggctcccacccggagggccactactgccaagtgcctccctgaccaggggacctcagccacctcccctcgctgtgacagtgcctagctctttaccacagagtcctcctgagaaccctgggcagccttcaatggggattgacatcgcctccgctcctgcactccaacaatatcgtacatcagccggatctccggcaaaccagtcccccacatctccggtgagtaatcagggattttctcccggtagttcaccacagcatacctcaaccctgggaagcgtgtttggggatgcatactatgaacaacaaatggccgcacgacaggccaacgccttaagccatcagttggaacagttcaacatgatggagaatgccattagcagttccagtctctattcacctggctccacgcttaattacagccaagctgccatgatgggactaactggctcccacggaagcctcccagactcacagcagctggggtatgcctctcattcaggtatccctaacataatcttaactgtaactggcgaatctccccctagcctgagtaaggagctgacatcaagtctcgcaggcgtcggggatgtctctttcgacagcgattcacagttccccctggatgaactcaagattgatccattgacactcgacgggctacacatgctcaatgatcctgacatggtactggctgatccggcaaccgaggataccttcaggatggaccggttatag

SEQ ID NO: 39001 - DNA, 6991 bp, Artificial Sequence
  derived and/or modified sequence
ccagccggcgcttgcgcggtggcacgggcgagtgggggggcgaggaggtggaggaggaggaggaggaggaggaggtggcggcgagaagatggcgacttcgaacaatccgcggaaattcagcgagaagatcgcgctgcacaatcagaagcaggcggaggagacggcggccttcgaggaggtcatgaaggacctgagcctgacgcgggccgcgcggctccagctccagaaatcccagtacctgcaactgggccccagccgaggccagtactatggcgggtccctgcccaacgtgaaccagatcgggagtggcaccatggacctgcccttccagcccagcggatttctgggggaggccctggcagcggctcctgtctctctgacccccttccaatcctcgggcctggacaccagccggaccacccggcaccatgggctggtggacagggtgtaccgggagcgtggccggctcggctccccacaccgccggcccctgtcagtggacaaacacggacggcaggccgacagctgcccctatggcaccatgtacctctcaccacccgcggacaccagctggagaaggaccaattctgactccgccctgcaccagagcacaatgacgcccacgcagccagaatcctttagcagtgggtcccaggacgtgcaccagaaaagagtcttactgttaacagtcccaggaatggaagagaccacatcagaggcagacaaaaacctttccaagcaagcatgggacaccaagaagacggggtccaggcccaagtcctgtgaggtccccggaatcaacatcttcccgtctgccgaccaggaaaacactacagccctgatccccgccacccacaacacaggggggtccctgcccgacctgaccaacatccacttcccctccccgctcccgaccccgctggaccccgaggagcccaccttccctgcactgagcagctccagcagcaccggcaacctcgcggccaacctgacgcacctgggcatcggtggcgccggccagggaatgagcacacctggctcctctccacagcaccgcccagctggcgtcagccccctgtccctgagcacagaggcaaggcgtcagcaggcatcgcccaccctgtccccgctgtcacccatcactcaggctgtagccatggacgccctgtctctggagcagcagctgccctacgccttcttcacccaggcgggctcccagcagccaccgccgcagccccagcccccgccgcctcctccacccgcgtcccagcagccaccacccccgccacccccacaggcgcccgtccgcctgccccctggtggccccctgttgcccagcgccagcctgactcgtgggccacagccgcccccgcttgcagtcacggtaccgtcctctctcccccagtcccccccagagaaccctggccagccatcgatggggatcgacatcgcctcggcgccggctctgcagcagtaccgcactagcgccggctccccggccaaccagtctcccacctcgccagtctccaatcaaggcttctccccagggagctccccgcaacacacttccaccctgggcagcgtgtttggggacgcgtactatgagcagcagatggcggccaggcaggccaatgctctgtcccaccagctggagcagttcaacatgatggagaacgccatcagctccagcagcctgtacagcccgggctccacactcaactactcgcaggcggccatgatgggcctcacgggcagccacgggagcctgccggactcgcagcaactgggatacgccagccacagtggcatccccaacatcatcctcacagtgacaggagagtccccccccagcctctctaaagaactgaccagctctctggccggggtcggcgacgtcagcttcgactccgacagccagtttcccctggacgaactcaagatcgaccccctgaccctcgacggactgcacatgctcaacgaccccgacatggttctggccgacccagccaccgaggacaccttccggatggaccgcctgtgagcgggcacgccggcaccctgccgctcagccgtcccgacggcgcctccccagcccggggacggccgtgctccgtccctcgccaacggccgagcttgtgattctgagcttgcaatgccgccaagcgccccccgccagcccgcccccggttgtccacctcccgcgaagcccaatcgcgaggccgcgagccgggccgtccacccacccgcccgcccagggctgggctgggatcggaggccgtgagcctcccgcccctgcagaccctccctgcactggctccctcgcccccagccccggggcctgagccgtcccctgtaagatgcgggaagtgtcagctcccggcgtggcgggcaggctcaggggaggggcgcgcatggtccgccagggctgtgggccgtggcgcattttccgactgtttgtccagctctcactgccttccttggttcccggtcccccagcccatccgccatccccagcccgtggtcaggtagagagtgagccccacgccgccccagggaggaggcgccagagcgcggggcagacgcaaagtgaaataaacactattttgacggctgtcttttatatttctgagcacacacagagccctggcgtccaccggggcaggcgcaaagtggacagagcatgcagggcggcggacccccccacgaccctcctcgccctgtctccatcccctcgaagccctgcctcaccgcaggcaggcccatcggtggccacctttgccgggaagtgaccggaaggccccgtgaggggtcgaacgcggaggcaggggttacctcttggggctttacaatccgtggcccctcctgtcctgcactgtggtcaccggtcctgtcatagatgctgttaatttaaggtacaggcagaggtggccaggggagtttcattgtggtttttttttccttttagtttctagttacattttggttgtagatgactcgcttaatcttttaagccaacacttgcctgagagcatgtttttatttcagaaatccaactttacctattttttaagctaactggaaatggaggccatgcgccccaaagcagcccgccacccacctgagtgtaagaagtgagtccggcttttgggtttcaccccaagttatctcaaaacaaaagggctggtcaggctgggcagggccttgtcaggagctcacggtaggcagaggtgcctctgccagggccacagaacagacttccgggaaggggccttggcttttattgagggtctctcaaagacccagcctgccagcctctcccagaggtgcctgctagtccttagagtgtgtgtgtgaagatgccatgaccagtggcagctgagacctctctgccccaagagtgtgggggactggcagggagcgagggtccccgagacgaggaccacggtcctccctgagaacctgggtggaactggcatttcatcccctctccaccctaccctctggctcctagcccacaccccctctcttgggcagcgtggtctgctggctgccccttcttggcagctcagggtcgtggcaggtggacttggagacacacagcagtgtgtgttttagtggcaggtttcaggagcacctctaagaccagggtgacagggtacttgggagctgtcctggaccctccccataccacgggccctgcaagggaggcatcagggctggctttgttttctgctgttcttggaataggaactgctgttctgatccccccaaaactgcattgcggctctcgctcgctcctgcctgccgggacagcgccttctgctgagtccgtttatttgtagtgtcatggctgctgctttcactggggtcctgggcaccctggcttctgtcctcagagctgggtttgatcctagcaaccatcccttcctctctttgcccggcaatgcctttggcatgtgtctgagcagccaagtggccactcataggagaaggctccctggtcacgttgctcctgctgccgtcttgttccaaggtgcgggggggacactgttggtctgtccaggtcaaggtccctttctcttaccatgacagaggctgggggcagacagcggggacttttttttttttttaagaaaaactacatgtacataggagagtttcattaccattagacttgtatgtaggacttaaaaaaaaatggccttaataaaattacaagcaacccgcctggatgcggttttcaaaagaaggcattgaggaccatgctaggaaacctcataccccatccgtccaacctccggcgggcgccactgcttgtcctctggtcttcggtgtggacagataggagaggagggatgcccacctcggagcatcccaggcccgtggcccattttcagcatcctgaagccagattcacagtgacattgtgttaacgtgacgaccttggtccattatggagttctttttccaataagaacctggtggaccgaggtccgagcttgccagggacagtggggcccacgcgagtacccggggcccagccaggagccagcagccaggcgtccctgtgttccagaaggattcacgcccctcctggacctgggcgggcctcccagggggtctgtatcacggccttttgtgtgtgcgtacgtgtggtttttttaaatatcactactacatattcttgaattgccaagactttctgaaacaagacagcttaagggaatcagccttttgctttgtgatgtgaaaatactgtgatttgacgagccgcttcctgaggggcaggcccacgtggggaggttgcgccgtgtacatagacccgccgtctgtgtccttggtcaggcccggatgcttggtctacactgggttagaggctgctctccccacgcacccatgtgctcatggcttctgcagaccctctgctgggtacatcggtcccctacggcgaagttcagccagggctctccctcctgagagcatggcgtccccaccttcctgtttcgccgacgtcactacccagggtggcaagtcttgcaggcagagggtgtagcccaagttcagcctctctctgtgtcctccagagaagagggttctttgccctcatcagggccctgcttgtgggttttcggctctggggaggagagtgttggcatcagtgtgtttggcctgatttcttcagggggccaagctcccgggaggacccctagccaggagggccccccatgtccatccatccctcctgctggggcttggatgtcaggcttgggggctgtgagctgggacctcgcctgagcccggtcaggtgggacaggagcctgccagaagcccatggggggccaggccgggtggcttctattttatttttttagagatggggtcttgctgtgttgcccaggctggtctcggactcctgggctcaagcagtcctccctcctcggcctcccaaagttctggggctacaggtgtgagccacttctgcccagcatcccaggcctgaacagccttggcaggacccgtccctagagggggctctggtgcctcccttaggtgggccttgagctggtttttaaccaaacatccttccaaactcgggctgcgacctgcttcctgagttttctgtatttccaaggagccctccgaccagggagaggctggtggagtaaggtccagcggtattcgggggtcctctgtcacctcgccctgaaaacagcagctcccatcaccttcactgggtcccgatggagccgtctcagaggccgaggggccctctgtgtgggggtgggacgcaggggctctcagagcaagggccacaaagccgatggcacagatgtgcccctgggcctggcccgtcacccacatgtggtgccctgggccagggcgtgcgggcgccagagccttccctacacagcctaagagcaggggcaagactcggcccctcactcaccctgggaggcctgcctgggctacatggacacctgggtctctttctacccccattcaccatggaccaggggcctccatttcctgggggctcttgcggcatgtgatttgggggtccctgggacattctcccgtcagctccacctgagccaagtgtcctgttccctgcggcccttggccttccagggtcctggccaggcaggggtcaggcaccccatactcttccgtgtggcacaggtgtccacccacccccactggccacagacaccattctccccctgggagcaggaggtggagtaagttgtacccccaggcctgggtgctggggagttcctgagggcatgggtggggcaggagtgagtgcctcgtgatcccagcctcagtttctctcttgtcactttctcaaacctgcaggtctcagggccccgggctcctcctgggcaggatggggggcaggggctgggccttggggtggtgctggctctgatgattccagagcctgtatccaccttctgggctcctggccagcaccccacccccaggagccagggacaggtggcatgtgttggggtcgggggatggcccccatctcgaagtgttctggaatttgggggcaacccttgcccagcccagccatcaagaacttctgatctcctgcccaccaggaggggacttagccatggacttggccagtaggcctggggagggagggctttggcagccaaagtccactggccctgccgtgcccctgagtaggaaactgtcccctaggggctgggtggccccactgatatatgcaaacccgccggtccgagccctgttcctgcctgtgctcctctgtgcccaggctggctctcccccaaccctagcatgtatactctgccacggacgtcccgtgggccatgattgtgggcggccgcagcgggcgggggcaggcggctcagggcacactcggccgtccctgccccatcctctggcagggctgcttttgtctttgtacctttgcatcctttgtaatgaaacgtaataaaaatccaacgttttcgtc

SEQ ID NO: 39002 - DNA, 1953 bp, Artificial Sequence
  derived and/or modified sequence
atggccaccagcaacaaccccagaaagttcagcgagaagatcgccctgcacaaccagaagcaggccgaggagaccgccgccttcgaggaggtgatgaaggacctgagcctgaccagagccgccagactgcagctgcagaagagccagtacctgcagctgggccccagcagaggccagtactacggcggcagcctgcccaacgtgaaccagatcggcagcggcaccatggacctgcccttccagcccagcggcttcctgggcgaggccctggccgccgcccccgtgagcctgacccccttccagagcagcggcctggacaccagcagaaccaccagacaccacggcctggtggacagagtgtacagagagagaggcagactgggcagcccccacagaagacccctgagcgtggacaagcacggcagacaggccgacagctgcccctacggcaccatgtacctgagcccccccgccgacaccagctggagaagaaccaacagcgacagcgccctgcaccagagcaccatgacccccacccagcccgagagcttcagcagcggcagccaggacgtgcaccagaagagagtgctgctgctgaccgtgcccggcatggaggagaccaccagcgaggccgacaagaacctgagcaagcaggcctgggacaccaagaagaccggcagcagacccaagagctgcgaggtgcccggcatcaacatcttccccagcgccgaccaggagaacaccaccgccctgatccccgccacccacaacaccggcggcagcctgcccgacctgaccaacatccacttccccagccccctgcccacccccctggaccccgaggagcccaccttccccgccctgagcagcagcagcagcaccggcaacctggccgccaacctgacccacctgggcatcggcggcgccggccagggcatgagcacccccggcagcagcccccagcacagacccgccggcgtgagccccctgagcctgagcaccgaggccagaagacagcaggccagccccaccctgagccccctgagccccatcacccaggccgtggccatggacgccctgagcctggagcagcagctgccctacgccttcttcacccaggccggcagccagcagccccccccccagccccagcccccccccccccccccccccgccagccagcagccccccccccccccccccccccaggcccccgtgagactgccccccggcggccccctgctgcccagcgccagcctgaccagaggcccccagcccccccccctggccgtgaccgtgcccagcagcctgccccagagcccccccgagaaccccggccagcccagcatgggcatcgacatcgccagcgcccccgccctgcagcagtacagaaccagcgccggcagccccgccaaccagagccccaccagccccgtgagcaaccagggcttcagccccggcagcagcccccagcacaccagcaccctgggcagcgtgttcggcgacgcctactacgagcagcagatggccgccagacaggccaacgccctgagccaccagctggagcagttcaacatgatggagaacgccatcagcagcagcagcctgtacagccccggcagcaccctgaactacagccaggccgccatgatgggcctgaccggcagccacggcagcctgcccgacagccagcagctgggctacgccagccacagcggcatccccaacatcatcctgaccgtgaccggcgagagcccccccagcctgagcaaggagctgaccagcagcctggccggcgtgggcgacgtgagcttcgacagcgacagccagttccccctggacgagctgaagatcgaccccctgaccctggacggcctgcacatgctgaacgaccccgacatggtgctggccgaccccgccaccgaggacaccttcagaatggacagactgtag

SEQ ID NO: 39003 - protein, 1079 aa, Artificial Sequence
  derived and/or modified sequence
MEDEAVLDRGASFLKHVCDEEEVEGHHTIYIGVHVPKSYRRRRRHKRKTGHKEKKEKERISENYSDKSDIENADESSSSILKPLISPAAERIRFILGEEDDSPAPPQLFTELDELLAVDGQEMEWKETARWIKFEEKVEQGGERWSKPHVATLSLHSLFELRTCMEKGSIMLDREASSLPQLVEMIVDHQIETGLLKPELKDKVTYTLLRKHRHQTKKSNLRSLADIGKTVSSASRMFTNPDNGSPAMTHRNLTSSSLNDISDKPEKDQLKNKFMKKLPRDAEASNVLVGEVDFLDTPFIAFVRLQQAVMLGALTEVPVPTRFLFILLGPKGKAKSYHEIGRAIATLMSDEVFHDIAYKAKDRHDLIAGIDEFLDEVIVLPPGEWDPAIRIEPPKSLPSSDKRKNMYSGGENVQMNGDTPHDGGHGGGGHGDCEELQRTGRFCGGLIKDIKRKAPFFASDFYDALNIQALSAILFIYLATVTNAITFGGLLGDATDNMQGVLESFLGTAVSGAIFCLFAGQPLTILSSTGPVLVFERLLFNFSKDNNFDYLEFRLWIGLWSAFLCLILVATDASFLVQYFTRFTEEGFSSLISFIFIYDAFKKMIKLADYYPINSNFKVGYNTLFSCTCVPPDPANISISNDTTLAPEYLPTMSSTDMYHNTTFDWAFLSKKECSKYGGNLVGNNCNFVPDITLMSFILFLGTYTSSMALKKFKTSPYFPTTARKLISDFAIILSILIFCVIDALVGVDTPKLIVPSEFKPTSPNRGWFVPPFGENPWWVCLAAAIPALLVTILIFMDQQITAVIVNRKEHKLKKGAGYHLDLFWVAILMVICSLMALPWYVAATVISIAHIDSLKMETETSAPGEQPKFLGVREQRVTGTLVFILTGLSVFMAPILKFIPMPVLYGVFLYMGVASLNGVQFMDRLKLLLMPLKHQPDFIYLRHVPLRRVHLFTFLQVLCLALLWILKSTVAAIIFPVMILALVAVRKGMDYLFSQHDLSFLDDVIPEKDKKKKEDEKKKKKKKGSLDSDNDDSDCPYSEKVPSIKIPMDIMEQQPFLSDSKPSDRERSPTFLERHTSC

SEQ ID NO: 39004 - protein, 995 aa, Artificial Sequence
  derived and/or modified sequence
MEDEAVLDRGASFLKHVCDEEEVEGHHTIYIGVHVPKSYRRRRRHKRKTGHKEKKEKERISENYSDKSDIENADESSSSILKPLISPAAERIRFILGEEDDSPAPPQLFTELDELLAVDGQEMEWKETARWIKFEEKVEQGGERWSKPHVATLSLHSLFELRTCMEKGSIMLDREASSLPQLVEMIVDHQIETGLLKPELKDKVTYTLLRKHRHQTKKSNLRSLADIGKTVSSASRMFTNPDNGSPAMTHRNLTSSSLNDISDKPEKDQLKNKFMKKLPRDAEASNVLVGEVDFLDTPFIAFVRLQQAVMLGALTEVPVPTRFLFILLGPKGKAKSYHEIGRAIATLMSDEVFHDIAYKAKDRHDLIAGIDEFLDEVIVLPPGEWDPAIRIEPPKSLPSSDKRKNMYSGGENVQMNGDTPHDGGHGGGGHGDCEELQRTGRFCGGLIKDIKRKAPFFASDFYDALNIQALSAILFIYLATVTNAITFGGLLGDATDNMQGVLESFLGTAVSGAIFCLFAGQPLTILSSTGPVLVFERLLFNFSKDNNFDYLEFRLWIGLWSAFLCLILVATDASFLVQYFTRFTEEGFSSLISFIFIYDAFKKMIKLADYYPINSNFKVGYNTLFSCTCVPPDPANISISNDTTLAPEYLPTMSSTDMYHNTTFDWAFLSKKECSKYGGNLVGNNCNFVPDITLMSFILFLGTYTSSMALKKFKTSPYFPTTARKLISDFAIILSILIFCVIDALVGVDTPKLIVPSEFKPTSPNRGWFVPPFGENPWWVCLAAAIPALLVTILIFMDQQITAVIVNRKEHKLKFIPMPVLYGVFLYMGVASLNGVQFMDRLKLLLMPLKHQPDFIYLRHVPLRRVHLFTFLQVLCLALLWILKSTVAAIIFPVMILALVAVRKGMDYLFSQHDLSFLDDVIPEKDKKKKEDEKKKKKKKGSLDSDNDDSDCPYSEKVPSIKIPMDIMEQQPFLSDSKPSDRERSPTFLERHTSC

SEQ ID NO: 39005 - DNA, 3240 bp, Artificial Sequence
  derived and/or modified sequence
atggaggacgaggccgtgctggacagaggcgccagcttcctgaagcacgtgtgcgacgaggaggaggtggagggccaccacaccatctacatcggcgtgcacgtgcccaagagctacagaagaagaagaagacacaagagaaagaccggccacaaggagaagaaggagaaggagagaatcagcgagaactacagcgacaagagcgacatcgagaacgccgacgagagcagcagcagcatcctgaagcccctgatcagccccgccgccgagagaatcagattcatcctgggcgaggaggacgacagccccgcccccccccagctgttcaccgagctggacgagctgctggccgtggacggccaggagatggagtggaaggagaccgccagatggatcaagttcgaggagaaggtggagcagggcggcgagagatggagcaagccccacgtggccaccctgagcctgcacagcctgttcgagctgagaacctgcatggagaagggcagcatcatgctggacagagaggccagcagcctgccccagctggtggagatgatcgtggaccaccagatcgagaccggcctgctgaagcccgagctgaaggacaaggtgacctacaccctgctgagaaagcacagacaccagaccaagaagagcaacctgagaagcctggccgacatcggcaagaccgtgagcagcgccagcagaatgttcaccaaccccgacaacggcagccccgccatgacccacagaaacctgaccagcagcagcctgaacgacatcagcgacaagcccgagaaggaccagctgaagaacaagttcatgaagaagctgcccagagacgccgaggccagcaacgtgctggtgggcgaggtggacttcctggacacccccttcatcgccttcgtgagactgcagcaggccgtgatgctgggcgccctgaccgaggtgcccgtgcccaccagattcctgttcatcctgctgggccccaagggcaaggccaagagctaccacgagatcggcagagccatcgccaccctgatgagcgacgaggtgttccacgacatcgcctacaaggccaaggacagacacgacctgatcgccggcatcgacgagttcctggacgaggtgatcgtgctgccccccggcgagtgggaccccgccatcagaatcgagccccccaagagcctgcccagcagcgacaagagaaagaacatgtacagcggcggcgagaacgtgcagatgaacggcgacaccccccacgacggcggccacggcggcggcggccacggcgactgcgaggagctgcagagaaccggcagattctgcggcggcctgatcaaggacatcaagagaaaggcccccttcttcgccagcgacttctacgacgccctgaacatccaggccctgagcgccatcctgttcatctacctggccaccgtgaccaacgccatcaccttcggcggcctgctgggcgacgccaccgacaacatgcagggcgtgctggagagcttcctgggcaccgccgtgagcggcgccatcttctgcctgttcgccggccagcccctgaccatcctgagcagcaccggccccgtgctggtgttcgagagactgctgttcaacttcagcaaggacaacaacttcgactacctggagttcagactgtggatcggcctgtggagcgccttcctgtgcctgatcctggtggccaccgacgccagcttcctggtgcagtacttcaccagattcaccgaggagggcttcagcagcctgatcagcttcatcttcatctacgacgccttcaagaagatgatcaagctggccgactactaccccatcaacagcaacttcaaggtgggctacaacaccctgttcagctgcacctgcgtgccccccgaccccgccaacatcagcatcagcaacgacaccaccctggcccccgagtacctgcccaccatgagcagcaccgacatgtaccacaacaccaccttcgactgggccttcctgagcaagaaggagtgcagcaagtacggcggcaacctggtgggcaacaactgcaacttcgtgcccgacatcaccctgatgagcttcatcctgttcctgggcacctacaccagcagcatggccctgaagaagttcaagaccagcccctacttccccaccaccgccagaaagctgatcagcgacttcgccatcatcctgagcatcctgatcttctgcgtgatcgacgccctggtgggcgtggacacccccaagctgatcgtgcccagcgagttcaagcccaccagccccaacagaggctggttcgtgccccccttcggcgagaacccctggtgggtgtgcctggccgccgccatccccgccctgctggtgaccatcctgatcttcatggaccagcagatcaccgccgtgatcgtgaacagaaaggagcacaagctgaagaagggcgccggctaccacctggacctgttctgggtggccatcctgatggtgatctgcagcctgatggccctgccctggtacgtggccgccaccgtgatcagcatcgcccacatcgacagcctgaagatggagaccgagaccagcgcccccggcgagcagcccaagttcctgggcgtgagagagcagagagtgaccggcaccctggtgttcatcctgaccggcctgagcgtgttcatggcccccatcctgaagttcatccccatgcccgtgctgtacggcgtgttcctgtacatgggcgtggccagcctgaacggcgtgcagttcatggacagactgaagctgctgctgatgcccctgaagcaccagcccgacttcatctacctgagacacgtgcccctgagaagagtgcacctgttcaccttcctgcaggtgctgtgcctggccctgctgtggatcctgaagagcaccgtggccgccatcatcttccccgtgatgatcctggccctggtggccgtgagaaagggcatggactacctgttcagccagcacgacctgagcttcctggacgacgtgatccccgagaaggacaagaagaagaaggaggacgagaagaagaagaagaagaagaagggcagcctggacagcgacaacgacgacagcgactgcccctacagcgagaaggtgcccagcatcaagatccccatggacatcatggagcagcagcccttcctgagcgacagcaagcccagcgacagagagagaagccccaccttcctggagagacacaccagctgctag

SEQ ID NO: 39006 - DNA, 3240 bp, Artificial Sequence
  derived and/or modified sequence
atggaggatgaggcggttctcgaccggggcgcctcattcctcaaacacgtttgtgacgaggaagaagtggagggccatcacacgatatacataggtgttcatgtgcccaagagctataggaggcgccgtagacacaagcggaagaccgggcacaaagagaaaaaggaaaaagagcgaattagtgagaactattccgataaaagcgacatcgagaatgccgatgagagcagctcctccattctgaagcctctaattagcccggctgcagaacggattaggttcatcctcggagaagaggacgactcccctgcaccaccccagctgtttactgagcttgatgagttacttgccgtggacggccaggagatggagtggaaagagactgctagatggattaaatttgaagagaaggttgagcaggggggtgaacgatggtctaagccacacgtggccacactgagcttgcattctctgtttgaactccgtacttgtatggaaaaggggtccataatgctggacagagaggcatcgtcgctgcctcagctcgtggagatgattgtcgatcatcagatcgaaacaggcctcctgaagcctgaactgaaagataaggtcacatacacactgctgaggaaacaccgacaccagacgaagaagtcgaatctgaggagcttagctgatatcggcaaaactgttagttctgcttccagaatgttcactaatccggacaacggctctccggcaatgactcaccggaacctgacctccagctctcttaacgacatttcagacaagccggaaaaggatcagctcaaaaataagttcatgaagaagcttccacgcgacgccgaggcttctaacgtcctggtcggcgaggtggacttcctggatacacccttcatcgcttttgtccgtctgcaacaggccgtgatgctgggcgccctcacagaagtgcctgtgccgacccggtttctgtttatcttgctcgggccgaagggcaaagccaagagctaccacgagatcggaagggccatcgcaacgctgatgtctgatgaggtctttcacgatatagcatacaaagccaaggatcggcatgatcttatcgccgggatcgacgagttcctggatgaggtcatcgtcctgccacccggggagtgggaccccgccatacggatcgaacctcctaaaagcttaccatccagcgataaacgaaaaaatatgtacagcgggggtgaaaatgtacagatgaacggggatacccctcacgatggaggtcacggcggcggcggacacggggattgcgaggagcttcagagaactggcagattctgtggcggactcatcaaggatatcaaacgcaaggcccccttcttcgcatccgacttctatgatgccttaaatatccaagctctcagtgccatcctgttcatctaccttgccacggtgacaaatgccataacatttggcggtctgctgggcgacgcgactgataacatgcagggcgtccttgaaagcttccttggaaccgccgtgtccggagcgatcttttgtctgttcgcgggacaacctctgactatcctgagcagcaccggtcctgtactggtgttcgaacgactcttgttcaacttctccaaggacaacaactttgattatcttgagtttcggttatggataggcttgtggtccgcttttctctgtctgatcctggtcgcaaccgatgccagctttctggtgcaatacttcacaagatttacggaggagggttttagctccctgatctctttcatctttatttacgacgccttcaaaaagatgattaagctggcagattactacccaataaattctaatttcaaggtaggctataacacactgttctcctgcacatgcgtgcccccagaccctgcaaacataagtatcagcaatgacacaacactggcccctgaatacctcccgaccatgagcagtaccgacatgtatcacaataccactttcgactgggcttttttgtccaagaaagaatgttctaaatatggcggtaacctggtgggcaataactgcaatttcgtgcccgacattaccctgatgtcttttattctgtttctgggcacgtacacatcttccatggccttaaagaaatttaagacatcaccctacttccctacaacagcccggaaattgatctctgactttgctataattctttccattttgattttctgtgttatcgacgccctggtgggtgttgatactccaaaactcatagttcctagcgaatttaagcctacatcccccaatagaggatggtttgttcctcctttcggggaaaacccctggtgggtatgcctggctgccgccatcccagctctcctggtgacaatcttgatattcatggaccagcagatcacagcagtgatcgtcaatcgaaaggagcacaaactgaaaaaaggggcagggtaccacctcgatctgttctgggtggccatcctgatggttatctgtagtctgatggccctaccctggtacgtggccgcaaccgtgatttcaatcgctcacattgattctctgaagatggagaccgagacaagcgctcccggagagcagcccaaatttctgggcgttcgagaacagagggtgactggaaccttagtgttcatcttgaccggattgtctgtctttatggcccccatactgaagttcatcccgatgcccgtcctgtacggagtcttcctgtatatgggtgtcgcctccctaaatggtgtccagtttatggatcgcttgaagcttctgctgatgcccctgaagcaccagccagacttcatctatctcaggcacgtgcctttgcggcgggtgcacttgtttacctttctccaagtgctgtgcctggccctattgtggatactaaagtccactgttgcggcgattatatttccggtcatgattctagcccttgtggccgtgcgcaaggggatggactacttgttcagccaacatgatctcagctttctagacgatgtgattcccgaaaaggataagaagaagaaggaggatgagaaaaagaagaaaaagaaaaaagggagcttagacagcgataatgatgatagcgactgcccttactccgaaaaggttccaagcatcaaaatccccatggacatcatggagcagcaaccattcttaagtgattccaagccctccgacagggagcgctctccaacctttctagaacgacacacaagttgctag

SEQ ID NO: 39007 - DNA, 3240 bp, Artificial Sequence
  derived and/or modified sequence
atggaggatgaagctgtgctggacagaggagccagcttcctgaagcacgtgtgtgatgaggaggaggtggagggccaccacaccatctacatcggcgtgcacgtgcccaagagctacagaagaagaagaagacacaagaggaagacaggccacaaggagaagaaggagaaggagcgcatcagcgagaactacagcgacaagagtgacattgaaaatgctgatgagagcagcagcagcatcctgaagcccctcatcagccctgctgctgagcgcatccgcttcatcctgggggaggaggatgacagccctgccccaccccagctgttcacagagctggatgagctgctggccgtggatggccaggagatggagtggaaggagacagcccgctggatcaagtttgaggagaaggtggagcagggcggggagcgctggagcaagccccacgtggccaccctgagcctgcacagcctgtttgagctgcggacctgcatggagaagggcagcatcatgctggaccgggaggccagcagcctgccccagctggtggagatgattgtggaccaccagattgaaacaggcctgctgaagccagagctgaaggacaaggtgacctacaccctgctgaggaagcaccgccaccagaccaagaagagcaacctgcggagcctggccgacatcggcaagacagtgtcctctgccagcaggatgttcaccaacccagacaatggcagccctgccatgacccacaggaacctgaccagcagcagcctgaatgacatcagtgacaagccagagaaggaccagctgaagaacaagttcatgaagaagctgcccagagatgctgaggccagcaatgtgctggtgggggaggtggacttcctggacacccccttcatcgcctttgtgcggctgcagcaggccgtgatgctgggcgccctgacagaggtgcctgtgcccacccgcttcctgttcatcctgctgggccccaagggcaaggccaagagctaccacgagatcggccgggccatcgccaccctgatgtctgatgaggtgttccatgacatcgcctacaaggccaaggacagacatgacctgattgctggcattgatgagttcctggatgaagtcatcgtgctgcccccaggagagtgggaccctgccatcagaattgagccccccaagagcctgcccagcagtgacaagaggaagaacatgtacagcggaggagaaaatgtgcagatgaatggagacacccctcatgatggcggccatggaggcggcggccacggggactgtgaggagctgcagaggacaggccgcttctgtggcggcctcatcaaggacatcaagaggaaggcccccttctttgccagtgacttctatgatgccctgaacatccaggccctgagcgccatcctcttcatctacctggccaccgtgaccaatgccatcacctttggaggcctgctgggagatgccacagacaacatgcagggcgtgctggagagcttcctgggcacagctgtgtctggggccatcttctgcctgtttgctggccagcccctgaccatcctgagcagcactggacctgtgctggtgtttgagcggctgctcttcaacttcagcaaggacaacaactttgactacctggagttccggctgtggattggcctgtggagcgccttcctgtgcctgatcctggtggccacagatgccagcttcctggtgcagtacttcacccgcttcacagaggagggcttcagcagcctcatctccttcatcttcatctatgatgccttcaagaagatgatcaagctggccgactactaccccatcaacagcaacttcaaggtgggctacaacaccctcttcagctgcacctgtgtgcccccagaccctgccaacatcagcatcagcaatgacaccaccctggcccctgagtacctgcccaccatgagcagcacagacatgtaccacaacaccacctttgactgggccttcctgagcaagaaggaatgttccaaatatggaggcaacctggtgggcaacaactgcaactttgtgcctgacatcaccctgatgtccttcatcctcttcctgggcacctacaccagctccatggccctgaagaagttcaagaccagcccctacttccccaccacagccaggaagctgatcagtgactttgccatcatcctgagcatcctgatcttctgtgtgattgatgccctggtgggcgtggacacccccaagctgattgtgcccagcgagttcaagcccaccagccccaacagaggctggtttgtgcccccatttggagagaacccctggtgggtgtgcctggccgccgccatcccagccctgctggtgaccatcctgatcttcatggaccagcagatcacagctgtgattgtgaacaggaaggagcacaagctgaagaagggagctggctaccacctggacctcttctgggtggccatcctgatggtgatctgcagcctgatggccctgccctggtacgtggccgccaccgtcatcagcatcgcccacatcgacagcctgaagatggagacagagaccagcgcccctggagagcagcccaagttcctgggcgtgcgggagcagagggtgacaggcaccctggtgttcatcctgaccggcctgagcgtcttcatggcccccatcctgaagttcatccccatgcctgtgctgtatggagtcttcctgtacatgggcgtggccagcctgaatggagtgcagttcatggaccggctgaagctgctgctgatgcccctgaagcaccagcctgacttcatctacctgcggcacgtgcccctgcggcgggtgcacctgttcaccttcctgcaggtgctgtgcctggccctgctgtggatcctgaagagcacagtggccgccatcatcttccctgtgatgatcctggccctggtggccgtgaggaagggcatggactacctgttcagccagcacgacctgtccttcctggatgatgtgattcctgagaaggacaagaagaagaaggaggatgagaagaagaagaagaagaagaagggcagcctggacagcgacaatgatgacagcgactgcccctacagcgagaaggtgcccagcatcaagatccccatggacatcatggagcagcagcccttcctgagtgacagcaagcccagcgaccgggagaggagccccaccttcctggagcggcacaccagctgctag

SEQ ID NO: 39008 - DNA, 3240 bp, Artificial Sequence
  derived and/or modified sequence
atggaggacgaggccgtgctggaccggggcgccagcttcctgaagcatgtatgtgatgaggaggaagttgaaggacaccatactatctacattggggtgcatgtacctaaatcatacagaaggcgccggaggcacaagaggaaaacgggtcataaggaaaaaaaggagaaggagcggatctcagagaactattccgataagtccgatatcgaaaacgccgacgagtcatcttcctccatccttaaacctctcatttccccagccgcggagcggattagatttatccttggggaggaagacgactcacctgcccctccacagctgtttactgagcttgatgagctgcttgccgtggatgggcaggagatggagtggaaggagacggctagatggatcaaatttgaagaaaaggtagagcaggggggggaacggtggtccaaacctcacgttgccacactcagccttcactccctctttgaactccggacgtgtatggagaaaggctcaatcatgctggaccgggaagccagttcattacctcagctggttgagatgatcgtggatcaccagatcgaaacagggttgctcaaacctgagctcaaagataaggtgacatatactctgctcagaaagcatcgccatcagaccaagaagagcaacctgagatcactcgctgatatcggaaaaaccgtttcatctgctagtcggatgtttactaaccctgataacggttcgccagccatgacacatagaaacctgacatcaagtagcctcaacgatatctccgacaaacccgaaaaggaccagctgaaaaataagttcatgaagaaattgcctcgcgacgctgaagcaagcaacgtactggttggggaggtggatttcttagatacaccgtttattgcgtttgttcgcctgcagcaggccgtcatgctcggagccctgaccgaggtacctgtacctacacgctttctatttattcttctgggcccaaaggggaaagccaagtcgtaccatgaaattggaagagccattgccacactaatgtcggacgaagtcttccatgacatcgcatacaaggctaaggaccgtcacgacctgattgcagggatcgacgaattcctggacgaagtgattgtcctgcccccaggcgagtgggaccccgccatccgcattgaaccacctaagtcgctgccgtcgtccgataaaagaaagaatatgtactctggcggggaaaacgtccagatgaacggagatactccccatgatggcggccatggtggaggaggacacggcgactgcgaggagttgcagaggacaggccgcttttgcggcggattgatcaaggatattaaaagaaaggcccctttctttgcctccgacttttacgacgctcttaacatccaagccctgtctgccattcttttcatttatctggccacggtcacgaatgccattacgttcggagggttgttgggagacgccacggataacatgcagggcgtgctggagtcatttctgggaaccgcagtaagtggtgcaatattttgcctgtttgctggacagccccttactatcttgtcatcaaccggtcccgtcttggtgttcgagcgccttttgttcaacttcagcaaggacaacaacttcgattacctggagtttcggttgtggataggcctttggtcggcctttctgtgccttatcctagtggccacggacgccagcttcctggttcaatacttcactaggtttacagaagaagggtttagtagcttaattagcttcatcttcatttacgacgcattcaaaaagatgatcaaactggccgattactatcccataaacagcaacttcaaagtgggatacaacactctgttctcttgtacatgcgtgccacccgatcctgccaatatttcgataagcaacgataccacactggccccagaatatctccccactatgagcagtacagatatgtaccataataccacatttgactgggctttcctgagtaagaaagagtgcagcaagtatggcggaaatctggtggggaataactgtaatttcgtccctgacataaccctaatgtcttttatcctctttctaggaacctacaccagctcaatggcattgaaaaagttcaaaacctcaccctacttccctacgactgccagaaaactgatttctgattttgctatcatcctgagcattctgatattttgcgtgatcgacgcactcgtcggggtggataccccaaaattaatagtgcctagtgagttcaaaccaacttcacccaacagaggctggttcgttcccccattcggtgaaaatccttggtgggtgtgtctggccgccgccatccccgccctccttgttaccattctcatttttatggatcagcaaattacagccgtaattgttaaccgcaaagagcataagctgaagaaaggagctggctaccatctggacctgttctgggtggccatcctgatggtgatttgctccctgatggctctcccctggtatgttgctgcaacagtcatctctatcgcacacatcgactcacttaaaatggagaccgaaacctccgccccaggagagcagcccaaatttttaggggtaagagagcagcgggttacagggacgctagtgttcattctcacaggcctgtctgttttcatggcacccatccttaaatttattcctatgcctgtgctttacggggtctttttgtacatgggggtcgcttctctcaacggcgtgcagtttatggaccggctaaaactcctcctaatgcccctgaagcaccaacccgactttatctatctccgacatgtgccgctccggcgggtccacttgttcacattcttgcaagtgctgtgcctcgccctgctgtggattttgaagtccactgtggccgccataatcttcccagtgatgatactggccctggtcgctgtgaggaaaggaatggattatctctttagccagcatgatctgagctttctggacgacgtcattcccgagaaagacaaaaagaagaaggaagacgagaaaaagaaaaagaagaaaaaggggtcgttggacagtgataacgatgattcagactgtccatacagcgaaaaagtcccatccattaagatacccatggatattatggagcagcagccatttttgtccgatagcaagccaagtgatcgtgaaagatcccccacgtttcttgaacgccacacgtcctgttag

SEQ ID NO: 39009 - DNA, 3240 bp, Artificial Sequence
  derived and/or modified sequence
atggaagacgaggcagtgctagaccggggtgcctcttttctcaagcacgtgtgcgatgaagaggaagtggaggggcaccacacaatttatatcggagtccatgtgcccaagtcttatagacggaggaggagacataagcgcaaaactggacataaagagaaaaaggaaaaagagcggatatccgaaaactactctgacaagagtgatatcgagaatgccgacgagagcagtagtagtatcctgaaacctctcatttctccagcagccgagagaatccgctttatactgggagaggaggacgactctccagctcccccacagctgttcactgagttagacgaacttctggcggtagacgggcaggagatggagtggaaggagaccgcccgatggatcaagttcgaggaaaaagttgagcagggcggagagaggtggagtaaaccacacgtggctactctgagtctgcactcactgttcgaactacgcacctgtatggaaaaaggatccataatgcttgaccgcgaggcctccagcctcccccaactggttgaaatgatagtcgaccaccaaatcgagacaggtctgctgaagccagagttgaaggataaggtgacttatactctgctgaggaaacaccgtcaccagaccaaaaagagcaatctgcgaagcctggctgacatcgggaaaaccgttagctcagcctctaggatgtttaccaacccggataacgggagcccagcaatgactcatcgaaatctgacgtcatcttccctgaatgatatttcagataaacctgagaaggaccagctgaagaacaaatttatgaaaaagttacccagggacgctgaagcaagcaacgtcctcgtgggagaggtggactttctggatacgccgttcatagctttcgtgcgcctgcaacaggcagtgatgttaggcgctttgacggaggtgcctgttcctaccagattcctatttatcctccttggccctaaaggcaaggccaagtcctatcatgagatcggcagggcaatcgctactctgatgagcgacgaagtgtttcatgatattgcttacaaggctaaggatagacatgatttgattgccggtatagatgaattcctcgacgaggttattgtccttcctcccggagagtgggacccagccatacgaatagagccgcctaaatccctgccgtctagcgacaagagaaagaacatgtatagtggtggtgagaacgtgcaaatgaacggggacaccccccacgatggcggacatggcggaggcggacacggcgattgtgaggagcttcaaagaacaggtcgtttttgcgggggtctcattaaggatatcaaaagaaaggccccattttttgcatccgacttctacgacgcgctaaacattcaggcccttagtgccatactgttcatctatttagcgactgtaactaatgctataacgtttggcggtctgctgggcgatgctaccgataatatgcagggtgtcctcgagtcattcctgggaactgcggtcagcggcgctatattctgcctgtttgccggacaaccactcaccattctctcatctactggcccagtactggtcttcgagcgattgctgttcaacttttccaaagacaacaactttgactacctcgagttcaggctttggattggactgtggtccgcgtttttatgtctgatcctggtggccacggacgctagttttttggtgcagtatttcacaagattcacagaagaagggtttagcagtctgatatctttcatctttatctatgacgcctttaagaaaatgattaaactggcagattactaccccatcaacagtaatttcaaagtgggctacaacactctattctcttgcacttgtgtacctccagacccagccaatataagtatcagtaatgacacaactctagctcccgagtacctccccactatgtcatccaccgatatgtaccacaatacaacgtttgactgggccttcctaagcaagaaggagtgtagcaagtacggcggtaacctcgtggggaacaactgtaacttcgtgcccgacattacactgatgtctttcattctgttcctgggcacttacaccagtagcatggccctgaaaaagttcaaaacctcaccatactttcccactaccgctcggaagctcatttcagatttcgccataatcttatctattttgatattttgcgtgatagacgccctggtcggagtcgacactcccaaactcattgtcccaagcgagtttaaaccaacatctccgaatcgcggttggtttgtacctccctttggagaaaatccttggtgggtctgcctggccgcagccatcccagccctcctggttactatcctgatcttcatggatcagcaaatcacagcagtgatcgtcaaccgaaaggaacacaagcttaagaagggggcagggtaccatcttgacctcttttgggtggccatcctcatggtgatatgctccctgatggccctcccttggtatgtggccgcaactgtgattagcattgcccatatcgactctcttaaaatggaaactgagacctcagcgcctggcgagcagcccaagtttttgggcgttcgggaacagcgcgtgaccggcacactggtgttcatcctaactggtctctctgtgtttatggccccaattctgaagtttatccccatgcctgtactgtatggagtgttcttatatatgggcgtcgcatccctcaacggggttcagttcatggaccgtcttaaacttttgctcatgcctttaaagcaccagccggatttcatttatcttcgacacgtgccgctccgaagggttcatctctttacgttcctccaggtactgtgcctggctctgctgtggatcctgaaaagtaccgtggctgccatcatcttccccgtgatgattctagccttggtggctgttcggaagggcatggattatctgttttctcagcacgatctcagctttctagatgacgttatcccagagaaggataagaaaaaaaaggaggatgagaagaaaaaaaaaaagaagaaagggtctcttgactctgacaatgacgactcagactgcccatactctgaaaaagtcccgtcaattaaaatccccatggacattatggagcagcaaccattcctgagcgacagtaaaccatccgatcgagaacggtccccaacttttctggaaagacacacaagctgttag

SEQ ID NO: 39010 - DNA, 5323 bp, Artificial Sequence
  derived and/or modified sequence
gcggcggcggccgcggtggcagcgaaggcggcggcggcggcggcagtggcagtggccgctgcagccccacactccgccgccaaactggaggagcgacggaagccagaccccaggaggatggaggatgaagctgtcctggacagaggggcttccttcctcaagcatgtgtgtgatgaagaagaagtagaaggccaccataccatttacatcggagtccatgtgccgaagagttacaggagaaggagacgtcacaagagaaagacagggcacaaagaaaagaaggaaaaggagagaatctctgagaactactctgacaaatcagatattgaaaatgctgatgaatccagcagcagcatcctaaaacctctcatctctcctgctgcagaacgcatccgattcatcttgggagaggaggatgacagcccagctccccctcagctcttcacggaactggatgagctgctggccgtggatgggcaggagatggagtggaaggaaacagccaggtggatcaagtttgaagaaaaagtggaacagggtggggaaagatggagcaagccccatgtggccacattgtcccttcatagtttatttgagctgaggacatgtatggagaaaggatccatcatgcttgatcgggaggcttcttctctcccacagttggtggagatgattgttgaccatcagattgagacaggcctattgaaacctgaacttaaggataaggtgacctatactttgctccggaagcaccggcatcaaaccaagaaatccaaccttcggtccctggctgacattgggaagacagtctccagtgcaagtaggatgtttaccaaccctgataatggtagcccagccatgacccataggaatctgacttcctccagtctgaatgacatttctgataaaccggagaaggaccagctgaagaataagttcatgaaaaaattgccacgtgatgcagaagcttccaacgtgcttgttggggaggttgactttttggatactcctttcattgcctttgttaggctacagcaggctgtcatgctgggtgccctgactgaagttcctgtgcccacaaggttcttgttcattctcttaggtcctaaggggaaagccaagtcctaccacgagattggcagagccattgccaccctgatgtctgatgaggtgttccatgacattgcttataaagcaaaagacaggcacgacctgattgctggtattgatgagttcctagatgaagtcatcgtccttccacctggggaatgggatccagcaattaggatagagcctcctaagagtcttccatcctctgacaaaagaaagaatatgtactcaggtggagagaatgttcagatgaatggggatacgccccatgatggaggtcacggaggaggaggacatggggattgtgaagaattgcagcgaactggacggttctgtggtggactaattaaagacataaagaggaaagcgccattttttgccagtgatttttatgatgctttaaatattcaagctctttcggcaattctcttcatttatctggcaactgtaactaatgctatcacttttggaggactgcttggggatgccactgacaacatgcagggcgtgttggagagtttcctgggcactgctgtctctggagccatcttttgcctttttgctggtcaaccactcactattctgagcagcaccggacctgtcctagtttttgagaggcttctatttaatttcagcaaggacaataattttgactatttggagtttcgcctttggattggcctgtggtccgccttcctatgtctcattttggtagccactgatgccagcttcttggttcaatacttcacacgtttcacggaggagggcttttcctctctgattagcttcatctttatctatgatgctttcaagaagatgatcaagcttgcagattactaccccatcaactccaacttcaaagtgggctacaacactctcttttcctgtacctgtgtgccacctgacccagctaatatctcaatatctaatgacaccacactggccccagagtatttgccaactatgtcttctactgacatgtaccataatactacctttgactgggcatttttgtcgaagaaggagtgttcaaaatacggaggaaacctcgtcgggaacaactgtaattttgttcctgatatcacactcatgtcttttatcctcttcttgggaacctacacctcttccatggctctgaaaaaattcaaaactagtccttattttccaaccacagcaagaaaactgatcagtgattttgccattatcttgtccattctcatcttttgtgtaatagatgccctagtaggcgtggacaccccaaaactaattgtgccaagtgagttcaagccaacaagtccaaaccgaggttggttcgttccaccgtttggagaaaacccctggtgggtgtgccttgctgctgctatcccggctttgttggtcactatactgattttcatggaccaacaaattacagctgtgattgtaaacaggaaagaacataaactcaagaaaggagcagggtatcacttggatctcttttgggtggccatcctcatggttatatgctccctcatggctcttccgtggtatgtagctgctacggtcatctccattgctcacatcgacagtttgaagatggagacagagacttctgcacctggagaacaaccaaagtttctaggagtgagggaacaaagagtcactggaacccttgtgtttattctgactggtctgtcagtctttatggctcccatcttgaagtttatacccatgcctgtactctatggtgtgttcctgtatatgggagtagcatcccttaatggtgtgcagttcatggatcgtctgaagctgcttctgatgcctctgaagcatcagcctgacttcatctacctgcgtcatgttcctctgcgcagagtccacctgttcactttcctgcaggtgttgtgtctggccctgctttggatcctcaagtcaacggtggctgctatcatttttccagtaatgatcttggcacttgtagctgtcagaaaaggcatggactacctcttctcccagcacgacctcagcttcctggatgatgtcattccagaaaaggacaagaaaaagaaggaggatgagaagaaaaagaaaaagaagaagggaagtctggacagtgacaatgatgattctgactgcccatactcagaaaaagttccaagtattaaaattccaatggacatcatggaacagcaacctttcctaagcgatagcaaaccttctgacagagaaagatcaccaacattccttgaacgccacacatcatgctgataaaattcctttccttcagtcactcggtatgccaagtcctcctagaactccagtaaaagttgtgcctcaaattagaatagaacttgaacctgaagacaatgattatttctggaggagcaagggaacagaaactacattgtaacctgtttgtctttcttaaaactgacatttgttgttaatgtcatttgtttttgtttggctgtttgtttattttttaacttttatttcgtctcagtttttggtcacaggccaaataatacagcgctctctctgcttctctcttgcatagacacaatcaagacaatagtgcaccgttccttaaaaacagcatctgaggaatcccccttttgttcttaaactttcagatgtgtcctttgataaccaaattctgtcactcaagacacagacacgcacagaccctgtcctttgcctctattaagcagaggatggaagtattaaggattttgtaacaccttttatgaaaatgttgaaggaacttaaaactttagctttggagctgtgcttactggcttgtctttgtctggtagaacaaaccttgacctccagacagagtcccttctcacttatagagctctccaggactggaaaaagtgctgctattttaacttgctcttgcttgtaaatcctaatcttagagttatcaaaagaagaaaaaactgaaggtactttactccctatagagaaaccattgccatcattgtagcaagtgctggaatgtcccttttttcctatgcaactttttttaaccctttaatgaacttatctgttgagtacattgaagaatatttttcttcctagattttgttgtttaaattatggggcctaacctgccacttattttttgtcaatttttaaaacttttttttaattactgtaaagaaaatgaattttttcctgcagcaggaaacatagttttgagtagttctacctcttatttgtagctgccaggctttctgtaaaaattgtattgtatataatgtgatttttacacatacatacacacacaaatacacaatctctagggtaagccagaaggcaagatcagattaaaaacaccatgtttctaagcatccatttttccctttctttaaaagaaacttaactgttctatgaaggagattgagggagaagagacaaactcctatgtcatgagaataaccgatgttctgataatagtagcatctaggtacagatgctggttgtattaccacgtcaatgtcctatgcagtattgttagacattttctcattttgaaatatttgtgtgtttgtgtatgtgctctgtgccatggctggtgtatatatgtgcaatgttagaaggcaaaagagtgatggtaggcagagggcaaagtcattgaatctcttatgccagttttcataaaacccaaaccacatatgaaaaaatccattaagggtccaagaagtctgtccatatgaaaatgagggtaaatatagtttatttcccaggtatcagtcattataattgatataatagctctaacatgcaatataaaattcataggagtattaatagcccatttacacatctataaaatgtaatgggattgcagagctgcagagtacagtgtaacagtactctcatgcaatttttttcaggatgcaaaggcaattattctttgtaagcgggacatttagaatatatttgtgtacatattatatgtatgtatatttcaaagtaccacactgaaaattagacatttattaaccaaatttaacgtggtatttaaaggtaatatttttaatatgatacattacatattgtgaatgtatactaaaaaaacattttaaatgttaaaattataatttcagattcatataaccacaactgtgatatatcctaactataaccagttgttgaggggtatactagaagcagaatgaaaccacattttttggtttgataatatgcacttattgactcccac

SEQ ID NO: 39011 - protein, 498 aa, Artificial Sequence
  derived and/or modified sequence
MATKTELSPTARESKNAQDMQVDETLIPRKVPSLCSARYGIALVLHFCNFTTIAQNVIMNITMVAMVNSTSPQSQLNDSSEVLPVDSFGGLSKAPKSLPAKAPVYDWSPQIQGIIFGAVGYGGILTMAPSGYLAGRVGTKRVVGISLFATSFLTLCIPLATDFGIVLLIVTRIVQGLSQSSILGGQFAIWEKWGPPQERSRLCSIALSGMLLGCFTAILIGGFISETLGWPFVFYIFGGVGCVCCLLWFVVIYDDPVSYPWISTSEKEYIISSLKQQVGSSKQPLPIKAMLRSLPIWSICLGCFSHQWLVSTMVVYIPTYISSVYHVNIRDNGLLSALPFIVAWVIGMVGGYLADFLLTKKFRLITVRKIATILGSLPSSALIVSLPYLNSGYITATALLTLSCGLSTLCQSGIYINVLDIAPRYSSFLMGASRGFSSIAPVIVPTVSGFLLSQDPEFGWRNVFFLLFAVNLLGLLFYLIFGEADVQEWAKERKLTRL

SEQ ID NO: 39012 - protein, 51 aa, Artificial Sequence
  derived and/or modified sequence
SGFLLSQDPEFGWRNVFFLLFAVNLLGLLFYLIFGEADVQEWAKERKLTRL

SEQ ID NO: 39013 - DNA, 1497 bp, Artificial Sequence
  derived and/or modified sequence
atggctactaagaccgaactgtcgccgaccgctagggagagcaaaaatgcccaggacatgcaggtggacgaaaccctcatccccagaaaagtacctagtctttgttctgcccggtacggcatcgccctcgttttgcacttttgtaacttcactaccatcgctcagaacgtaattatgaacatcacaatggtggcaatggtgaactctacgagtccacagtcacaactcaatgattcttctgaggtccttccagtggattctttcggaggtctgagcaaggcacccaaatccctgccagctaaagccccggtctatgattggtctccacagatccagggcattatattcggcgctgtaggttatggggggatcctcaccatggcaccaagcggttatcttgctggcagggtgggtactaagagggtcgtcggcattagtctgtttgccaccagcttccttaccctctgcattccgcttgccacggattttggcatcgtcttgctgatagtgacgcggattgtgcaaggcctctctcagtcctctatactaggcggtcaattcgccatatgggaaaaatggggccccccacaggagcggtcccgtctatgctccatcgctctgtctgggatgttactagggtgttttacggctattctgattggtggattcatctctgagactctgggctggcccttcgttttctatatcttcgggggtgtgggctgtgtgtgttgtctgctgtggttcgttgtaatctacgacgacccagtgagctatccctggatcagtacttcggagaaggagtatatcattagttctttgaagcagcaggtgggatctagcaagcagccactgcctatcaaagcaatgttgcgctctcttccaatctggtccatctgtttaggctgtttctcacaccagtggctcgtgagcacaatggtggtgtatatacctacttacatctcaagtgtgtatcacgtaaacattagggataatggcttgctaagcgctctcccatttatcgtggcgtgggtaatcggcatggttggcgggtacctggccgacttccttctgaccaagaagttccgccttattacagtccggaagatcgctactatcttgggctctcttccctcttccgccttgatcgtgtctttaccctatctaaacagtggatatatcacagcgaccgcgttactcacactgtcctgcggcctctctactctctgccagtctggtatctatattaacgtgctggacattgcgcccaggtactcttctttcttgatgggcgcttctcgcggcttctcgtctatcgcccctgtgatcgtgcctaccgtgtcaggtttcttactgtcccaggatcctgagttcgggtggagaaacgttttttttcttctcttcgccgtgaatctgcttggcctccttttttatctgatcttcggcgaggcggacgtgcaggaatgggcaaaagaacgaaagctaacccggctctag

SEQ ID NO: 39014 - DNA, 1497 bp, Artificial Sequence
  derived and/or modified sequence
atggccaccaagacagagctgagccccacagcccgggagagcaagaatgcccaggacatgcaggtggatgagaccctcatccccaggaaggtgcccagcctgtgcagcgcccgctatggaattgccctggtgctgcacttctgcaacttcaccaccatcgcccagaatgtcatcatgaacatcaccatggtggccatggtgaacagcaccagcccccagagccagctgaatgacagcagcgaggtgctgcctgtggacagctttggaggcctgagcaaggcccccaagagcctgcctgccaaggcccctgtgtatgactggagcccccagatccagggcatcatctttggagctgtgggctatggaggcatcctgaccatggcccccagcggctacctggccggccgggtgggcaccaagagggtggtgggcatcagcctgtttgccaccagcttcctgaccctgtgcatccccctggccacagactttggaattgtgctgctgattgtgaccagaattgtgcagggcctgagccagagcagcatcctgggcggccagtttgccatctgggagaagtggggccccccccaggagaggagccggctgtgcagcatcgccctgagcggcatgctgctgggctgcttcaccgccatcctgattggaggcttcatcagcgagaccctgggctggccctttgtgttctacatctttggaggagtgggctgtgtgtgctgcctgctgtggtttgtggtgatctatgatgatcctgtgtcctacccctggatcagcaccagcgagaaggagtacatcatcagcagcctgaagcagcaggtgggcagcagcaagcagcccctgcccatcaaggccatgctgcggagcctgcccatctggagcatctgcctgggctgcttcagccaccagtggctggtgtccaccatggtggtgtacatccccacctacatcagctctgtgtaccacgtgaacatccgggacaatggcctgctgagcgccctgcccttcatcgtggcctgggtgattggcatggtgggcggctacctggccgacttcctgctgaccaagaagttccgcctcatcaccgtgaggaagatcgccaccatcctgggcagcctgcccagcagcgccctgattgtgtccctgccctacctgaacagcggctacatcacagccacagccctgctgaccctgagctgtggcctgagcaccctgtgccagagcggcatctacatcaacgtgctggacatcgccccccgctacagcagcttcctgatgggcgccagccggggcttcagcagcatcgcccctgtgattgtgcccaccgtgtctggcttcctgctgagccaggaccctgagtttggctggagaaatgtgttcttcctgctgtttgctgtgaacctgctgggcctgctcttctacctgatctttggagaggctgatgtgcaggagtgggccaaggagaggaagctgacccggctgtag

SEQ ID NO: 39015 - DNA, 1497 bp, Artificial Sequence
  derived and/or modified sequence
atggccaccaagaccgagctgagccccaccgcccgggagagcaagaacgcccaagacatgcaggttgatgagactcttatacctagaaaggtaccaagtctgtgcagtgccaggtatggaattgccctggtgctacatttttgtaattttactactattgctcagaacgttatcatgaacataacaatggttgcgatggtgaactcaacatcaccacagagtcagttaaacgactcctccgaagtactgccagtagatagctttggtgggctttccaaggcacctaaatcgctgcccgccaaggccccagtgtacgattggtcgccccaaatccagggaatcatcttcggagccgtgggatacggggggatactaaccatggccccatctggctacctggccggcagagtcggtaccaagcgcgtagtgggtatcagcttgtttgccacttcatttcttacattatgcattcctctagcgacagattttggaattgtcctgctcatcgtgacccgaatagtccagggactgtcacagagctctatcctgggggggcagtttgcaatctgggagaagtggggaccacctcaggagagatcacggctgtgcagcatcgcactgtcaggaatgctcttgggttgcttcacagccatccttattggtgggtttataagcgagactttaggctggcccttcgttttttatatctttggaggggtcgggtgtgtctgctgccttctctggttcgtggttatctacgatgaccctgtgtcttacccctggatatctacatccgagaaggagtacatcatcagtagcctgaaacagcaagtcggaagtagcaaacagcctctccccattaaggctatgttacggagccttcctatttggagcatttgccttggctgtttttcacatcagtggctcgtcagcaccatggtggtctatattcccacatatattagttcagtttaccacgtcaacattagagataatggattgctttcagctctgccttttatcgtcgcctgggttattggcatggtgggcgggtatcttgccgactttttgcttacaaaaaagttcaggctaataacagtgcgaaaaattgcgaccatcctgggctcccttcctagctcagcccttatcgtgtctctcccttatctgaacagtggctatatcactgcaactgcactcctcactctgtcctgtggactttctaccctttgccaatcaggaatatatatcaacgtccttgatatagcaccaaggtacagttcttttcttatgggggcctcacgggggttttcctccatcgcccctgttattgttcccaccgtgtcagggttcctattgtcacaggacccagagttcggatggaggaacgtcttcttcctgttgttcgccgtgaacttgctgggactgctgttctatttaatttttggtgaggcggatgtgcaggagtgggcgaaagaacgtaaacttacacgcctgtag

SEQ ID NO: 39016 - DNA, 1497 bp, Artificial Sequence
  derived and/or modified sequence
atggccactaagacagagttatcacctacagccagagaatctaagaatgcccaggatatgcaggtagacgagaccttgatacccagaaaggtgccctcactgtgcagcgcccgatacgggatcgcactggtcttgcacttctgtaatttcacaactatcgcccagaacgtcattatgaacattactatggtggcgatggttaatagtacctcacctcagtctcagttaaacgacagctctgaggtactgcctgttgactcctttgggggactgagtaaagcacccaaatccctgcctgccaaggctcctgtgtatgattggtcaccacagattcagggtattatattcggcgctgtcggatacggaggcattctgactatggcccctagcgggtacctcgctggaagggtgggtacgaagagggtggtgggcatatcactgtttgctacatcgtttctgacattgtgcattcccctggctaccgattttggaatcgtcctgctgattgtgacacgcattgttcaaggactttctcagagtagcattctcggcggtcagttcgccatttgggaaaaatggggtccacctcaggaacgatcgaggttatgttccatagccttaagcggaatgctcttgggatgcttcactgcaattttgattggtgggttcatttctgaaacgctgggctggcccttcgtcttctatattttcggaggagttggatgtgtatgctgcctgctttggtttgtggttatctacgacgacccagtgtcatatccgtggatctccacaagcgagaaagagtatattattagctctcttaaacagcaggtagggtcctccaagcaacccctgcctattaaagctatgctgcggtcgctccccatatggtccatctgcctgggatgttttagccaccagtggctggtgagtaccatggttgtgtacatacctacatacatctctagcgtgtaccacgttaatattcgagataacggtcttctcagcgcactgccctttatcgtggcctgggtcattggaatggtgggagggtacttagccgacttcttacttaccaaaaaatttagactgatcacagtaagaaaaattgcgaccatactcggctctcttccatcatccgcccttatcgtaagcttaccatacctcaattcgggctatattaccgcaactgccctactgacccttagctgcgggttatcaaccctgtgccaatccggcatatatataaatgtgttggacatcgccccacggtactcctcctttctgatgggcgcttctaggggtttttcttctatagctcccgtaattgttccaactgtctctggcttcctgctgagccaggacccagaatttgggtggaggaatgtgtttttcctgctattcgcggtcaaccttctgggactgctcttttacctcatctttggtgaagcagatgtgcaagaatgggcgaaagagcgtaaactgaccagactttag

SEQ ID NO: 39017 - DNA, 2052 bp, Artificial Sequence
  derived and/or modified sequence
gctccaaaaagtccaagggagtaagcttggaggaaacgctgggttcaacttgaagcccttccacagacattaagtcggtgaaaaccattcactaggagaggagaaacacaatggccaccaagacagagttgagtcccacagcaagggagagcaagaacgcacaagatatgcaagtggatgagacactgatccccaggaaagttccaagtttatgttctgctcgctatggaatagccctcgtcttacatttctgcaatttcacaacgatagcacaaaatgtcatcatgaacatcaccatggtagccatggtcaacagcacaagccctcaatcccagctcaatgattcctctgaggtgctgcctgttgactcatttggtggcctaagtaaagccccaaagagtcttcctgcaaaggctcctgtgtatgactggtctcctcaaatccaaggcatcatctttggtgctgttggctatggtggcatactgacaatggctcccagtggatacctggctggaagagtaggaacaaagcgagtggttggcatttctttgtttgcaacttcatttctcactctatgcatccctctggccactgactttggaatagtcttgctcattgtaactcgaatagtccagggcctaagccagtcctcaatacttgggggtcagtttgcaatttgggaaaagtggggccctccacaagaacgaagcagactctgcagcattgctttatcaggaatgttactgggatgctttactgccatcctcataggtggcttcattagtgaaacccttgggtggccctttgtcttctatatctttggaggtgttggctgtgtctgctgccttctctggtttgttgtgatttatgatgaccccgtttcctatccatggataagcacctcagaaaaagaatacatcatatcctccttgaaacaacaggtcgggtcttctaagcagcctcttcccatcaaagctatgctcagatctctacccatttggtccatatgtttaggctgtttcagccatcaatggttagttagcacaatggttgtatacataccaacttacatcagctctgtgtaccatgttaacatcagagacaatggacttctatctgcccttccttttattgttgcctgggtcataggcatggtgggaggctatctggcagatttccttctaaccaaaaagtttagactcatcactgtgaggaaaattgccacaattttaggaagtctcccctcttcagcactcattgtgtctctgccttacctcaattccggctatatcacagcaactgccttgctgacgctctcttgcggattaagcacattgtgtcagtcagggatttatatcaatgtcttagatattgctccaaggtattccagttttctcatgggagcatcaagaggattttcgagcatagcacctgtcattgtacccactgtcagtggatttcttcttagtcaggaccctgagtttgggtggaggaatgtcttcttcttgctgtttgccgttaacctgttaggactactcttctacctcatatttggagaagcagatgtccaagaatgggctaaagagagaaaactcactcgtttatgaagttatcccaccttggatggaaaagtcattaggcaccgtattgcataaaatagaaggcttccgtgatgaaaataccagtgaaaagattttttttttcctgtggctcttttcaattatgagatcagttcattattttattcagacttttttttgagagaaatgtaagatgaataaaaattcaaataaaatgataactaagaatgcagttgtcatcttcatagaattaacaatggattaagagggcttgctgtgtgggacccagtatgttagattccattactggatacaagaaacaatgttttaaaacctttaatccggggtgacaaactcactagggcaatgatttttcctgtttgtgaaaattaatattactttctatttattgggttgagtattgtccatgtgttcttccctatatgtcctccatttatctccatcctgctca

SEQ ID NO: 39018 - DNA, 1497 bp, Artificial Sequence
  derived and/or modified sequence
atggccaccaagaccgagctgagccccaccgccagagagagcaagaacgcccaggacatgcaggtggacgagaccctgatccccagaaaggtgcccagcctgtgcagcgccagatacggcatcgccctggtgctgcacttctgcaacttcaccaccatcgcccagaacgtgatcatgaacatcaccatggtggccatggtgaacagcaccagcccccagagccagctgaacgacagcagcgaggtgctgcccgtggacagcttcggcggcctgagcaaggcccccaagagcctgcccgccaaggcccccgtgtacgactggagcccccagatccagggcatcatcttcggcgccgtgggctacggcggcatcctgaccatggcccccagcggctacctggccggcagagtgggcaccaagagagtggtgggcatcagcctgttcgccaccagcttcctgaccctgtgcatccccctggccaccgacttcggcatcgtgctgctgatcgtgaccagaatcgtgcagggcctgagccagagcagcatcctgggcggccagttcgccatctgggagaagtggggccccccccaggagagaagcagactgtgcagcatcgccctgagcggcatgctgctgggctgcttcaccgccatcctgatcggcggcttcatcagcgagaccctgggctggcccttcgtgttctacatcttcggcggcgtgggctgcgtgtgctgcctgctgtggttcgtggtgatctacgacgaccccgtgagctacccctggatcagcaccagcgagaaggagtacatcatcagcagcctgaagcagcaggtgggcagcagcaagcagcccctgcccatcaaggccatgctgagaagcctgcccatctggagcatctgcctgggctgcttcagccaccagtggctggtgagcaccatggtggtgtacatccccacctacatcagcagcgtgtaccacgtgaacatcagagacaacggcctgctgagcgccctgcccttcatcgtggcctgggtgatcggcatggtgggcggctacctggccgacttcctgctgaccaagaagttcagactgatcaccgtgagaaagatcgccaccatcctgggcagcctgcccagcagcgccctgatcgtgagcctgccctacctgaacagcggctacatcaccgccaccgccctgctgaccctgagctgcggcctgagcaccctgtgccagagcggcatctacatcaacgtgctggacatcgcccccagatacagcagcttcctgatgggcgccagcagaggcttcagcagcatcgcccccgtgatcgtgcccaccgtgagcggcttcctgctgagccaggaccccgagttcggctggagaaacgtgttcttcctgctgttcgccgtgaacctgctgggcctgctgttctacctgatcttcggcgaggccgacgtgcaggagtgggccaaggagagaaagctgaccagactgtag

SEQ ID NO: 39019 - protein, 511 aa, Artificial Sequence
  derived and/or modified sequence
MAAAALRDPAQVPVAADLLTDHEEQGYVTFEDVAVYFSQEEWRLLDDAQRLLYRNVMLENFTLLASLGLASSKTHEITQLESWEEPFMPAWEVVTSAIPRGCWHGAEAEEAPEQIASVGLLSSNIQQHQKQHCGEKPLKRQEGRVPVLRSCKVHLSEKSLQSREVGKALLISSGVLKHQVTHTGEKSHRSSKSREAFHAGKRHYKCSECGKAFGQKYLLVQHQRLHAGKKTYECSECGKLFRDMSNLFIHQIVHTGERPYGCSNCGKSFSRNAHLIEHQRVHTGEKPFTCSECGKAFRHNSTLVQHHKIHTGVRPYECSECGKLFSFNSSLMKHQRIHTGERPYKCSECGKFYSHKSNLIKHWRVHTGERPYKCSDCGKFFTQCSSLMQHQKVHTGEKPFKCNECGRFFRENSTLVRHQRVHTGAKPYECRECGKFFSQSSTLMQHRKVHIGEKPFKCNECGRLFRENSSLVKHQRVHTGAKPYECRECGKFFRHNSSLFKHRRIHTGEMQ

SEQ ID NO: 39020 - protein, 444 aa, Artificial Sequence
  derived and/or modified sequence
MAAAALRDPAQVPVAADLLTDHEEQGYVTFEDVAVYFSQEEWRLLDDAQRLLYRNVMLENFTLLASLGLASSKTHEITQLESWEEPFMPAWEVVTSAIPRGCWHGAEAEEAPEQIASVGLLSSNIQQHQKQHCGEKPLKRQEGRVPVLRSCKVHLSEKSLQSREVGKALLISSGVLKHQVTHTGEKSHRSSKSREAFHAGKRHYKCSECGKAFGQKYLLVQHQRLHAGKKTYECSECGKLFRDMSNLFIHQIVHTGERPYGCSNCGKSFSRNAHLIEHQRVHTGEKPFTCSECGKAFRHNSTLVQHHKIHTGVRPYECSECGKLFSFNSSLMKHQRIHTGERPYKCSECGKFYSHKSNLIKHWRVHTGERPYKCSDCGKFFTQCSSLMQHQKVHTGEKPFKCNECGRFFRENSTLVRHQRVHTGAKPYECRECGKFFSQSSTLM

SEQ ID NO: 39021 - DNA, 1536 bp, Artificial Sequence
  derived and/or modified sequence
atggccgccgccgccctgagagaccccgcccaggtgcccgtggccgccgacctgctgaccgaccacgaggagcagggctacgtgaccttcgaggacgtggccgtgtacttcagccaggaggagtggagactgctggacgacgcccagagactgctgtacagaaacgtgatgctggagaacttcaccctgctggccagcctgggcctggccagcagcaagacccacgagatcacccagctggagagctgggaggagcccttcatgcccgcctgggaggtggtgaccagcgccatccccagaggctgctggcacggcgccgaggccgaggaggcccccgagcagatcgccagcgtgggcctgctgagcagcaacatccagcagcaccagaagcagcactgcggcgagaagcccctgaagagacaggagggcagagtgcccgtgctgagaagctgcaaggtgcacctgagcgagaagagcctgcagagcagagaggtgggcaaggccctgctgatcagcagcggcgtgctgaagcaccaggtgacccacaccggcgagaagagccacagaagcagcaagagcagagaggccttccacgccggcaagagacactacaagtgcagcgagtgcggcaaggccttcggccagaagtacctgctggtgcagcaccagagactgcacgccggcaagaagacctacgagtgcagcgagtgcggcaagctgttcagagacatgagcaacctgttcatccaccagatcgtgcacaccggcgagagaccctacggctgcagcaactgcggcaagagcttcagcagaaacgcccacctgatcgagcaccagagagtgcacaccggcgagaagcccttcacctgcagcgagtgcggcaaggccttcagacacaacagcaccctggtgcagcaccacaagatccacaccggcgtgagaccctacgagtgcagcgagtgcggcaagctgttcagcttcaacagcagcctgatgaagcaccagagaatccacaccggcgagagaccctacaagtgcagcgagtgcggcaagttctacagccacaagagcaacctgatcaagcactggagagtgcacaccggcgagagaccctacaagtgcagcgactgcggcaagttcttcacccagtgcagcagcctgatgcagcaccagaaggtgcacaccggcgagaagcccttcaagtgcaacgagtgcggcagattcttcagagagaacagcaccctggtgagacaccagagagtgcacaccggcgccaagccctacgagtgcagagagtgcggcaagttcttcagccagagcagcaccctgatgcagcacagaaaggtgcacatcggcgagaagcccttcaagtgcaacgagtgcggcagactgttcagagagaacagcagcctggtgaagcaccagagagtgcacaccggcgccaagccctacgagtgcagagagtgcggcaagttcttcagacacaacagcagcctgttcaagcacagaagaatccacaccggcgagatgcagtag

SEQ ID NO: 39022 - DNA, 1335 bp, Artificial Sequence
  derived and/or modified sequence
atggccgccgccgccctgagagaccccgcccaggtgcccgtggccgccgacctgctgaccgaccacgaggagcagggctacgtgaccttcgaggacgtggccgtgtacttcagccaggaggagtggagactgctggacgacgcccagagactgctgtacagaaacgtgatgctggagaacttcaccctgctggccagcctgggcctggccagcagcaagacccacgagatcacccagctggagagctgggaggagcccttcatgcccgcctgggaggtggtgaccagcgccatccccagaggctgctggcacggcgccgaggccgaggaggcccccgagcagatcgccagcgtgggcctgctgagcagcaacatccagcagcaccagaagcagcactgcggcgagaagcccctgaagagacaggagggcagagtgcccgtgctgagaagctgcaaggtgcacctgagcgagaagagcctgcagagcagagaggtgggcaaggccctgctgatcagcagcggcgtgctgaagcaccaggtgacccacaccggcgagaagagccacagaagcagcaagagcagagaggccttccacgccggcaagagacactacaagtgcagcgagtgcggcaaggccttcggccagaagtacctgctggtgcagcaccagagactgcacgccggcaagaagacctacgagtgcagcgagtgcggcaagctgttcagagacatgagcaacctgttcatccaccagatcgtgcacaccggcgagagaccctacggctgcagcaactgcggcaagagcttcagcagaaacgcccacctgatcgagcaccagagagtgcacaccggcgagaagcccttcacctgcagcgagtgcggcaaggccttcagacacaacagcaccctggtgcagcaccacaagatccacaccggcgtgagaccctacgagtgcagcgagtgcggcaagctgttcagcttcaacagcagcctgatgaagcaccagagaatccacaccggcgagagaccctacaagtgcagcgagtgcggcaagttctacagccacaagagcaacctgatcaagcactggagagtgcacaccggcgagagaccctacaagtgcagcgactgcggcaagttcttcacccagtgcagcagcctgatgcagcaccagaaggtgcacaccggcgagaagcccttcaagtgcaacgagtgcggcagattcttcagagagaacagcaccctggtgagacaccagagagtgcacaccggcgccaagccctacgagtgcagagagtgcggcaagttcttcagccagagcagcaccctgatgtag

SEQ ID NO: 39023 - DNA, 1536 bp, Artificial Sequence
  derived and/or modified sequence
atggccgctgccgcccttagagaccccgctcaggtgcccgtggcggccgatttacttacagaccacgaggagcagggctacgtgaccttcgaagatgttgctgtatacttcagtcaagaagaatggcgattactcgatgacgctcagagactactctacaggaacgtaatgttagaaaacttcaccctattggcgtcattaggactagcgtcatctaagactcatgagatcactcagttggaaagttgggaagagccgtttatgcccgcttgggaggttgtgacaagcgcaatcccccgcggttgttggcacggcgcagaagccgaggaggctcctgagcagatcgccagcgtaggccttctgagttcaaacattcagcagcatcagaaacagcattgtggcgaaaaaccactgaagcgacaagagggtagggtccccgtgctgcgctcgtgcaaagtgcatctgagcgagaaaagtttgcagtcccgcgaagtgggaaaggccttgttgatatcctcgggcgtcctgaaacatcaagtgacacatactggagagaagagccataggagttctaaatcccgggaggcttttcacgccggaaagaggcattacaagtgctctgaatgtggcaaggcctttggacagaagtatctgctggtccagcaccagaggctgcatgccggcaagaaaacttatgagtgtagcgagtgtgggaagttgtttcgtgacatgtctaacttattcatccaccagatcgtacatacaggcgaaaggccatacggctgttccaattgtgggaaatcatttagtagaaacgctcatctcattgagcatcagagggtccatactggtgagaaacccttcacatgttccgagtgtggaaaggcttttcgccacaactcaacactggtacagcaccacaagatccacacaggggtgcgcccttatgaatgttccgagtgtggaaaactgttttcctttaattcttctctgatgaaacaccagaggatccatacaggcgaaaggccctacaaatgctcagaatgtgggaagttttattcccataaaagtaaccttatcaaacactggcgtgtgcacactggtgaacgcccctacaagtgttctgactgcggcaagtttttcacccaatgcagctcactgatgcagcaccagaaagtgcacaccggagagaaacccttcaagtgtaatgagtgcggccgtttctttagagaaaactctactttagtccgacatcagcgggtgcatacaggtgccaagccatatgagtgtagagaatgtgggaaattcttttctcagtctagcaccctgatgcagcacaggaaggttcacatcggggaaaagccatttaaatgtaatgaatgcggtcgactcttccgagaaaactccagtttggtgaaacatcagcgcgtacacaccggcgcaaagccttacgaatgcagggagtgcgggaagtttttcagacacaacagttccctgttcaaacacaggaggattcataccggagaaatgcagtag

SEQ ID NO: 39024 - DNA, 1335 bp, Artificial Sequence
  derived and/or modified sequence
atggccgcagccgccctgcgagacccggcacaagtgcctgtggccgccgacctgctgacagatcatgaggagcagggctacgtgacattcgaggatgtggcagtgtatttctcccaggaggaatggagactcctggacgacgcccagagactgctgtacagaaacgtgatgctggaaaattttacactactggccagcctcggactggcttcaagcaaaactcacgagatcacccagctggagagctgggaggagcctttcatgcccgcatgggaggtggtcacatccgcaatacctcgcggatgttggcatggcgccgaagccgaggaagcaccagaacaaatcgccagtgttggtctgttgagcagcaacatccagcagcaccagaaacaacactgcggcgaaaagccactgaagaggcaagagggccgcgtccctgttctgcgatcttgcaaggtacatctttctgagaaaagtctgcagagtcgagaagtgggaaaggctctgctgataagctcaggggttctcaagcatcaggtcacgcacactggagagaagagccatagaagctctaaatcacgcgaggcattccacgctggaaagagacactataaatgctctgagtgtggcaaggcatttgggcagaaatacctgttggtgcaacatcagagactgcatgctggaaagaaaacatatgaatgttccgagtgtggaaaactatttcgagacatgagcaacctttttattcatcagattgtacacaccggagagcgaccctacggctgctcaaactgcggtaaaagcttctctcggaacgctcatctgatcgaacatcagcgcgtgcataccggcgagaagcccttcacttgttccgagtgtggaaaggccttcagacacaattcgaccctggttcaacatcacaaaattcacaccggggtgaggccatatgaatgcagtgaatgcggtaagctgttctccttcaatagttcgttgatgaagcaccagagaatccatactggcgagaggccgtacaagtgttctgagtgcggaaaattttatagtcacaaatcgaatcttattaaacattggcgtgtgcatactggggagagaccatataaatgttcggactgtggaaagttctttactcagtgctcctcattaatgcagcaccagaaggtccacactggggagaaacccttcaagtgtaacgaatgcggtcgattcttcagggaaaactctactctggtgaggcatcagagggtgcatactggtgccaagccgtacgaatgtcgcgaatgcgggaagttttttagtcaatcctccaccttaatgtag

SEQ ID NO: 39025 - DNA, 1536 bp, Artificial Sequence
  derived and/or modified sequence
atggctgctgctgccctgcgggaccctgcccaggtgcctgtggccgctgacctgctgacagaccacgaggagcagggctacgtgacctttgaagatgtggccgtgtacttcagccaggaggagtggaggctgctggatgatgcccagaggctgctgtacagaaatgtgatgctggagaacttcaccctgctggccagcctgggcctggccagcagcaagacccatgagatcacccagctggagagctgggaggagcccttcatgcctgcctgggaggtggtgaccagcgccatcccccggggctgctggcacggggctgaggccgaggaggcccctgagcagatcgcctctgtgggcctgctgagcagcaacatccagcagcaccagaagcagcactgtggggagaagcccctgaagaggcaggagggccgggtgcctgtgctgcggagctgcaaggtgcacctgtctgagaagagcctgcagagccgggaggtgggcaaggccctgctgatcagcagtggagtgctgaagcaccaggtgacccacactggagagaagagccacaggagcagcaagagccgggaggccttccacgccggcaagaggcactacaagtgcagtgaatgtgggaaggccttcggccagaagtacctgctggtgcagcaccagaggctgcatgctgggaagaagacctatgaatgttctgaatgtgggaagctgttccgggacatgagcaacctcttcatccaccagatcgtgcacactggagagcggccctacggctgcagcaactgtgggaagagcttcagcagaaatgcccacctgattgagcaccagagggtgcacactggagagaagcccttcacctgcagtgaatgtgggaaggccttccgccacaacagcaccctggtgcagcaccacaagatccacactggagtgcggccctatgaatgttctgaatgtgggaagctgttctccttcaacagcagcctgatgaagcaccagaggatccacactggagagcggccctacaagtgcagtgaatgtgggaagttctacagccacaagagcaacctgatcaagcactggagggtgcacactggagagcggccctacaagtgcagcgactgtgggaagttcttcacccagtgcagcagcctgatgcagcaccagaaggtgcacactggagagaagcccttcaagtgcaatgaatgtggccgcttcttccgggagaacagcaccctggtgcgccaccagagggtgcacactggagccaagccctatgaatgtcgggagtgtgggaagttcttcagccagagcagcaccctgatgcagcacaggaaggtgcacatcggggagaagcccttcaagtgcaatgaatgtggccgcctcttccgggagaacagcagcctggtgaagcaccagagggtgcacactggagccaagccctatgaatgtcgggagtgtgggaagttcttccgccacaacagcagcctcttcaagcaccggcgcatccacactggagagatgcagtag

SEQ ID NO: 39026 - DNA, 1335 bp, Artificial Sequence
  derived and/or modified sequence
atggctgctgctgccctgcgggaccctgcccaggtgcctgtggccgctgacctgctgacagaccacgaggagcagggctacgtgacctttgaagatgtggccgtgtacttcagccaggaggagtggaggctgctggatgatgcccagaggctgctgtacagaaatgtgatgctggagaacttcaccctgctggccagcctgggcctggccagcagcaagacccatgagatcacccagctggagagctgggaggagcccttcatgcctgcctgggaggtggtgaccagcgccatcccccggggctgctggcacggggctgaggccgaggaggcccctgagcagatcgcctctgtgggcctgctgagcagcaacatccagcagcaccagaagcagcactgtggggagaagcccctgaagaggcaggagggccgggtgcctgtgctgcggagctgcaaggtgcacctgtctgagaagagcctgcagagccgggaggtgggcaaggccctgctgatcagcagtggagtgctgaagcaccaggtgacccacactggagagaagagccacaggagcagcaagagccgggaggccttccacgccggcaagaggcactacaagtgcagtgaatgtgggaaggccttcggccagaagtacctgctggtgcagcaccagaggctgcatgctgggaagaagacctatgaatgttctgaatgtgggaagctgttccgggacatgagcaacctcttcatccaccagatcgtgcacactggagagcggccctacggctgcagcaactgtgggaagagcttcagcagaaatgcccacctgattgagcaccagagggtgcacactggagagaagcccttcacctgcagtgaatgtgggaaggccttccgccacaacagcaccctggtgcagcaccacaagatccacactggagtgcggccctatgaatgttctgaatgtgggaagctgttctccttcaacagcagcctgatgaagcaccagaggatccacactggagagcggccctacaagtgcagtgaatgtgggaagttctacagccacaagagcaacctgatcaagcactggagggtgcacactggagagcggccctacaagtgcagcgactgtgggaagttcttcacccagtgcagcagcctgatgcagcaccagaaggtgcacactggagagaagcccttcaagtgcaatgaatgtggccgcttcttccgggagaacagcaccctggtgcgccaccagagggtgcacactggagccaagccctatgaatgtcgggagtgtgggaagttcttcagccagagcagcaccctgatgtag

SEQ ID NO: 39027 - DNA, 1536 bp, Artificial Sequence
  derived and/or modified sequence
atggccgccgccgccctgcgggaccccgcccaggtgcccgtggccgccgacctgctgacggaccacgaagagcagggttacgtaacatttgaggacgtggctgtatacttttcgcaggaggaatggcggttgcttgatgacgctcagcgactcctgtacagaaatgtcatgctggaaaacttcacattgctggcgtcgctgggcctcgccagctctaagactcatgagatcacccaacttgagtcctgggaggagccttttatgcccgcatgggaagtggtgactagtgcaatcccccgcggctgttggcacggcgctgaggcagaggaagccccagagcagatagcctctgtcggcttactatcgtctaacatccagcaacatcagaagcaacactgtggcgagaagccgctcaagaggcaggaggggagggtgccagtgttgaggtcttgtaaggtccatttgagcgagaagagcctgcaatcaagggaggttggtaaagccctcctgatctcctctggcgtcctcaaacaccaggtgacgcacacgggcgagaaatctcacagatcgtctaaatcccgcgaggcctttcacgccggaaaaaggcactacaagtgctcagaatgcgggaaggcttttggtcagaaatacctgctggttcaacatcaacgattacatgcagggaaaaagacctacgaatgttcagagtgtggaaagctcttcagagacatgtcaaacctcttcatccatcaaatagttcacactggcgaaaggccttatggctgtagtaattgcggcaagagtttttccagaaatgcccatctcatcgaacatcaaagagtgcacaccggggaaaaacctttcacatgttcagaatgcggtaaagcctttcgtcataattcgaccttggtccagcaccataagatacatacaggcgtgcgcccatatgagtgttcagaatgcggcaagcttttttcctttaactctagcctgatgaaacaccagaggatccacactggggagcgcccgtacaaatgcagtgaatgcggaaagttttactcgcacaaatctaacctcattaaacattggcgagtccataccggagagaggccatataaatgtagtgattgtggcaagtttttcacgcagtgctcgtctctcatgcagcaccagaaggtgcacaccggggaaaagcctttcaaatgcaatgaatgcggccggttcttcagagagaattctactctggtgaggcaccaacgtgtgcacactggggccaagccctacgagtgccgggaatgtggtaagtttttcagccagtccagcactctgatgcagcatcggaaggttcacataggagaaaaacctttcaagtgcaatgagtgcggcagactgttcagggaaaactcctccctcgtgaagcaccaacgtgtccataccggtgccaaaccatatgaatgccgcgaatgcggcaaattctttcgtcacaattcctccctgtttaagcaccgtcgaatacacacaggtgagatgcagtag

SEQ ID NO: 39028 - DNA, 1335 bp, Artificial Sequence
  derived and/or modified sequence
atggccgccgccgccctgcgggaccccgcccaggtgcccgtggccgcagacttactcacagatcacgaggagcagggctacgtcacattcgaggacgtcgcagtttatttttctcaggaggagtggcgcctcctcgatgacgcccagaggctgctctatcgcaatgtgatgctggaaaactttaccctgctcgcctctttgggcctcgcttcctccaagacccacgaaataacccagctcgagagctgggaagaacccttcatgccagcttgggaagtcgtgacctcagctattcctcggggatgttggcacggggctgaggcagaagaggcaccggaacagattgctagcgttggcctgctgtcctcaaatatccagcagcaccagaaacagcactgcggcgaaaaaccacttaaacgtcaagaggggagagtgcccgtccttcgatcttgcaaggtgcatctctcggaaaaaagtttacagtctcgggaggtcggtaaagcactgctgataagctctggagtactgaaacatcaggttacacacactggcgagaaatctcatcggtcatcgaagtctcgcgaagccttccacgccggtaaacgtcattataaatgcagcgagtgcggcaaggccttcgggcagaaatatttgttagtccagcatcaaagacttcatgcaggtaaaaagacttacgagtgcagtgagtgtggtaaactgttccgcgacatgtcaaatctgttcattcatcagattgtgcatacaggcgagaggccgtacggatgttccaattgtggtaagtccttctcgcgtaacgcgcacctcatcgaacaccagcgggtccacaccggtgaaaagccattcacctgttcagaatgcggtaaggcattccggcacaatagcaccctggtacagcaccataagatacatacgggtgtgcgtccgtacgagtgtagcgaatgcggtaagctgttctcattcaattcaagcctgatgaagcatcagagaatccacacaggagaacgcccctataaatgttccgagtgcgggaagttctactcccacaaaagtaaccttatcaaacactggagagttcatacaggagaaagaccttacaagtgctcagactgcggtaagttctttacccagtgctcttccctgatgcagcaccaaaaagttcatacgggcgagaaaccattcaagtgtaacgaatgcggtcggttctttagggagaactcaacccttgtgcgccatcagcgagtgcacaccggagccaaaccctatgagtgtagagagtgtgggaagttctttagccagtcaagcactctgatgtag

SEQ ID NO: 39029 - DNA, 1536 bp, Artificial Sequence
  derived and/or modified sequence
atggcagctgcggctctccgggatccagcccaggtcccagtggccgctgatctactcactgaccatgaagaacagggatatgtgacatttgaggatgttgccgtgtacttcagtcaggaggaatggaggcttcttgatgatgcccaacgtctcctgtacaggaacgttatgctggagaacttcaccctgttggcgagccttgggctcgccagcagcaagactcatgaaataactcagctcgaatcttgggaggaaccctttatgcccgcatgggaagtggtgacaagcgccatcccacgagggtgttggcatggtgcggaagctgaagaagcccctgagcagatcgcaagcgtcggccttttgagctccaatatccagcagcaccaaaagcagcactgcggtgaaaagcccctaaagcggcaagagggacgagtgcctgtgttgcgcagctgtaaagtccacttgtccgagaagtctctgcagagcagagaagttgggaaagcactgttaattagttcaggggtcctcaagcatcaggtcacgcacacaggtgagaaatcacatagaagctcaaagagcagggaggcctttcacgcaggcaagagacactataagtgtagcgagtgcggaaaggccttcggccagaagtatctgctcgttcagcatcagcggctgcacgctggcaagaagacctacgagtgctcagaatgcggcaagctgttcagagatatgtccaatctgtttatacatcagattgtgcatactggagagcggccatacgggtgctcaaactgcgggaagagcttttcacgcaatgcgcatctgattgaacaccagcgggtccacacaggagaaaaaccattcacgtgctcagaatgcggaaaggcttttaggcataatagcacacttgtgcagcatcacaagatccatacaggcgtgcggccatatgagtgctccgagtgcgggaagcttttttcatttaactcttctcttatgaagcaccagcgaatacataccggtgagagaccgtataagtgtagtgagtgtggaaagttctactcccacaaatctaatctgatcaaacattggagagtgcatactggcgaacggccatacaagtgtagtgattgcgggaagtttttcacacagtgctcctcgctcatgcagcatcagaaggtgcacaccggagagaaaccctttaaatgcaatgagtgcggccgattctttcgtgagaacagtaccctggtcaggcaccaaagggtgcataccggcgctaaaccatacgagtgtagggagtgcggaaagttcttctctcagtcatccacactaatgcagcatagaaaagtacacatcggggagaaaccgttcaagtgtaatgaatgcggaagactgtttcgagagaattcaagtctagtcaaacatcagcgtgtccacacaggtgctaaaccttacgaatgccgagaatgtgggaagttctttagacacaactcctcactgttcaagcatcggaggatccacaccggggaaatgcagtag

SEQ ID NO: 39030 - DNA, 1335 bp, Artificial Sequence
  derived and/or modified sequence
atggctgcagccgcactaagggatccggctcaagtgcctgttgcagcggacctgctaactgatcacgaggagcagggatacgttacatttgaggacgtagctgtgtatttctctcaggaagaatggagactcctcgatgatgctcaacggctgctctacagaaatgtgatgctcgagaattttacactgttggcgtcgctggggctagccagttctaagactcatgagatcacacaactcgagtcttgggaggagcccttcatgcccgcttgggaggtagtgacgagtgccattcccaggggttgttggcatggcgcagaagccgaagaggcaccagaacagatcgcctctgttggccttttgtcctccaacattcaacaacaccagaagcagcactgtggggagaaacccctgaagcgccaggagggaagagtgcccgtgctccgatcgtgcaaagtccacttgtcagagaagagtctccagagtcgagaggtgggcaaggccttactgatcagttcgggagtccttaagcaccaggtgacccatacaggcgagaagagtcacaggagcagtaaaagcagagaggcttttcatgccggaaagaggcactacaagtgttctgagtgtgggaaagctttcgggcagaagtatctgctggtccagcaccagcgattacacgcagggaaaaaaacatacgaatgtagtgaatgcggaaagctgtttagagacatgtccaatctgttcatccatcagattgtccataccggtgagaggccatatggctgctcaaactgcggtaagtcattttcacgcaatgcacatctgatcgaacatcagcgagttcatactggcgagaaacctttcacatgttctgagtgtggaaaagccttcagacataactctaccctggtccagcaccacaaaatccacacgggcgtccggccttatgaatgttcggagtgtgggaagctattctcctttaattcttctctgatgaaacaccagcgcatccatactggagagaggccatacaaatgttccgaatgcgggaagttctacagtcacaaatcaaatcttatcaagcactggagagttcacacgggagaacggccttataaatgcagtgactgcggcaagtttttcacccagtgttcatccttgatgcagcaccaaaaagtgcataccggcgaaaaacccttcaagtgcaatgagtgtgggaggtttttccgggagaattcgaccctcgtgagacatcagagagttcataccggcgcaaaaccttacgaatgcagagaatgcggtaagttcttttctcagtcatccactttgatgtag

SEQ ID NO: 39031 - DNA, 2366 bp, Artificial Sequence
  derived and/or modified sequence
gtgcgacacgcaatgggcgggacttccggcgtctcgtttggtattcactttcgcgactcaggtgaactaacctgcgagaagctggttgtgcgctgaggcgaccagcgccggaaggcacggtggcgactcacgctgttctcgccgctcagaggcgggtctgaggctcggtggcggcgcccagggtggcccgggccctttcctcggtcattgtctcccctccagctctactcacaggctccgatggcggcggccgccctgagggaccccgctcaggttcctgtggctgcagacttgcttacagaccatgaggagcagggctatgtgacctttgaggatgtggctgtctacttctcccaggaggaatggagattgcttgatgacgctcagaggctcctctaccgcaatgtgatgctggagaactttacacttctggcctctctgggacttgcatcttccaagacccatgaaataacccagctggagtcatgggaggagcccttcatgcctgcttgggaagttgtgacttcagccataccgagaggttgttggcatggagccgaggctgaggaggctcctgagcagattgcttctgtaggactgctcagttcaaacattcagcaacaccagaagcagcactgtggagagaaacccttaaaaagacaagagggcagggtcccagttttgaggagttgcaaagttcacctatcagagaagtccttgcaaagcagggaggttgggaaggccctcctgatcagctcaggtgttctcaagcaccaggtgactcacacaggagagaagtcacataggagctccaaaagtagggaggcctttcatgctggaaaaaggcattacaaatgcagtgaatgtgggaaagcctttggtcagaaatatttacttgttcagcaccagagactacatgctgggaaaaagacgtatgaatgcagtgaatgtgggaagttatttagagatatgtccaacctttttatacaccaaatagttcacactggagaaaggccttacgggtgtagtaactgtggaaaatcctttagccgtaatgctcacctcattgaacaccagagagttcacactggagaaaagccttttacatgcagtgaatgtggaaaagctttcaggcataattccacacttgttcagcatcacaaaatccacactggagtaaggccttatgagtgcagtgaatgtggaaaattgtttagtttcaactccagcctcatgaaacatcagagaattcacactggagaaagaccttataagtgcagtgaatgtggaaaattctatagccacaagtccaaccttatcaaacattggcgtgttcatactggagaaaggccttacaagtgcagcgactgtgggaaattttttacccaatgctcaagcctcatgcaacatcaaaaagttcacactggagaaaagccttttaagtgcaatgaatgtgggagattctttagagagaattccaccctagttagacatcagagggttcacactggagcaaagccttatgagtgcagggaatgtgggaaattttttagccaaagctcaaccctcatgcaacatcgaaaagttcacattggagaaaagccttttaagtgcaatgaatgtgggagattgtttagagagaattccagccttgttaaacatcagagggttcacactggagcaaagccttatgagtgcagggaatgtgggaagttttttcgccacaactccagtctttttaaacatcgaaggattcacactggagaaatgcagtgattgtgtgaaatcctttagccagcgtttcaacctcattcaacaccagaaagttcacagtggaaaaaatcttgaaggtaacagatggaaatccgttagccacacctccagtctcattcaacactggacagtttacaatgtggacaatgtagtgaatatggaaaaaggtttcagccaaaggcctaaccctattcaacaccagaaagtttacactggagaaaggccttagggtgacaggttatgtactgtctctgaatcaatatgacctcacttaaaacagaaactctgaggatggcctttatgagggagctggcaattgaacatcattcatctaaatatgcacactggaggcaagatgagaattcctgacagattgtccttcctgagaagacagccctctgccttggagctccagagagagggagccctgtattcttggctgtacccgtcgaatggagttttgatctcgctgagtttggagttgggggaggaaaggagtggtcttggttcaaatgtgactcacttttgctgttcttgtgaatgttagatcttctttaataaatatttatttcccatacacccttatgaccatt

SEQ ID NO: 39032 - DNA, 1562 bp, Artificial Sequence
  derived and/or modified sequence
aatgggcgggacttccggcgtctcgtttggtattcactttcgcgactcaggtgaactaacctgcgagaagctggttgtgcgctgaggcgaccagcgccggaaggcacggtggcgactcacgctgttctcgccgctcagaggcgggtctgaggctcggtggcggcgcccagggtggcccgggccctttcctcggtcattgtctcccctccagctctactcacaggctccgatggcggcggccgccctgagggaccccgctcaggttcctgtggctgcagacttgcttacagaccatgaggagcagggctatgtgacctttgaggatgtggctgtctacttctcccaggaggaatggagattgcttgatgacgctcagaggctcctctaccgcaatgtgatgctggagaactttacacttctggcctctctgggacttgcatcttccaagacccatgaaataacccagctggagtcatgggaggagcccttcatgcctgcttgggaagttgtgacttcagccataccgagaggttgttggcatggagccgaggctgaggaggctcctgagcagattgcttctgtaggactgctcagttcaaacattcagcaacaccagaagcagcactgtggagagaaacccttaaaaagacaagagggcagggtcccagttttgaggagttgcaaagttcacctatcagagaagtccttgcaaagcagggaggttgggaaggccctcctgatcagctcaggtgttctcaagcaccaggtgactcacacaggagagaagtcacataggagctccaaaagtagggaggcctttcatgctggaaaaaggcattacaaatgcagtgaatgtgggaaagcctttggtcagaaatatttacttgttcagcaccagagactacatgctgggaaaaagacgtatgaatgcagtgaatgtgggaagttatttagagatatgtccaacctttttatacaccaaatagttcacactggagaaaggccttacgggtgtagtaactgtggaaaatcctttagccgtaatgctcacctcattgaacaccagagagttcacactggagaaaagccttttacatgcagtgaatgtggaaaagctttcaggcataattccacacttgttcagcatcacaaaatccacactggagtaaggccttatgagtgcagtgaatgtggaaaattgtttagtttcaactccagcctcatgaaacatcagagaattcacactggagaaagaccttataagtgcagtgaatgtggaaaattctatagccacaagtccaaccttatcaaacattggcgtgttcatactggagaaaggccttacaagtgcagcgactgtgggaaattttttacccaatgctcaagcctcatgcaacatcaaaaagttcacactggagaaaagccttttaagtgcaatgaatgtgggagattctttagagagaattccaccctagttagacatcagagggttcacactggagcaaagccttatgagtgcagggaatgtgggaaattttttagccaaagctcaaccctcatgc

SEQ ID NO: 39033 - protein, 442 aa, Artificial Sequence
  derived and/or modified sequence
MAAAALRDPAQQGYVTFEDVAVYFSQEEWRLLDDAQRLLYRNVMLENFTLLASLGLASSKTHEITQLESWEEPFMPAWEVVTSAIPRGCWHGAEAEEAPEQIASVGLLSSNIQQHQKQHCGEKPLKRQEGRVPVLRSCKVHLSEKSLQSREVGKALLISSGVLKHQVTHTGEKSHRSSKSREAFHAGKRHYKCSECGKAFGQKYLLVQHQRLHAGKKTYECSECGKLFRDMSNLFIHQIVHTGERPYGCSNCGKSFSRNAHLIEHQRVHTGEKPFTCSECGKAFRHNSTLVQHHKIHTGVRPYECSECGKLFSFNSSLMKHQRIHTGERPYKCSECGKFYSHKSNLIKHWRVHTGERPYKCSDCGKFFTQCSSLMQHQKVHTGEKPFKCNECGRFFRENSSLVKHQRVHTGAKPYECRECGKFFRHNSSLFKHRRIHTGEMQ

SEQ ID NO: 39034 - protein, 498 aa, Artificial Sequence
  derived and/or modified sequence
MAAAALRDPAQQGYVTFEDVAVYFSQEEWRLLDDAQRLLYRNVMLENFTLLASLGLASSKTHEITQLESWEEPFMPAWEVVTSAIPRGCWHGAEAEEAPEQIASVGLLSSNIQQHQKQHCGEKPLKRQEGRVPVLRSCKVHLSEKSLQSREVGKALLISSGVLKHQVTHTGEKSHRSSKSREAFHAGKRHYKCSECGKAFGQKYLLVQHQRLHAGKKTYECSECGKLFRDMSNLFIHQIVHTGERPYGCSNCGKSFSRNAHLIEHQRVHTGEKPFTCSECGKAFRHNSTLVQHHKIHTGVRPYECSECGKLFSFNSSLMKHQRIHTGERPYKCSECGKFYSHKSNLIKHWRVHTGERPYKCSDCGKFFTQCSSLMQHQKVHTGEKPFKCNECGRFFRENSTLVRHQRVHTGAKPYECRECGKFFSQSSTLMQHRKVHIGEKPFKCNECGRLFRENSSLVKHQRVHTGAKPYECRECGKFFRHNSSLFKHRRIHTGEMQ

SEQ ID NO: 39035 - protein, 135 aa, Artificial Sequence
  derived and/or modified sequence
MAAAALRDPAQQGYVTFEDVAVYFSQEEWRLLDDAQRLLYRNVMLENFTLLASLGLASSKTHEITQLESWEEPFMPAWEVVTSAIPRGCWHGAEAEEAPEQIASVGLLSSNIQQHQKQHCGEKPLKRQEGRVPVL

SEQ ID NO: 39036 - DNA, 1329 bp, Artificial Sequence
  derived and/or modified sequence
atggccgccgccgccctgagagaccccgcccagcagggctacgtgaccttcgaggacgtggccgtgtacttcagccaggaggagtggagactgctggacgacgcccagagactgctgtacagaaacgtgatgctggagaacttcaccctgctggccagcctgggcctggccagcagcaagacccacgagatcacccagctggagagctgggaggagcccttcatgcccgcctgggaggtggtgaccagcgccatccccagaggctgctggcacggcgccgaggccgaggaggcccccgagcagatcgccagcgtgggcctgctgagcagcaacatccagcagcaccagaagcagcactgcggcgagaagcccctgaagagacaggagggcagagtgcccgtgctgagaagctgcaaggtgcacctgagcgagaagagcctgcagagcagagaggtgggcaaggccctgctgatcagcagcggcgtgctgaagcaccaggtgacccacaccggcgagaagagccacagaagcagcaagagcagagaggccttccacgccggcaagagacactacaagtgcagcgagtgcggcaaggccttcggccagaagtacctgctggtgcagcaccagagactgcacgccggcaagaagacctacgagtgcagcgagtgcggcaagctgttcagagacatgagcaacctgttcatccaccagatcgtgcacaccggcgagagaccctacggctgcagcaactgcggcaagagcttcagcagaaacgcccacctgatcgagcaccagagagtgcacaccggcgagaagcccttcacctgcagcgagtgcggcaaggccttcagacacaacagcaccctggtgcagcaccacaagatccacaccggcgtgagaccctacgagtgcagcgagtgcggcaagctgttcagcttcaacagcagcctgatgaagcaccagagaatccacaccggcgagagaccctacaagtgcagcgagtgcggcaagttctacagccacaagagcaacctgatcaagcactggagagtgcacaccggcgagagaccctacaagtgcagcgactgcggcaagttcttcacccagtgcagcagcctgatgcagcaccagaaggtgcacaccggcgagaagcccttcaagtgcaacgagtgcggcagattcttcagagagaacagcagcctggtgaagcaccagagagtgcacaccggcgccaagccctacgagtgcagagagtgcggcaagttcttcagacacaacagcagcctgttcaagcacagaagaatccacaccggcgagatgcagtag

SEQ ID NO: 39037 - DNA, 1497 bp, Artificial Sequence
  derived and/or modified sequence
atggccgccgccgccctgagagaccccgcccagcagggctacgtgaccttcgaggacgtggccgtgtacttcagccaggaggagtggagactgctggacgacgcccagagactgctgtacagaaacgtgatgctggagaacttcaccctgctggccagcctgggcctggccagcagcaagacccacgagatcacccagctggagagctgggaggagcccttcatgcccgcctgggaggtggtgaccagcgccatccccagaggctgctggcacggcgccgaggccgaggaggcccccgagcagatcgccagcgtgggcctgctgagcagcaacatccagcagcaccagaagcagcactgcggcgagaagcccctgaagagacaggagggcagagtgcccgtgctgagaagctgcaaggtgcacctgagcgagaagagcctgcagagcagagaggtgggcaaggccctgctgatcagcagcggcgtgctgaagcaccaggtgacccacaccggcgagaagagccacagaagcagcaagagcagagaggccttccacgccggcaagagacactacaagtgcagcgagtgcggcaaggccttcggccagaagtacctgctggtgcagcaccagagactgcacgccggcaagaagacctacgagtgcagcgagtgcggcaagctgttcagagacatgagcaacctgttcatccaccagatcgtgcacaccggcgagagaccctacggctgcagcaactgcggcaagagcttcagcagaaacgcccacctgatcgagcaccagagagtgcacaccggcgagaagcccttcacctgcagcgagtgcggcaaggccttcagacacaacagcaccctggtgcagcaccacaagatccacaccggcgtgagaccctacgagtgcagcgagtgcggcaagctgttcagcttcaacagcagcctgatgaagcaccagagaatccacaccggcgagagaccctacaagtgcagcgagtgcggcaagttctacagccacaagagcaacctgatcaagcactggagagtgcacaccggcgagagaccctacaagtgcagcgactgcggcaagttcttcacccagtgcagcagcctgatgcagcaccagaaggtgcacaccggcgagaagcccttcaagtgcaacgagtgcggcagattcttcagagagaacagcaccctggtgagacaccagagagtgcacaccggcgccaagccctacgagtgcagagagtgcggcaagttcttcagccagagcagcaccctgatgcagcacagaaaggtgcacatcggcgagaagcccttcaagtgcaacgagtgcggcagactgttcagagagaacagcagcctggtgaagcaccagagagtgcacaccggcgccaagccctacgagtgcagagagtgcggcaagttcttcagacacaacagcagcctgttcaagcacagaagaatccacaccggcgagatgcagtag

SEQ ID NO: 39038 - DNA, 408 bp, Artificial Sequence
  derived and/or modified sequence
atggccgccgccgccctgagagaccccgcccagcagggctacgtgaccttcgaggacgtggccgtgtacttcagccaggaggagtggagactgctggacgacgcccagagactgctgtacagaaacgtgatgctggagaacttcaccctgctggccagcctgggcctggccagcagcaagacccacgagatcacccagctggagagctgggaggagcccttcatgcccgcctgggaggtggtgaccagcgccatccccagaggctgctggcacggcgccgaggccgaggaggcccccgagcagatcgccagcgtgggcctgctgagcagcaacatccagcagcaccagaagcagcactgcggcgagaagcccctgaagagacaggagggcagagtgcccgtgctgtag

SEQ ID NO: 39039 - DNA, 1329 bp, Artificial Sequence
  derived and/or modified sequence
atggccgccgcggcattgagggatccagcccagcaggggtatgtgacattcgaggacgtggccgtgtattttagtcaggaggagtggcgactgctggatgatgctcagagactgctttacagaaatgtaatgctcgaaaattttacacttttggccagcttaggattggcatctagcaagacacatgaaattactcaacttgaatcctgggaagaaccatttatgccagcatgggaggttgtgacatcagcaattcctagaggatgctggcacggagccgaggccgaagaggctcctgagcagatcgccagcgtgggcctgctaagctccaacatacagcaacatcagaagcagcactgcggcgagaaaccactgaaacgccaggaaggaagagtgcccgtgctacgatcatgcaaggtacaccttagtgagaagtctctgcagtcaagggaggtgggcaaggcactgttgattagttccggagttcttaaacaccaggtgactcataccggcgaaaagagccacaggtccagcaagtcccgagaggccttccatgcaggtaagagacattacaaatgttcggagtgtggaaaggcgttcggccagaaataccttcttgtgcagcaccagagactacatgctggaaagaagacatacgagtgctcagagtgcggcaaactcttcagagacatgtccaatctatttattcaccaaattgtgcacaccggcgaaagaccatatggctgctcgaactgtggaaaaagctttagccggaacgcgcacctgattgagcatcaaagagtgcacactggagagaagccatttacttgctccgagtgtgggaaggcttttaggcacaactccacactggtacaacatcacaagatccacaccggcgtacggccttatgaatgttctgagtgtgggaaactgttctcatttaattctagtctgatgaagcaccagcgcatacacactggagagcggccttacaaatgtagcgaatgcggcaagttttactctcacaagtccaacttgatcaaacactggagagttcatacgggagaaaggccctacaaatgctccgactgtggtaagtttttcacacagtgctcatccctaatgcagcaccaaaaagtccacacaggcgaaaagccctttaagtgcaacgaatgtggccgattcttccgtgaaaactctagcctggtaaaacaccagcgggtgcacaccggcgctaagccatacgagtgcagggaatgtgggaagttctttaggcacaactcatctctgttcaagcaccgcaggattcataccggggagatgcagtag

SEQ ID NO: 39040 - DNA, 1497 bp, Artificial Sequence
  derived and/or modified sequence
atggccgccgccgctctgagagacccagctcagcagggatacgtcaccttcgaagatgtggccgtgtacttttctcaggaagaatggagactgttagatgatgcacagcgcttgctgtatcgcaacgtcatgctcgagaactttacgttacttgctagtcttggtctggcaagctctaagacacacgagataacgcagctggaatcttgggaagagccttttatgccagcttgggaggtcgtcacttccgctattccgcgtggttgctggcatggagctgaggccgaagaagctcccgagcaaatcgcatccgtcggcctactgagcagcaacattcagcagcaccagaagcagcactgtggtgagaagccactgaaaaggcaagagggaagagtccccgtgctgcgttcttgcaaggtacacttatccgagaaaagcctgcagagtcgtgaggtcggtaaggctctgttaatctcctccggggtgttgaaacaccaggttacccataccggcgagaagtcccataggagctcaaaaagccgcgaagcctttcacgctggaaaacgacattataagtgttccgaatgcggtaaggcctttggccaaaagtatctactggtccagcaccaaagattgcatgccggcaagaagacttacgagtgttctgaatgtgggaagctgttcagagatatgtctaacctattcatccatcagattgtgcacaccggggaaaggccctacggatgttccaattgtggaaaaagtttctcccgcaatgctcaccttatagagcatcagcgcgtgcacaccggagaaaaaccgttcacatgctccgaatgtgggaaggccttccgtcataatagcaccctggtccagcaccacaagatacacacaggggtgagaccatacgaatgcagcgaatgcggcaagctgttcagttttaattcgtccttgatgaagcaccagcgcatccataccggagaaaggccatataagtgttccgagtgcgggaaattttattcccacaagtccaacctcatcaaacattggagggtgcacacgggggagcgcccgtacaagtgcagcgattgtggcaaatttttcacacaatgttcctcgctaatgcagcaccagaaagtacatacaggcgagaaaccgttcaagtgcaatgagtgcggtcgatttttcagggagaactctactctggtgaggcaccagcgggtacatacaggggccaaaccctatgagtgtagagagtgtgggaaattcttctcccaatcctcaacactgatgcaacaccgaaaagtgcacatcggggagaagccgttcaagtgcaacgagtgcggtcggctgttccgcgagaattctagcctggtgaagcatcaaagagtgcatacaggagcaaaaccatatgagtgcagagagtgcggaaagttttttcggcataacagttcattgtttaagcataggcgaatccataccggggaaatgcagtag

SEQ ID NO: 39041 - DNA, 408 bp, Artificial Sequence
  derived and/or modified sequence
atggcggccgccgcactgagagaccctgctcagcaagggtatgtgacatttgaggatgtggcagtttatttcagccaggaggagtggaggctgttggacgacgcccagagactactgtacagaaacgtaatgttagagaatttcacattgctggcctccctagggctggcaagtagtaaaactcacgaaattacacagctggagtcctgggaagagccatttatgcctgcctgggaggtcgttacttccgcgatccctagaggatgctggcacggagcagaggccgaggaggctcctgagcagatcgcatcagtaggactgctgagttctaatatacagcagcaccagaaacagcattgtggcgagaagcccttgaaaagacaagagggcagagtgcccgtactgtag

SEQ ID NO: 39042 - DNA, 1329 bp, Artificial Sequence
  derived and/or modified sequence
atggctgctgctgccctgcgggaccctgcccagcagggctacgtgacctttgaagatgtggccgtgtacttcagccaggaggagtggaggctgctggatgatgcccagaggctgctgtacagaaatgtgatgctggagaacttcaccctgctggccagcctgggcctggccagcagcaagacccatgagatcacccagctggagagctgggaggagcccttcatgcctgcctgggaggtggtgaccagcgccatcccccggggctgctggcatggagctgaggccgaggaggcccctgagcagatcgcctctgtgggcctgctgagcagcaacatccagcagcaccagaagcagcactgtggggagaagcccctgaagaggcaggagggccgggtgcctgtgctgcggagctgcaaggtgcacctgtctgagaagagcctgcagagccgggaggtgggcaaggccctgctgatcagcagcggcgtgctgaagcaccaggtgacccacactggagagaagagccacaggagcagcaagagccgggaggccttccacgccggcaagaggcactacaagtgcagtgaatgtgggaaggccttcggccagaagtacctgctggtgcagcaccagaggctgcacgccggcaagaagacctatgagtgcagtgaatgtgggaagctgttccgggacatgagcaacctcttcatccaccagatcgtgcacactggagagcggccctacggctgcagcaactgtgggaagagcttcagcagaaatgcccacctgattgagcaccagagggtgcacactggagagaagcccttcacctgcagtgaatgtgggaaggccttccgccacaacagcaccctggtgcagcaccacaagatccacactggagtgcggccctatgagtgcagtgaatgtgggaagctgttctccttcaacagcagcctgatgaagcaccagaggatccacactggagagcggccctacaagtgcagtgaatgtgggaagttctacagccacaagagcaacctgatcaagcactggagggtgcacactggagagcggccctacaagtgcagcgactgtgggaagttcttcacccagtgcagcagcctgatgcagcaccagaaggtgcacactggagagaagcccttcaagtgcaatgaatgtggccgcttcttccgggagaacagcagcctggtgaagcaccagagggtgcacactggagccaagccctatgagtgcagagaatgtgggaagttcttccgccacaacagcagcctcttcaagcaccggcgcatccacactggagagatgcagtag

SEQ ID NO: 39043 - DNA, 1497 bp, Artificial Sequence
  derived and/or modified sequence
atggctgctgctgccctgcgggaccctgcccagcagggctacgtgacctttgaagatgtggccgtgtacttcagccaggaggagtggaggctgctggatgatgcccagaggctgctgtacagaaatgtgatgctggagaacttcaccctgctggccagcctgggcctggccagcagcaagacccatgagatcacccagctggagagctgggaggagcccttcatgcctgcctgggaggtggtgaccagcgccatcccccggggctgctggcatggagctgaggccgaggaggcccctgagcagatcgcctctgtgggcctgctgagcagcaacatccagcagcaccagaagcagcactgtggggagaagcccctgaagaggcaggagggccgggtgcctgtgctgcggagctgcaaggtgcacctgtctgagaagagcctgcagagccgggaggtgggcaaggccctgctgatcagcagcggcgtgctgaagcaccaggtgacccacactggagagaagagccacaggagcagcaagagccgggaggccttccacgccggcaagaggcactacaagtgcagtgaatgtgggaaggccttcggccagaagtacctgctggtgcagcaccagaggctgcacgccggcaagaagacctatgagtgcagtgaatgtgggaagctgttccgggacatgagcaacctcttcatccaccagatcgtgcacactggagagcggccctacggctgcagcaactgtgggaagagcttcagcagaaatgcccacctgattgagcaccagagggtgcacactggagagaagcccttcacctgcagtgaatgtgggaaggccttccgccacaacagcaccctggtgcagcaccacaagatccacactggagtgcggccctatgagtgcagtgaatgtgggaagctgttctccttcaacagcagcctgatgaagcaccagaggatccacactggagagcggccctacaagtgcagtgaatgtgggaagttctacagccacaagagcaacctgatcaagcactggagggtgcacactggagagcggccctacaagtgcagcgactgtgggaagttcttcacccagtgcagcagcctgatgcagcaccagaaggtgcacactggagagaagcccttcaagtgcaatgaatgtggccgcttcttccgggagaacagcaccctggtgcgccaccagagggtgcacactggagccaagccctatgagtgcagagaatgtgggaagttcttcagccagagcagcaccctgatgcagcacaggaaggtgcacatcggggagaagcccttcaagtgcaatgaatgtggccgcctcttccgggagaacagcagcctggtgaagcaccagagggtgcacactggagccaagccctatgagtgcagagaatgtgggaagttcttccgccacaacagcagcctcttcaagcaccggcgcatccacactggagagatgcagtag

SEQ ID NO: 39044 - DNA, 408 bp, Artificial Sequence
  derived and/or modified sequence
atggctgctgctgccctgcgggaccctgcccagcagggctacgtgacctttgaagatgtggccgtgtacttcagccaggaggagtggaggctgctggatgatgcccagaggctgctgtacagaaatgtgatgctggagaacttcaccctgctggccagcctgggcctggccagcagcaagacccatgagatcacccagctggagagctgggaggagcccttcatgcctgcctgggaggtggtgaccagcgccatcccccggggctgctggcatggagctgaggccgaggaggcccctgagcagatcgcctctgtgggcctgctgagcagcaacatccagcagcaccagaagcagcactgtggggagaagcccctgaagaggcaggagggccgggtgcctgtgctgtag

SEQ ID NO: 39045 - DNA, 1329 bp, Artificial Sequence
  derived and/or modified sequence
atggccgccgccgccctgcgggaccccgcccagcagggctacgtgactttcgaggacgtcgccgtatacttctctcaggaagagtggcggctactggacgatgctcaacggcttttgtaccgtaacgtgatgctggagaatttcactctgctggcttccctcggacttgcctcttctaagacccacgaaataacgcagctggaatcttgggaggaacccttcatgccagcctgggaagtcgtgacatctgccatcccgcgcggctgttggcacggtgccgaggccgaggaagcccccgaacaaattgcctccgtaggtctgttgagctcaaacattcaacagcatcagaaacagcactgcggggaaaaaccactaaaacggcaggaggggagggtgcccgtgttaaggtcttgtaaggtgcacttgtctgagaagagcctgcaaagcagagaagtcggcaaggcactgctcatctcgtccggggtgctcaaacaccaggtcacccatactggcgagaagagccacaggtcttcgaagtcaagggaagccttccacgccggaaaacgccactacaagtgctccgagtgtggcaaggcttttggacagaagtacctcctcgtgcagcaccagaggctgcacgcagggaaaaaaacctacgaatgctcggaatgcggaaagctcttcagagacatgtccaatctgtttatccatcaaatcgttcatacaggggagagaccttacggctgcagcaattgcggaaagtctttttctagaaacgcacatttgattgagcaccaaagagtgcatacaggagaaaaacctttcacgtgctccgagtgtggtaaggccttccgtcacaattcaacattagtccaacaccacaagatccataccggggtcaggccatatgagtgctcggaatgcggtaaactcttctcctttaattcttccctgatgaagcatcagcgcattcatacgggagagaggccatataaatgttcggaatgtggaaagttctatagtcacaagtctaacttgatcaaacactggcgcgtacacaccggcgaaaggccctataaatgttcagattgcggcaaattctttacccagtgtagctccctaatgcagcaccagaaagtccatactggagagaaaccatttaagtgtaacgaatgtggacggtttttcagggaaaactcctctctggtaaagcatcagagggttcatacaggcgccaagccatacgagtgtagggaatgtggtaagtttttccgccacaacagctccctattcaagcatcgcaggatccacaccggcgagatgcagtag

SEQ ID NO: 39046 - DNA, 1497 bp, Artificial Sequence
  derived and/or modified sequence
atggccgccgccgccctgcgggaccccgcccagcagggctacgtgacatttgaggacgtcgcggtatacttttcccaagaggagtggcgtctcctcgatgacgcccagagattgttgtaccgcaatgtaatgctcgaaaattttactctactcgccagcctaggcctggccagctctaaaacccatgagatcactcagttagaatcttgggaagaaccttttatgcccgcgtgggaagtggtgacctctgccatccctcgcgggtgttggcatggagcagaagccgaagaggcgccagagcagattgcttctgttggtcttctgagttcaaacattcagcagcatcagaaacaacactgcggcgagaagcctctgaagcgtcaggaaggtcgggtccccgtgctgcggagttgcaaggtccatctttcagagaagtctttgcaatcccgcgaggtaggcaaagcgctgctgataagctctggcgttctgaaacatcaagtgactcacacgggcgagaaatctcatcgttccagcaagagccgtgaagcatttcatgccgggaaacgacattacaaatgttctgagtgtgggaaagcatttggacagaagtacctgctcgtacaacaccagcgcctacacgccggaaaaaagacttatgaatgtagcgaatgcggcaaattatttagggacatgagcaacctatttattcaccagattgtacatactggtgaacgcccatacgggtgtagcaactgtggaaaatctttctcccggaatgcacacctgattgagcaccagcgagtgcacaccggggaaaagccattcacctgctctgaatgcgggaaggcattcaggcacaactcaactcttgtacagcaccataagatacacaccggcgtcagaccttatgagtgttctgagtgcggtaagctcttttcattcaatagttccctgatgaaacaccagcgcattcatacaggagaacgcccctacaagtgtagcgagtgcggaaagttctactctcacaaatcgaacctgattaagcactggcgggtgcatactggtgagaggccatacaaatgctccgactgtggtaagttctttacacaatgctcatcactgatgcaacatcagaaagttcacactggggagaaacccttcaaatgtaatgaatgcgggcgcttctttagagaaaatagtactctcgttcgacatcagcgcgtccataccggcgcgaaaccttatgaatgtcgagaatgtggcaaattcttttctcagagcagtaccttgatgcagcaccgcaaagtgcatattggcgagaaacctttcaaatgtaatgaatgtggtagactgttccgggagaatagtagtttagttaagcaccagagagtccacaccggagccaagccatatgagtgccgcgaatgcggtaaattttttaggcacaattcatccctgttcaagcatagaaggatccatacaggtgagatgcaatag

SEQ ID NO: 39047 - DNA, 408 bp, Artificial Sequence
  derived and/or modified sequence
atggccgccgccgccctgcgggaccccgcccagcagggctacgtgacattcgaggatgtggccgtctatttttcccaggaggagtggaggctgctggacgatgcacagcgtcttctgtaccgaaacgtgatgctggagaatttcactctacttgcaagcttgggattagccagctctaaaactcacgaaatcactcagttggaatcttgggaagagccatttatgcctgcctgggaggttgtgaccagcgccattcctcgcggctgctggcatggggctgaggccgaggaagcacccgaacagattgcctctgtgggtttgttaagcagcaatatccagcagcatcagaagcagcactgtggtgagaagcctcttaagaggcaggaggggcgcgtgccggttctttag

SEQ ID NO: 39048 - DNA, 1329 bp, Artificial Sequence
  derived and/or modified sequence
atggcggctgctgccctccgggacccagcccagcaggggtacgtaaccttcgaggatgtcgctgtatatttttcacaggaagaatggcgactgcttgacgatgctcaacgtctcctgtaccggaacgtcatgctggaaaacttcaccttgctggccagcctcgggctggcatcatctaagacccatgaaatcacacaactcgaaagttgggaggagccattcatgcccgcttgggaggtggtcacgtctgcaatccctcgagggtgttggcatggggctgaggctgaggaagcccctgaacaaatcgctagtgttggtttgctcagtagcaacatccagcagcatcaaaagcagcactgcggcgaaaaacccttgaaacgacaggagggcagagttcccgttcttcgctcttgtaaagtgcacctctctgaaaagtctctgcagtctagagaggtggggaaggccttgctgattagcagcggtgtcctgaaacatcaggtcacccacacaggagagaagtcacaccgaagctcaaagtcacgcgaagcgttccacgcgggaaaacgtcattacaagtgcagtgaatgcggcaaagccttcgggcagaaatacctacttgtgcaacatcagagattacatgctgggaagaaaacatacgagtgttcagagtgcggaaaactgttcagggacatgtctaacttgttcatccaccagatcgtgcacactggcgagcgcccatacggttgctctaactgcggtaagagtttcagtaggaacgcccacctgatagaacaccaaagagtgcacacaggagagaaaccattcacatgcagtgagtgtggaaaagcttttagacacaactctacgttagtacaacaccataaaatacatactggcgtacgcccttatgagtgttccgagtgcggtaagcttttttcctttaactcatccctgatgaaacatcagcgaatccacactggtgagagaccttataagtgctccgagtgcggcaagttctattcacacaaatcaaacctcattaagcactggagagtgcatacgggcgaaaggccttacaaatgctccgattgcgggaaatttttcactcagtgttctagcctaatgcaacaccagaaggtgcatacaggcgagaagccttttaagtgtaatgagtgcggccgattcttccgagagaacagttctctcgtgaaacaccagcgcgtgcacactggcgcaaaaccatacgaatgtcgcgaatgcggcaagttttttcgccacaattcctcacttttcaaacaccggagaatccataccggcgaaatgcagtag

SEQ ID NO: 39049 - DNA, 1497 bp, Artificial Sequence
  derived and/or modified sequence
atggcagctgccgctctccgggaccccgcacaacaagggtacgttacctttgaggacgttgcggtgtactttagccaggaggaatggagactacttgatgacgcccagagactcttgtatagaaatgtgatgctggaaaactttacacttctggcctctctgggcctggcgtctagcaagacacacgagattacccagcttgaatcgtgggaggagcctttcatgccagcctgggaggttgtgacctccgctattcccaggggatgttggcatggtgccgaagccgaagaagccccagagcagatagcaagcgtgggcctcctgagtagtaatatccagcagcaccaaaaacagcactgcggggagaagccactgaaacgtcaggaaggccgagtccctgtactgagatcctgcaaggtgcatctctctgagaagtcacttcaatctcgagaagttggcaaggctctcctgatatccagcggcgtcctgaaacaccaggtgacgcacacaggtgaaaagagccatcggtcatccaaatcgcgggaggcatttcacgccggtaagagacattacaagtgctcagagtgcggcaaggcctttggacagaaatatctcctggtacaacaccaacgcctgcacgccggtaaaaagacatacgaatgttccgagtgcggaaaactgttcagagatatgagtaacctattcatccatcaaatagtgcacacaggagagaggccttatggttgcagcaattgtgggaaatctttttcccggaacgcgcatttgatcgagcatcagcgcgtgcatactggtgagaaaccattcacctgctctgaatgtgggaaggcgtttcggcataacagtaccctggtgcagcatcacaaaatccacactggagtgaggccgtatgagtgctctgaatgtgggaagctattcagctttaactcgtcccttatgaaacatcaaagaattcataccggagaaaggccatacaaatgttccgagtgcgggaagttctacagccacaagtccaatctcattaaacactggcgagtacataccggtgagcggccttataaatgctcagattgtggaaagttttttactcaatgttcctctctcatgcaacatcagaaggtgcatactggcgaaaagccctttaaatgcaacgaatgcggaagattttttcgggagaactccaccttagtgagacatcagcgggttcataccggcgctaaaccatacgaatgtcgcgagtgtggcaagttcttttcacaatcatccaccctgatgcagcacaggaaagtgcacatcggagagaaaccattcaaatgcaatgagtgtggtagattgttccgggagaattctagccttgtgaagcaccagagggtccatactggagccaagccatacgagtgtcgtgagtgtggtaagttttttcgacacaactccagccttttcaagcaccggcgtatccacactggagaaatgcagtag

SEQ ID NO: 39050 - DNA, 408 bp, Artificial Sequence
  derived and/or modified sequence
atggctgccgcagcactccgagatcccgcacagcaaggatatgtgacctttgaggatgtggccgtttatttcagccaggaggagtggcgcctcttggacgacgcacagcggctgttatatcgtaatgtgatgctggagaacttcaccttattggcaagcctgggactggcctcatccaaaacccacgagattactcagcttgaatcatgggaggaaccctttatgccggcatgggaggtcgtgacttcagccatccccaggggctgttggcacggcgcagaggctgaggaagccccagagcagatcgcgtctgtgggcctgctctcatcaaatatccagcaacatcagaagcagcactgcggcgagaaacccttgaaaaggcaggaaggcagggtgcccgtcctctag

SEQ ID NO: 39051 - protein, 429 aa, Artificial Sequence
  derived and/or modified sequence
DPVQGYVTFEDVAVYFSQEEWRLLDDAQRLLYRNVMLENFTLLASLGKHPELGSAFPPFPRERSLAVSLMDLIPGGLSVQLSHQCDCCLTVLFLVLHVSPSHQQNPSAVAFTECVVVGMERLLSSNIQQHQKQHCGEKPLKRQEGRVPVLRSCKVHLSEKSLQSREVGKALLISSGVLKHQVTHTGEKSHRSSKSREAFHAGKRHYKCSECGKAFGQKYLLVQHQRLHTGERPYGCSNCGKSFSRNAHLIEHQRVHTGEKPFTCSECGKAFRHNSTLVQHHKIHTGVRPYECSECGKLFSFNSSLMKHQRIHTGERPYKCSECGKFYSHKSNLIKHWRVHTGERPYKCSDCGKFFTQCSSLMQHQKVHTGEKPFKCNECGRFFRENSTLVRHQRVHTGAKPYECRECGKFFSQSSTLMQHRKVHIGEKP

SEQ ID NO: 39052 - protein, 497 aa, Artificial Sequence
  derived and/or modified sequence
MAAAALRDPAQGYVTFEDVAVYFSQEEWRLLDDAQRLLYRNVMLENFTLLASLGLASSKTHEITQLESWEEPFMPAWEVVTSAIPRGCWHGAEAEEAPEQIASVGLLSSNIQQHQKQHCGEKPLKRQEGRVPVLRSCKVHLSEKSLQSREVGKALLISSGVLKHQVTHTGEKSHRSSKSREAFHAGKRHYKCSECGKAFGQKYLLVQHQRLHAGKKTYECSECGKLFRDMSNLFIHQIVHTGERPYGCSNCGKSFSRNAHLIEHQRVHTGEKPFTCSECGKAFRHNSTLVQHHKIHTGVRPYECSECGKLFSFNSSLMKHQRIHTGERPYKCSECGKFYSHKSNLIKHWRVHTGERPYKCSDCGKFFTQCSSLMQHQKVHTGEKPFKCNECGRFFRENSTLVRHQRVHTGAKPYECRECGKFFSQSSTLMQHRKVHIGEKPFKCNECGRLFRENSSLVKHQRVHTGAKPYECRECGKFFRHNSSLFKHRRIHTGEMQ

SEQ ID NO: 39053 - DNA, 1290 bp, Artificial Sequence
  derived and/or modified sequence
gaccccgtgcagggctacgtgaccttcgaggacgtggccgtgtacttcagccaggaggagtggagactgctggacgacgcccagagactgctgtacagaaacgtgatgctggagaacttcaccctgctggccagcctgggcaagcaccccgagctgggcagcgccttcccccccttccccagagagagaagcctggccgtgagcctgatggacctgatccccggcggcctgagcgtgcagctgagccaccagtgcgactgctgcctgaccgtgctgttcctggtgctgcacgtgagccccagccaccagcagaaccccagcgccgtggccttcaccgagtgcgtggtggtgggcatggagagactgctgagcagcaacatccagcagcaccagaagcagcactgcggcgagaagcccctgaagagacaggagggcagagtgcccgtgctgagaagctgcaaggtgcacctgagcgagaagagcctgcagagcagagaggtgggcaaggccctgctgatcagcagcggcgtgctgaagcaccaggtgacccacaccggcgagaagagccacagaagcagcaagagcagagaggccttccacgccggcaagagacactacaagtgcagcgagtgcggcaaggccttcggccagaagtacctgctggtgcagcaccagagactgcacaccggcgagagaccctacggctgcagcaactgcggcaagagcttcagcagaaacgcccacctgatcgagcaccagagagtgcacaccggcgagaagcccttcacctgcagcgagtgcggcaaggccttcagacacaacagcaccctggtgcagcaccacaagatccacaccggcgtgagaccctacgagtgcagcgagtgcggcaagctgttcagcttcaacagcagcctgatgaagcaccagagaatccacaccggcgagagaccctacaagtgcagcgagtgcggcaagttctacagccacaagagcaacctgatcaagcactggagagtgcacaccggcgagagaccctacaagtgcagcgactgcggcaagttcttcacccagtgcagcagcctgatgcagcaccagaaggtgcacaccggcgagaagcccttcaagtgcaacgagtgcggcagattcttcagagagaacagcaccctggtgagacaccagagagtgcacaccggcgccaagccctacgagtgcagagagtgcggcaagttcttcagccagagcagcaccctgatgcagcacagaaaggtgcacatcggcgagaagccctag

SEQ ID NO: 39054 - DNA, 1494 bp, Artificial Sequence
  derived and/or modified sequence
atggccgccgccgccctgagagaccccgcccagggctacgtgaccttcgaggacgtggccgtgtacttcagccaggaggagtggagactgctggacgacgcccagagactgctgtacagaaacgtgatgctggagaacttcaccctgctggccagcctgggcctggccagcagcaagacccacgagatcacccagctggagagctgggaggagcccttcatgcccgcctgggaggtggtgaccagcgccatccccagaggctgctggcacggcgccgaggccgaggaggcccccgagcagatcgccagcgtgggcctgctgagcagcaacatccagcagcaccagaagcagcactgcggcgagaagcccctgaagagacaggagggcagagtgcccgtgctgagaagctgcaaggtgcacctgagcgagaagagcctgcagagcagagaggtgggcaaggccctgctgatcagcagcggcgtgctgaagcaccaggtgacccacaccggcgagaagagccacagaagcagcaagagcagagaggccttccacgccggcaagagacactacaagtgcagcgagtgcggcaaggccttcggccagaagtacctgctggtgcagcaccagagactgcacgccggcaagaagacctacgagtgcagcgagtgcggcaagctgttcagagacatgagcaacctgttcatccaccagatcgtgcacaccggcgagagaccctacggctgcagcaactgcggcaagagcttcagcagaaacgcccacctgatcgagcaccagagagtgcacaccggcgagaagcccttcacctgcagcgagtgcggcaaggccttcagacacaacagcaccctggtgcagcaccacaagatccacaccggcgtgagaccctacgagtgcagcgagtgcggcaagctgttcagcttcaacagcagcctgatgaagcaccagagaatccacaccggcgagagaccctacaagtgcagcgagtgcggcaagttctacagccacaagagcaacctgatcaagcactggagagtgcacaccggcgagagaccctacaagtgcagcgactgcggcaagttcttcacccagtgcagcagcctgatgcagcaccagaaggtgcacaccggcgagaagcccttcaagtgcaacgagtgcggcagattcttcagagagaacagcaccctggtgagacaccagagagtgcacaccggcgccaagccctacgagtgcagagagtgcggcaagttcttcagccagagcagcaccctgatgcagcacagaaaggtgcacatcggcgagaagcccttcaagtgcaacgagtgcggcagactgttcagagagaacagcagcctggtgaagcaccagagagtgcacaccggcgccaagccctacgagtgcagagagtgcggcaagttcttcagacacaacagcagcctgttcaagcacagaagaatccacaccggcgagatgcagtag

SEQ ID NO: 39055 - DNA, 1290 bp, Artificial Sequence
  derived and/or modified sequence
gaccctgtacaggggtatgtaacttttgaggatgtcgccgtatatttcagccaggaggaatggagactgctcgatgacgcacagcgcttgttgtaccgaaatgtgatgctggaaaactttacactcctggcgagcctgggcaagcatcctgagttgggttcggcttttcccccgtttccgcgggagcgctcacttgccgtgagcctgatggaccttattcccggtggcctgagtgtgcaactttcacaccagtgtgattgctgtctgaccgtattatttctcgtgctgcatgtatctccatcccaccagcagaacccaagcgctgtggctttcactgagtgcgtggtggtcgggatggagcggctcctgagctctaatattcaacaacaccagaagcagcattgcggagaaaagcccctcaagcggcaagaagggcgtgtgcctgttctgcgtagctgtaaagtgcatctcagcgagaagtccctgcagagccgcgaagtcgggaaggcactcctgattagctccggagtgttaaaacaccaggtgacccacaccggcgagaaatcacacaggtcctctaaatcaagggaagcctttcacgcaggaaagcgtcactataaatgctccgagtgtggaaaagcattcggccagaagtacctgctggtccagcaccagcggcttcacaccggcgagcgtccatacggctgcagcaactgcggcaagtcgttctccagaaacgctcatttgattgaacaccagcgtgtccataccggagagaaaccctttacatgttcggaatgcggcaaggcattccgccacaattcaacactcgttcagcatcataagatacatacaggagtcagaccatacgaatgtagcgaatgtggcaaacttttctcgttcaacagttcactaatgaaacaccagaggatacacacaggggagaggccatataaatgttccgaatgtgggaaattttatagccataaatctaatcttataaaacactggcgcgtgcacaccggtgaacggccttataagtgtagtgactgtggcaagttcttcactcagtgcagttctctaatgcagcaccagaaggtccacaccggtgaaaaacccttcaaatgcaacgagtgcgggcgttttttcagagagaattctacccttgtgcgccatcagagggtacacacgggtgccaagccatacgaatgtagagagtgtggcaaattctttagtcaatccagcactttgatgcagcatcggaaggtacacatcggcgagaagccgtag

SEQ ID NO: 39056 - DNA, 1494 bp, Artificial Sequence
  derived and/or modified sequence
atggccgctgcagccttgagggaccctgcccaggggtacgtcacattcgaggatgtagccgtatacttctcccaggaggaatggagattgctcgatgacgcccagaggctgctgtatcggaatgtgatgcttgagaactttacactgctagcctccctaggcttggcctctagcaagacccacgaaatcacacagcttgaatcttgggaggagcctttcatgcccgcctgggaggttgtgacaagtgcaataccgcgcggctgctggcacggagcggaggcagaagaagccccagaacagatcgcctcggttgggcttctgtcctccaacattcaacaacaccagaagcaacattgcggggaaaaacccttgaagaggcaggagggtagagtcccagtgttacgaagctgcaaagtccacttgtccgaaaaatctttacaatcgcgcgaagttggcaaagcgctcctcatcagtagcggtgtcttgaaacaccaagttacccatacaggagaaaagtcgcacagaagtagtaaaagtcgcgaagctttccacgccggcaagaggcattacaaatgcagcgagtgcggcaaagctttcggccagaagtacctcttggtgcagcatcaacgtctgcacgcaggcaaaaagacttatgagtgttctgagtgcggtaagctgttcagagacatgtctaacttatttatccatcaaatcgtgcacacaggcgagcgcccctacggatgttccaattgcgggaaaagctttagtaggaacgcccacctcatagagcaccagagagtgcatactggcgagaagccttttacctgtagcgagtgcggcaaggcgttcagacataacagcaccttagtgcaacaccacaaaatccacaccggcgtgaggccctatgagtgttccgagtgtggcaaactcttttcttttaatagctctttgatgaaacaccagagaatacacacgggcgagagaccttataagtgcagcgaatgcgggaagttttatagtcataagagcaacttgattaagcattggcgggtccatactggagagcgcccttataaatgttcagattgcggcaagttttttacccagtgttcgtccttgatgcaacaccagaaagtacataccggagagaagccctttaagtgcaacgagtgcggcaggtttttcagagagaattccaccctcgtccggcatcagcgggtgcatacgggcgctaagccatatgagtgtagagagtgcggtaaatttttctctcagtcgagcaccctgatgcaacatcgaaaagtccatatcggcgagaagccattcaagtgcaacgagtgcggccgccttttccgagagaatagctcactggtaaaacaccagcgtgtccacacaggcgcaaaaccatacgaatgcagagaatgcggaaaatttttcaggcacaatagtagtctctttaaacacagaagaatccacactggggagatgcagtag

SEQ ID NO: 39057 - DNA, 1290 bp, Artificial Sequence
  derived and/or modified sequence
gaccctgtgcagggctacgtgacctttgaagatgtggccgtgtacttcagccaggaggagtggaggctgctggatgatgcccagaggctgctgtacagaaatgtgatgctggagaacttcaccctgctggccagcctgggcaagcaccctgagctgggcagcgccttcccccccttcccccgggagaggagcctggccgtgtccctgatggacctgatccctgggggcctgtctgtgcagctgagccaccagtgtgactgctgcctgactgtgctcttcctggtgctgcacgtgagccccagccaccagcagaaccccagcgctgtggccttcacagaatgtgtggtggtgggcatggagcggctgctgagcagcaacatccagcagcaccagaagcagcactgtggggagaagcccctgaagaggcaggagggccgggtgcctgtgctgcggagctgcaaggtgcacctgtctgagaagagcctgcagagccgggaggtgggcaaggccctgctgatcagcagtggagtgctgaagcaccaggtgacccacactggagagaagagccacaggagcagcaagagccgggaggccttccacgccggcaagaggcactacaagtgcagtgaatgtgggaaggccttcggccagaagtacctgctggtgcagcaccagaggctgcacactggagagcggccctacggctgcagcaactgtgggaagagcttcagcagaaatgcccacctgattgagcaccagagggtgcacactggagagaagcccttcacctgcagtgaatgtgggaaggccttccgccacaacagcaccctggtgcagcaccacaagatccacactggagtgcggccctatgaatgttctgaatgtgggaagctgttctccttcaacagcagcctgatgaagcaccagaggatccacactggagagcggccctacaagtgcagtgaatgtgggaagttctacagccacaagagcaacctgatcaagcactggagggtgcacactggagagcggccctacaagtgcagcgactgtgggaagttcttcacccagtgcagcagcctgatgcagcaccagaaggtgcacactggagagaagcccttcaagtgcaatgaatgtggccgcttcttccgggagaacagcaccctggtgcgccaccagagggtgcacactggagccaagccctatgaatgtcgggagtgtgggaagttcttcagccagagcagcaccctgatgcagcacaggaaggtgcacatcggggagaagccctag

SEQ ID NO: 39058 - DNA, 1494 bp, Artificial Sequence
  derived and/or modified sequence
atggctgctgctgccctgcgggaccctgcccagggctacgtgacctttgaagatgtggccgtgtacttcagccaggaggagtggaggctgctggatgatgcccagaggctgctgtacagaaatgtgatgctggagaacttcaccctgctggccagcctgggcctggccagcagcaagacccatgagatcacccagctggagagctgggaggagcccttcatgcctgcctgggaggtggtgaccagcgccatcccccggggctgctggcacggggctgaggccgaggaggcccctgagcagatcgcctctgtgggcctgctgagcagcaacatccagcagcaccagaagcagcactgtggggagaagcccctgaagaggcaggagggccgggtgcctgtgctgcggagctgcaaggtgcacctgtctgagaagagcctgcagagccgggaggtgggcaaggccctgctgatcagcagtggagtgctgaagcaccaggtgacccacactggagagaagagccacaggagcagcaagagccgggaggccttccacgccggcaagaggcactacaagtgcagtgaatgtgggaaggccttcggccagaagtacctgctggtgcagcaccagaggctgcatgctgggaagaagacctatgaatgttctgaatgtgggaagctgttccgggacatgagcaacctcttcatccaccagatcgtgcacactggagagcggccctacggctgcagcaactgtgggaagagcttcagcagaaatgcccacctgattgagcaccagagggtgcacactggagagaagcccttcacctgcagtgaatgtgggaaggccttccgccacaacagcaccctggtgcagcaccacaagatccacactggagtgcggccctatgaatgttctgaatgtgggaagctgttctccttcaacagcagcctgatgaagcaccagaggatccacactggagagcggccctacaagtgcagtgaatgtgggaagttctacagccacaagagcaacctgatcaagcactggagggtgcacactggagagcggccctacaagtgcagcgactgtgggaagttcttcacccagtgcagcagcctgatgcagcaccagaaggtgcacactggagagaagcccttcaagtgcaatgaatgtggccgcttcttccgggagaacagcaccctggtgcgccaccagagggtgcacactggagccaagccctatgaatgtcgggagtgtgggaagttcttcagccagagcagcaccctgatgcagcacaggaaggtgcacatcggggagaagcccttcaagtgcaatgaatgtggccgcctcttccgggagaacagcagcctggtgaagcaccagagggtgcacactggagccaagccctatgaatgtcgggagtgtgggaagttcttccgccacaacagcagcctcttcaagcaccggcgcatccacactggagagatgcagtag

SEQ ID NO: 39059 - DNA, 1290 bp, Artificial Sequence
  derived and/or modified sequence
gaccccgtgcagggctacgtgaccttcgaggacgtggccgtgtacttctctcaggaagagtggaggctccttgacgatgctcagaggttattataccgaaatgtcatgcttgaaaacttcaccttgttggcttccctcggaaaacaccccgaactgggatcagccttcccaccctttcctcgagagagatccctcgcagtcagcctcatggatctgattccgggaggcctgagtgtccagctgtcccatcagtgcgactgttgtttgaccgtgttgtttctggtgctacacgtgagcccttcccatcaacagaacccatcggcagtggcttttactgagtgtgtcgttgtagggatggaaaggctgctgagcagcaacattcagcagcaccaaaaacaacattgcggagagaagcctctcaagcgccaagagggccgagtgccagtgctccgctcttgcaaagtgcacttgagcgaaaaatccctgcagagtcgagaggtgggcaaggctctgctaatttcgagtggcgttctgaagcatcaagtcacacataccggcgaaaagagtcaccgatctagcaagtcacgagaggcgttccacgccggcaagcgacactacaaatgttccgaatgcgggaaagcctttggacagaagtacctactagtgcagcatcagcgactccacaccggagagcggccgtatggctgttccaattgtggaaagtctttctctaggaatgcccacctcatcgaacaccagcgagtccacactggggaaaaacctttcacctgtagtgagtgcggaaaagccttcagacataattctaccctggtacaacatcataagatccacaccggtgttcgaccctacgaatgtagcgaatgtggaaaacttttcagctttaatagcagcctgatgaagcaccagcgcatccatacaggtgagcgcccttacaaatgttccgagtgtgggaagttttactcacacaagtcaaacttaatcaagcattggcgggtgcacaccggggagcgcccatataagtgcagtgattgcggcaaatttttcacccaatgctcctcgctcatgcagcaccagaaggtacatacaggtgaaaagccattcaaatgcaacgagtgcggcaggttcttcagggaaaatagcaccctcgtacgccatcaaagggttcataccggtgccaagccctacgagtgcagggagtgcggtaaatttttcagccaatcgagtacattgatgcaacaccggaaagtgcacataggcgagaaaccctag

SEQ ID NO: 39060 - DNA, 1494 bp, Artificial Sequence
  derived and/or modified sequence
atggccgccgccgccctgcgggaccccgcccagggctacgtgacctttgaagatgtcgccgtgtatttcagtcaagaagagtggcgcctgctcgacgacgcccagcgtctgctttaccggaatgtaatgcttgagaattttacactgctggcctcactaggtctcgcgtcttcaaaaacacacgagataacgcagctggagtcctgggaggagcccttcatgcctgcctgggaggtcgtgactagtgcaataccgcgaggatgttggcacggtgctgaggcagaagaggctccagagcagattgcttcagtgggacttttgtcatctaacatacaacagcaccagaaacaacactgtggggagaagcctttaaaaaggcaggaaggccgcgtgcccgttttgaggtcttgtaaagtccacttgtccgagaaaagtttgcagagcagggaggttgggaaggccctgctcatttcttccggtgtcctgaaacaccaggtgacccacacaggggaaaagtcccacaggagcagcaagtcccgcgaggcctttcacgctggaaagcggcactacaagtgcagcgagtgtggaaaggcttttggacagaagtacctgttggttcaacaccagcgcttacatgctggaaaaaagacttacgagtgctctgagtgcgggaaactgttccgcgacatgtcaaatctgttcattcaccaaattgtgcacacaggtgagagaccgtacggatgttcaaattgtgggaaatccttctctagaaacgcacacctgattgaacaccagcgagtccacaccggcgagaaaccgtttacttgctcagagtgtgggaaggcgtttagacataacagtaccctggtgcaacaccacaaaatacacactggtgtgcgtccatatgagtgctctgaatgtggtaaactcttttcctttaacagctcactaatgaaacaccagaggattcatacgggagagaggccctacaaatgtagtgagtgtggaaagttctacagccataaaagcaacctcatcaagcattggcgggtccatactggtgaacggccctacaaatgctccgattgcggaaagttcttcactcaatgcagtagcctgatgcaacaccagaaggtgcacacaggcgaaaagcctttcaaatgcaacgagtgtgggaggttcttccgagagaatagtaccctggtgagacaccaacgcgtccacacgggggccaaaccctatgagtgccgggagtgcggcaaatttttcagtcagagctccactctgatgcagcaccgaaaggtgcatattggagaaaagccattcaaatgtaacgagtgtgggcggctgttcagagagaactcttcactagtgaagcaccagcgcgtccacactggtgccaaaccctatgagtgccgtgaatgtggtaaatttttcagacacaactctagcttgttcaagcatcgtaggatccacaccggcgagatgcaatag

SEQ ID NO: 39061 - DNA, 1290 bp, Artificial Sequence
  derived and/or modified sequence
gatcctgtacaggggtatgtgacttttgaggatgtcgctgtttacttcagtcaggaggaatggcgcttgttggacgatgcccagcgtctactgtacaggaatgtcatgttggaaaactttaccctgctggccagcctcggcaaacacccagaactcggatcagctttcccacctttccccagagaaaggtctcttgcggtgagcctgatggacctgattcccggtggcctctccgtgcagctcagccaccagtgcgattgttgtctgaccgtgctatttctggtgctgcacgtgtcgcccagtcaccagcagaatccttcagctgtcgcctttaccgagtgcgtcgtagtgggcatggaacgacttctcagtagtaatatccagcagcaccagaagcagcactgtggcgaaaaacctttaaaaagacaagagggtagggtcccagtgctgagaagctgtaaagtgcacttgtctgaaaagagtctccagtctcgtgaggtgggaaaagccctgttaattagctctggtgtgctgaaacatcaggtgacacacacgggggagaagtcccacaggagctctaaaagcagggaagcgtttcatgcaggcaaaagacactacaagtgctcggagtgcggaaaagcgttcggacaaaaatatcttctggtgcagcaccagcgcctccacacaggcgagagaccatacggctgcagtaactgtggcaaatcgttctccagaaacgcccatttaattgaacatcaacgcgtgcatacgggggaaaagcccttcacatgtagcgagtgcggcaaggcattcagacacaattcgactctggtgcaacatcacaaaattcataccggagtgcggccatatgaatgcagcgaatgcggaaagttatttagcttcaacagcagtcttatgaaacatcagagaattcacacgggagagcgaccctataagtgctccgagtgtggtaagttctactcgcataaaagcaatctgatcaagcattggcgagttcataccggagaaagaccttacaagtgcagcgattgcggcaagttttttacacagtgcagtagcttgatgcagcatcagaaggtacatacgggggaaaagccttttaagtgcaacgaatgcggtagattcttccgggagaattccacattggtgcggcaccagagagtgcataccggcgcaaaaccatatgagtgtcgggagtgcgggaaatttttctcccaatctagcacccttatgcaacaccgcaaggttcacatcggcgagaagccttag

SEQ ID NO: 39062 - DNA, 1494 bp, Artificial Sequence
  derived and/or modified sequence
atggcagccgctgccctacgggacccagcccaggggtacgtaacgtttgaagatgttgcagtgtacttcagtcaggaggaatggcgcctgctcgacgacgcccagagactcctttaccgcaacgtgatgttggaaaattttacgctacttgcttcactgggcctggccagctccaaaacccatgaaattactcagctagagtcttgggaggaaccatttatgcccgcatgggaagttgtgacatccgcaatccccagaggctgttggcacggtgccgaggccgaagaggcaccagagcagatcgcctctgttgggttgctgtcgtctaacattcagcagcaccagaagcagcactgcggagagaagcctttgaagcgccaggaagggagagtgccagtccttaggtcctgcaaagtgcatctctcagagaaatctcttcagtctagggaggtgggcaaggcactgctgatcagttcaggcgtgctcaaacatcaagttacccacactggcgagaagagccaccgcagcagcaaatctcgtgaagccttccacgccggaaagcggcactataagtgctccgagtgtggtaaagctttcggccagaaatacctgctggtgcagcaccagcggctgcacgcgggaaagaagacgtacgaatgctcggaatgcggcaagctgttccgcgatatgagcaacttgttcatacaccagatcgttcacaccggagaacgcccatacgggtgctccaattgcggtaagagtttctctagaaacgcacatttgattgaacaccagagagtgcataccggcgaaaagccatttacttgctccgagtgcgggaaagcctttcgccacaactccactcttgttcagcaccataagatccacactggcgtacgcccatatgaatgcagtgaatgcggtaagttattcagcttcaactccagcctgatgaagcaccagaggattcacaccggagagagaccgtataagtgcagcgaatgcggaaaattttatagccataagagcaacttaataaagcactggcgggtacacaccggtgagcgaccttacaagtgcagcgattgcggtaagttcttcacccaatgttctagcctaatgcagcaccagaaagtgcacaccggcgaaaaacctttcaagtgcaatgaatgtggcagattctttcgcgagaatagtactctggttaggcatcagagagttcacaccggagccaaaccttatgagtgcagggaatgtggaaagttcttctcccagagctccactctcatgcagcaccgcaaagtgcacattggggagaaaccttttaagtgtaacgaatgcggcagactgtttagagaaaactcctccttagtgaagcaccagagggtgcacaccggggctaagccatacgagtgtcgcgaatgcgggaaattcttccggcacaactcctccctttttaaacataggcgaattcacactggggaaatgcagtag

SEQ ID NO: 39063 - DNA, 1287 bp, Artificial Sequence
  derived and/or modified sequence
gacccagtccaaggctatgtgacctttgaggatgtggctgtctacttctcccaggaggaatggagattgcttgatgacgctcagaggctcctctaccgcaatgtgatgctggagaactttacacttctggcctctctgggtaagcatcctgagctgggctcggcttttcctccttttcctagggagaggagtcttgcagtcagcttgatggatcttatccctggtggcctctctgtgcaattgagtcaccaatgtgattgctgtttgactgtgttgttccttgtcctccatgtttcacccagtcatcagcagaacccttcagcagtggctttcactgaatgtgtggttgttggcatggagcgactgctcagttcaaacattcagcaacaccagaagcagcactgtggagagaaacccttaaaaagacaagagggcagggtcccagttttgaggagttgcaaagttcacctatcagagaagtccttgcaaagcagggaggttgggaaggccctcctgatcagctcaggtgttctcaagcaccaggtgactcacacaggagagaagtcacataggagctccaaaagtagggaggcctttcatgctggaaaaaggcattacaaatgcagtgaatgtgggaaagcctttggtcagaaatatttacttgttcagcaccagagactacatactggagaaaggccttacgggtgtagtaactgtggaaaatcctttagccgtaatgctcacctcattgaacaccagagagttcacactggagaaaagccttttacatgcagtgaatgtggaaaagctttcaggcataattccacacttgttcagcatcacaaaatccacactggagtaaggccttatgagtgcagtgaatgtggaaaattgtttagtttcaactccagcctcatgaaacatcagagaattcacactggagaaagaccttataagtgcagtgaatgtggaaaattctatagccacaagtccaaccttatcaaacattggcgtgttcatactggagaaaggccttacaagtgcagcgactgtgggaaattttttacccaatgctcaagcctcatgcaacatcaaaaagttcacactggagaaaagccttttaagtgcaatgaatgtgggagattctttagagagaattccaccctagttagacatcagagggttcacactggagcaaagccttatgagtgcagggaatgtgggaaattttttagccaaagctcaaccctcatgcaacatcgaaaagttcacattggagaaaagcct

SEQ ID NO: 39064 - DNA, 1569 bp, Artificial Sequence
  derived and/or modified sequence
gtgcgacacgcaatgggcgggacttccggcgtctcgtttggtattcactttcgcgactcaggtgaactaacctgcgagaagctggttgtgcgctgaggcgaccagcgccggaaggcacggtggcgactcacgctgttctcgccgctcagaggcgggtctgaggctcggtggcggcgcccagggtggcccgggccctttcctcggtcattgtctcccctccagctctactcacaggctccgatggcggcggccgccctgagggaccccgctcagcagggctatgtgacctttgaggatgtggctgtctacttctcccaggaggaatggagattgcttgatgacgctcagaggctcctctaccgcaatgtgatgctggagaactttacacttctggcctctctgggacttgcatcttccaagacccatgaaataacccagctggagtcatgggaggagcccttcatgcctgcttgggaagttgtgacttcagccataccgagaggttgttggcatggagccgaggctgaggaggctcctgagcagattgcttctgtaggactgctcagttcaaacattcagcaacaccagaagcagcactgtggagagaaacccttaaaaagacaagagggcagggtcccagttttgaggagttgcaaagttcacctatcagagaagtccttgcaaagcagggaggttgggaaggccctcctgatcagctcaggtgttctcaagcaccaggtgactcacacaggagagaagtcacataggagctccaaaagtagggaggcctttcatgctggaaaaaggcattacaaatgcagtgaatgtgggaaagcctttggtcagaaatatttacttgttcagcaccagagactacatgctgggaaaaagacgtatgaatgcagtgaatgtgggaagttatttagagatatgtccaacctttttatacaccaaatagttcacactggagaaaggccttacgggtgtagtaactgtggaaaatcctttagccgtaatgctcacctcattgaacaccagagagttcacactggagaaaagccttttacatgcagtgaatgtggaaaagctttcaggcataattccacacttgttcagcatcacaaaatccacactggagtaaggccttatgagtgcagtgaatgtggaaaattgtttagtttcaactccagcctcatgaaacatcagagaattcacactggagaaagaccttataagtgcagtgaatgtggaaaattctatagccacaagtccaaccttatcaaacattggcgtgttcatactggagaaaggccttacaagtgcagcgactgtgggaaattttttacccaatgctcaagcctcatgcaacatcaaaaagttcacactggagaaaagccttttaagtgcaatgaatgtgggagattctttagagagaattccagccttgttaaacatcagagggttcacactggagcaaagccttatgagtgcagggaatgtgggaagttttttcgccacaactccagtctttttaaacatcgaaggattcacactggagaaatgcagtga

SEQ ID NO: 39065 - DNA, 2327 bp, Artificial Sequence
  derived and/or modified sequence
gtgcgacacgcaatgggcgggacttccggcgtctcgtttggtattcactttcgcgactcaggtgaactaacctgcgagaagctggttgtgcgctgaggcgaccagcgccggaaggcacggtggcgactcacgctgttctcgccgctcagaggcgggtctgaggctcggtggcggcgcccagggtggcccgggccctttcctcggtcattgtctcccctccagctctactcacaggctccgatggcggcggccgccctgagggaccccgctcagcagggctatgtgacctttgaggatgtggctgtctacttctcccaggaggaatggagattgcttgatgacgctcagaggctcctctaccgcaatgtgatgctggagaactttacacttctggcctctctgggacttgcatcttccaagacccatgaaataacccagctggagtcatgggaggagcccttcatgcctgcttgggaagttgtgacttcagccataccgagaggttgttggcatggagccgaggctgaggaggctcctgagcagattgcttctgtaggactgctcagttcaaacattcagcaacaccagaagcagcactgtggagagaaacccttaaaaagacaagagggcagggtcccagttttgaggagttgcaaagttcacctatcagagaagtccttgcaaagcagggaggttgggaaggccctcctgatcagctcaggtgttctcaagcaccaggtgactcacacaggagagaagtcacataggagctccaaaagtagggaggcctttcatgctggaaaaaggcattacaaatgcagtgaatgtgggaaagcctttggtcagaaatatttacttgttcagcaccagagactacatgctgggaaaaagacgtatgaatgcagtgaatgtgggaagttatttagagatatgtccaacctttttatacaccaaatagttcacactggagaaaggccttacgggtgtagtaactgtggaaaatcctttagccgtaatgctcacctcattgaacaccagagagttcacactggagaaaagccttttacatgcagtgaatgtggaaaagctttcaggcataattccacacttgttcagcatcacaaaatccacactggagtaaggccttatgagtgcagtgaatgtggaaaattgtttagtttcaactccagcctcatgaaacatcagagaattcacactggagaaagaccttataagtgcagtgaatgtggaaaattctatagccacaagtccaaccttatcaaacattggcgtgttcatactggagaaaggccttacaagtgcagcgactgtgggaaattttttacccaatgctcaagcctcatgcaacatcaaaaagttcacactggagaaaagccttttaagtgcaatgaatgtgggagattctttagagagaattccaccctagttagacatcagagggttcacactggagcaaagccttatgagtgcagggaatgtgggaaattttttagccaaagctcaaccctcatgcaacatcgaaaagttcacattggagaaaagccttttaagtgcaatgaatgtgggagattgtttagagagaattccagccttgttaaacatcagagggttcacactggagcaaagccttatgagtgcagggaatgtgggaagttttttcgccacaactccagtctttttaaacatcgaaggattcacactggagaaatgcagtgattgtgtgaaatcctttagccagcgtttcaacctcattcaacaccagaaagttcacagtggaaaaaatcttgaaggtaacagatggaaatccgttagccacacctccagtctcattcaacactggacagtttacaatgtggacaatgtagtgaatatggaaaaaggtttcagccaaaggcctaaccctattcaacaccagaaagtttacactggagaaaggccttagggtgacaggttatgtactgtctctgaatcaatatgacctcacttaaaacagaaactctgaggatggcctttatgagggagctggcaattgaacatcattcatctaaatatgcacactggaggcaagatgagaattcctgacagattgtccttcctgagaagacagccctctgccttggagctccagagagagggagccctgtattcttggctgtacccgtcgaatggagttttgatctcgctgagtttggagttgggggaggaaaggagtggtcttggttcaaatgtgactcacttttgctgttcttgtgaatgttagatcttctttaataaatatttatttcccatacacccttatgaccatt

SEQ ID NO: 39066 - DNA, 1857 bp, Artificial Sequence
  derived and/or modified sequence
acgcaatgggcgggacttccggcgtctcgtttggtattcactttcgcgactcaggtgaactaacctgcgagaagctggttgtgcgctgaggcgaccagcgccggaaggcacggtggcgactcacgctgttctcgccgctcagaggcgggtctgaggctcggtggcggcgcccagggtggcccgggccctttcctcggtcattgtctcccctccagctctactcacaggctccgatggcggcggccgccctgagggaccccgctcagggctatgtgacctttgaggatgtggctgtctacttctcccaggaggaatggagattgcttgatgacgctcagaggctcctctaccgcaatgtgatgctggagaactttacacttctggcctctctgggacttgcatcttccaagacccatgaaataacccagctggagtcatgggaggagcccttcatgcctgcttgggaagttgtgacttcagccataccgagaggttgttggcatggagccgaggctgaggaggctcctgagcagattgcttctgtaggactgctcagttcaaacattcagcaacaccagaagcagcactgtggagagaaacccttaaaaagacaagagggcagggtcccagttttgaggagttgcaaagttcacctatcagagaagtccttgcaaagcagggaggttgggaaggccctcctgatcagctcaggtgttctcaagcaccaggtgactcacacaggagagaagtcacataggagctccaaaagtagggaggcctttcatgctggaaaaaggcattacaaatgcagtgaatgtgggaaagcctttggtcagaaatatttacttgttcagcaccagagactacatgctgggaaaaagacgtatgaatgcagtgaatgtgggaagttatttagagatatgtccaacctttttatacaccaaatagttcacactggagaaaggccttacgggtgtagtaactgtggaaaatcctttagccgtaatgctcacctcattgaacaccagagagttcacactggagaaaagccttttacatgcagtgaatgtggaaaagctttcaggcataattccacacttgttcagcatcacaaaatccacactggagtaaggccttatgagtgcagtgaatgtggaaaattgtttagtttcaactccagcctcatgaaacatcagagaattcacactggagaaagaccttataagtgcagtgaatgtggaaaattctatagccacaagtccaaccttatcaaacattggcgtgttcatactggagaaaggccttacaagtgcagcgactgtgggaaattttttacccaatgctcaagcctcatgcaacatcaaaaagttcacactggagaaaagccttttaagtgcaatgaatgtgggagattctttagagagaattccaccctagttagacatcagagggttcacactggagcaaagccttatgagtgcagggaatgtgggaaattttttagccaaagctcaaccctcatgcaacatcgaaaagttcacattggagaaaagccttttaagtgcaatgaatgtgggagattgtttagagagaattccagccttgttaaacatcagagggttcacactggagcaaagccttatgagtgcagggaatgtgggaagttttttcgccacaactccagtctttttaaacatcgaaggattcacactggagaaatgcagtgattgtgtgaaatcctttagccagcgtttcaacctcattcaacaccagaaagttcacagtggaaaaaatcttgaaggtaacagatggaaatccgttagccacacctccagtctcattcaacactggacagtt

SEQ ID NO: 39067 - DNA, 646 bp, Artificial Sequence
  derived and/or modified sequence
gtgcgacacgcaatgggcgggacttccggcgtctcgtttggtattcactttcgcgactcaggtgaactaacctgcgagaagctggttgtgcgctgaggcgaccagcgccggaaggcacggtggcgactcacgctgttctcgccgctcagaggcgggtctgaggctcggtggcggcgcccagggtggcccgggccctttcctcggtcattgtctcccctccagctctactcacaggctccgatggcggcggccgccctgagggaccccgctcagcagggctatgtgacctttgaggatgtggctgtctacttctcccaggaggaatggagattgcttgatgacgctcagaggctcctctaccgcaatgtgatgctggagaactttacacttctggcctctctgggacttgcatcttccaagacccatgaaataacccagctggagtcatgggaggagcccttcatgcctgcttgggaagttgtgacttcagccataccgagaggttgttggcatggagccgaggctgaggaggctcctgagcagattgcttctgtaggactgctcagttcaaacattcagcaacaccagaagcagcactgtggagagaaacccttaaaaagacaagagggcagggtcccagttttga

SEQ ID NO: 39068 - protein, 478 aa, Artificial Sequence
  derived and/or modified sequence
MAAAALRDPAQVPVAADLLTDHEEQGYVTFEDVAVYFSQEEWRLLDDAQRLLYRNVMLENFTLLASLGCWHGAEAEEAPEQIASVGLLSSNIQQHQKQHCGEKPLKRQEGRVPVLRSCKVHLSEKSLQSREVGKALLISSGVLKHQVTHTGEKSHRSSKSREAFHAGKRHYKCSECGKAFGQKYLLVQHQRLHAGKKTYECSECGKLFRDMSNLFIHQIVHTGERPYGCSNCGKSFSRNAHLIEHQRVHTGEKPFTCSECGKAFRHNSTLVQHHKIHTGVRPYECSECGKLFSFNSSLMKHQRIHTGERPYKCSECGKFYSHKSNLIKHWRVHTGERPYKCSDCGKFFTQCSSLMQHQKVHTGEKPFKCNECGRFFRENSTLVRHQRVHTGAKPYECRECGKFFSQSSTLMQHRKVHIGEKPFKCNECGRLFRENSSLVKHQRVHTGAKPYECRECGKFFRHNSSLFKHRRIHTGEMQ

SEQ ID NO: 39069 - DNA, 1437 bp, Artificial Sequence
  derived and/or modified sequence
atggccgccgccgccctgagagaccccgcccaggtgcccgtggccgccgacctgctgaccgaccacgaggagcagggctacgtgaccttcgaggacgtggccgtgtacttcagccaggaggagtggagactgctggacgacgcccagagactgctgtacagaaacgtgatgctggagaacttcaccctgctggccagcctgggctgctggcacggcgccgaggccgaggaggcccccgagcagatcgccagcgtgggcctgctgagcagcaacatccagcagcaccagaagcagcactgcggcgagaagcccctgaagagacaggagggcagagtgcccgtgctgagaagctgcaaggtgcacctgagcgagaagagcctgcagagcagagaggtgggcaaggccctgctgatcagcagcggcgtgctgaagcaccaggtgacccacaccggcgagaagagccacagaagcagcaagagcagagaggccttccacgccggcaagagacactacaagtgcagcgagtgcggcaaggccttcggccagaagtacctgctggtgcagcaccagagactgcacgccggcaagaagacctacgagtgcagcgagtgcggcaagctgttcagagacatgagcaacctgttcatccaccagatcgtgcacaccggcgagagaccctacggctgcagcaactgcggcaagagcttcagcagaaacgcccacctgatcgagcaccagagagtgcacaccggcgagaagcccttcacctgcagcgagtgcggcaaggccttcagacacaacagcaccctggtgcagcaccacaagatccacaccggcgtgagaccctacgagtgcagcgagtgcggcaagctgttcagcttcaacagcagcctgatgaagcaccagagaatccacaccggcgagagaccctacaagtgcagcgagtgcggcaagttctacagccacaagagcaacctgatcaagcactggagagtgcacaccggcgagagaccctacaagtgcagcgactgcggcaagttcttcacccagtgcagcagcctgatgcagcaccagaaggtgcacaccggcgagaagcccttcaagtgcaacgagtgcggcagattcttcagagagaacagcaccctggtgagacaccagagagtgcacaccggcgccaagccctacgagtgcagagagtgcggcaagttcttcagccagagcagcaccctgatgcagcacagaaaggtgcacatcggcgagaagcccttcaagtgcaacgagtgcggcagactgttcagagagaacagcagcctggtgaagcaccagagagtgcacaccggcgccaagccctacgagtgcagagagtgcggcaagttcttcagacacaacagcagcctgttcaagcacagaagaatccacaccggcgagatgcagtag

SEQ ID NO: 39070 - DNA, 1437 bp, Artificial Sequence
  derived and/or modified sequence
atggctgcagcggctcttcgagatcccgcccaagtacccgtggccgcggacctactgactgatcacgaagaacagggttacgtgaccttcgaagacgtggccgtgtacttttctcaggaagaatggcgcctgctggatgacgcgcagcgactgttgtatcgcaacgtaatgctggaaaactttacccttctagcatcactgggctgctggcacggggctgaggctgaagaagcaccggagcagatcgccagcgtgggcctgctctctagcaacattcagcaacaccagaagcaacactgcggcgagaagcccctcaagagacaagaaggacgagtaccggtgttgcggagttgtaaagtacacttatctgagaagtcattgcagtctagggaggtaggaaaagcactcctgatatcatctggagtccttaaacaccaggtgacccatactggggagaaatcacaccgcagttctaagagtcgggaggcttttcatgccggaaaacgtcactacaagtgctctgagtgtggcaaggcgttcgggcagaagtatttactggtgcagcatcagagactgcatgctggcaagaaaacctatgagtgctccgaatgtggcaagctctttcgggacatgtccaacttgtttatccaccagatcgtgcacacaggcgaaaggccctacggttgctcgaactgcgggaagtccttcagccgcaatgcacatctgatagaacaccagagagtgcacactggcgagaagcctttcacgtgcagcgaatgcggtaaggcttttcgtcataattcaaccctggtgcagcaccacaagatccatacaggggtgagaccttatgagtgtagtgagtgtgggaagctgttctcatttaacagtagcctcatgaaacatcagcggattcacaccggcgagcggccctataaatgctccgaatgtgggaaattctattcgcataagtccaatttgattaaacactggagagtgcacaccggggagaggccttataagtgttccgattgtgggaagttcttcacacagtgcagctcattgatgcagcaccagaaggtacacaccggcgagaaaccatttaagtgtaatgagtgtgggaggttttttcgtgagaattcaaccctcgtgcgacaccagagagtgcacacaggggcaaaaccctacgaatgccgagaatgtgggaagttcttttctcagagtagtaccctgatgcagcacaggaaagtgcatatcggagaaaaaccattcaagtgcaacgaatgcggaaggttgttccgcgaaaactcctcgctcgtgaagcaccagcgagtgcacacaggcgccaaaccttatgaatgccgtgaatgcgggaaattcttccggcataattcttccctgtttaaacacaggcgtattcacaccggggagatgcagtag

SEQ ID NO: 39071 - DNA, 1437 bp, Artificial Sequence
  derived and/or modified sequence
atggctgctgctgccctgcgggaccctgcccaggtgcctgtggccgctgacctgctgacagaccacgaggagcagggctacgtgacctttgaagatgtggccgtgtacttcagccaggaggagtggaggctgctggatgatgcccagaggctgctgtacagaaatgtgatgctggagaacttcaccctgctggccagcctgggctgctggcatggagctgaggccgaggaggcccctgagcagatcgcctctgtgggcctgctgagcagcaacatccagcagcaccagaagcagcactgtggggagaagcccctgaagaggcaggagggccgggtgcctgtgctgcggagctgcaaggtgcacctgtctgagaagagcctgcagagccgggaggtgggcaaggccctgctgatcagcagcggcgtgctgaagcaccaggtgacccacactggagagaagagccacaggagcagcaagagccgggaggccttccacgccggcaagaggcactacaagtgcagtgaatgtgggaaggccttcggccagaagtacctgctggtgcagcaccagaggctgcacgccggcaagaagacctatgagtgcagtgaatgtgggaagctgttccgggacatgagcaacctcttcatccaccagatcgtgcacactggagagcggccctacggctgcagcaactgtgggaagagcttcagcagaaatgcccacctgattgagcaccagagggtgcacactggagagaagcccttcacctgcagtgaatgtgggaaggccttccgccacaacagcaccctggtgcagcaccacaagatccacactggagtgcggccctatgagtgcagtgaatgtgggaagctgttctccttcaacagcagcctgatgaagcaccagaggatccacactggagagcggccctacaagtgcagtgaatgtgggaagttctacagccacaagagcaacctgatcaagcactggagggtgcacactggagagcggccctacaagtgcagcgactgtgggaagttcttcacccagtgcagcagcctgatgcagcaccagaaggtgcacactggagagaagcccttcaagtgcaatgaatgtggccgcttcttccgggagaacagcaccctggtgcgccaccagagggtgcacactggagccaagccctatgagtgcagagaatgtgggaagttcttcagccagagcagcaccctgatgcagcacaggaaggtgcacatcggggagaagcccttcaagtgcaatgaatgtggccgcctcttccgggagaacagcagcctggtgaagcaccagagggtgcacactggagccaagccctatgagtgcagagaatgtgggaagttcttccgccacaacagcagcctcttcaagcaccggcgcatccacactggagagatgcagtag

SEQ ID NO: 39072 - DNA, 1437 bp, Artificial Sequence
  derived and/or modified sequence
atggccgccgccgccctgcgggaccccgcccaggtgcccgtggccgccgacttgttgactgatcacgaggaacagggctacgtgacttttgaggacgtagccgtctatttcagccaggaggagtggagattactggacgatgctcagcgtcttttgtatagaaatgtgatgctggaaaacttcactctgctcgcttccctgggttgttggcatggtgccgaagctgaagaggcacctgaacaaattgctagcgtcggactgttaagcagtaacatccagcagcatcagaagcagcactgcggagaaaaaccacttaaacggcaggagggccgcgttccagtcctcaggtcttgcaaggtgcacttatctgagaagtcactgcagtctcgtgaggtgggtaaagcactcctgatcagtagcggggttttaaagcaccaagtcactcataccggggagaagtcgcacaggtcgtctaagtcacgcgaggcctttcacgctgggaaaaggcattataaatgctctgaatgtggaaaggcctttggtcagaagtatctgttagtacagcatcaacggctgcatgcaggcaagaagacgtatgagtgcagtgagtgtggcaagctttttcgagatatgagcaacctgttcatacaccagatcgttcataccggggaacggccctacgggtgcagcaattgtgggaaatctttctcgaggaacgcgcacctgattgagcatcagagagtgcacacaggggaaaagccttttacgtgcagtgaatgtggaaaggccttcaggcacaatagcactctggttcagcatcacaagattcacaccggcgtcagaccatatgagtgcagtgagtgcggcaagctgttttctttcaacagctctctgatgaaacatcagcggatccacacaggagaaaggccttacaaatgttccgagtgtggcaagttttatagtcacaagtcaaatctaattaaacattggcgggtgcacacaggcgaacggccatacaaatgcagcgattgcggtaagttctttacccagtgcagttcactcatgcaacatcagaaagtccacaccggggagaaaccgtttaaatgtaatgagtgtggccggttctttagggaaaattctacactggtgcgccaccagcgggtgcacacaggtgctaaaccctatgagtgtagagaatgtggcaagtttttttcccagtcatctacactgatgcaacaccgaaaagtccacatcggggagaaacccttcaagtgcaatgagtgtggacgcctgtttcgcgaaaactccagtctcgtcaagcaccagcgagtccacacaggggccaaaccatacgagtgtagggaatgtggcaaattcttccggcataacagctctctcttcaagcaccggcggatccacaccggggagatgcagtag

SEQ ID NO: 39073 - DNA, 1437 bp, Artificial Sequence
  derived and/or modified sequence
atggcagccgctgccttgagggatccagcacaagtgcctgtggctgccgatctcctgaccgatcatgaggagcaaggctacgtgacttttgaagacgtcgccgtttacttctcccaggaggagtggaggctgcttgacgatgcacagcggcttttatatcgaaacgtgatgcttgagaattttacactgctggcatccctcggttgttggcacggagccgaggcagaagaggcccctgagcagattgcatctgtgggtttattgagctccaatatacaacaacaccaaaagcagcattgcggagaaaaacctttgaagcgccaggaaggaagggtgccagttctccgcagctgtaaagtacacctctctgaaaagagtctccaatctcgagaggttggaaaggccctgcttatttcatccggcgttctcaagcaccaggtaacccacaccggtgagaaatctcataggtctagcaagagcagggaggcgtttcacgctggcaagagacattacaaatgttcagagtgtggtaaagcgtttggacagaaatacctgctggtgcagcaccagcgcctgcatgccggaaagaagacttacgaatgctcagagtgtgggaaactcttcagggatatgtctaacctttttatccaccagatcgtgcacaccggcgaacgaccatacggctgcagcaactgcggaaagagcttttcgcggaatgcacatctcatcgaacaccaacgcgtccatacaggggaaaagcctttcacttgctccgaatgtgggaaggcctttcggcataattccacactcgtccagcaccacaagatccacaccggagtgaggccatatgaatgctctgaatgtggcaaactcttctcttttaactctagtctgatgaagcaccaaagaatacacacaggggaaagaccatataaatgttccgaatgtgggaagttctactctcacaagtctaacctcattaaacattggagggtccatactggggagaggccatataaatgtagcgattgtggcaaattctttacccagtgttcttccttgatgcagcaccagaaagtccacacgggggagaagccctttaagtgcaacgagtgcggtaggttcttccgggaaaacagcacactcgtccgacaccagcgcgtacacaccggcgcaaagccatatgagtgccgagaatgcggcaagtttttttctcagagctccaccctcatgcagcatagaaaggtgcacataggcgaaaaacctttcaaatgcaatgagtgcggtcgattgttcagagagaacagcagcctcgtgaagcaccagcgcgtacacaccggcgcaaaaccgtatgagtgtcgggagtgcggaaagttctttaggcacaattcaagccttttcaaacaccgtagaatccatacgggagaaatgcagtag

SEQ ID NO: 39074 - DNA, 2221 bp, Artificial Sequence
  derived and/or modified sequence
gtctcgtttggtattcactttcgcgactcaggtgaactaacctgcgagaagctggttgtgcgctgaggcgaccagcgccggaaggcacggtggcgactcacgctgttctcgccgctcagaggcgggtctgaggctcggtggcggcgcccagggtggcccgggccctttcctcggtcattgtctcccctccagctctactcacaggctccgatggcggcggccgccctgagggaccccgctcaggttcctgtggctgcagacttgcttacagaccatgaggagcagggctatgtgacctttgaggatgtggctgtctacttctcccaggaggaatggagattgcttgatgacgctcagaggctcctctaccgcaatgtgatgctggagaactttacacttctggcctctctgggttgttggcatggagccgaggctgaggaggctcctgagcagattgcttctgtaggactgctcagttcaaacattcagcaacaccagaagcagcactgtggagagaaacccttaaaaagacaagagggcagggtcccagttttgaggagttgcaaagttcacctatcagagaagtccttgcaaagcagggaggttgggaaggccctcctgatcagctcaggtgttctcaagcaccaggtgactcacacaggagagaagtcacataggagctccaaaagtagggaggcctttcatgctggaaaaaggcattacaaatgcagtgaatgtgggaaagcctttggtcagaaatatttacttgttcagcaccagagactacatgctgggaaaaagacgtatgaatgcagtgaatgtgggaagttatttagagatatgtccaacctttttatacaccaaatagttcacactggagaaaggccttacgggtgtagtaactgtggaaaatcctttagccgtaatgctcacctcattgaacaccagagagttcacactggagaaaagccttttacatgcagtgaatgtggaaaagctttcaggcataattccacacttgttcagcatcacaaaatccacactggagtaaggccttatgagtgcagtgaatgtggaaaattgtttagtttcaactccagcctcatgaaacatcagagaattcacactggagaaagaccttataagtgcagtgaatgtggaaaattctatagccacaagtccaaccttatcaaacattggcgtgttcatactggagaaaggccttacaagtgcagcgactgtgggaaattttttacccaatgctcaagcctcatgcaacatcaaaaagttcacactggagaaaagccttttaagtgcaatgaatgtgggagattctttagagagaattccaccctagttagacatcagagggttcacactggagcaaagccttatgagtgcagggaatgtgggaaattttttagccaaagctcaaccctcatgcaacatcgaaaagttcacattggagaaaagccttttaagtgcaatgaatgtgggagattgtttagagagaattccagccttgttaaacatcagagggttcacactggagcaaagccttatgagtgcagggaatgtgggaagttttttcgccacaactccagtctttttaaacatcgaaggattcacactggagaaatgcagtgattgtgtgaaatcctttagccagcgtttcaacctcattcaacaccagaaagttcacagtggaaaaaatcttgaaggtaacagatggaaatccgttagccacacctccagtctcattcaacactggacagtttacaatgtggacaatgtagtgaatatggaaaaaggtttcagccaaaggcctaaccctattcaacaccagaaagtttacactggagaaaggccttagggtgacaggttatgtactgtctctgaatcaatatgacctcacttaaaacagaaactctgaggatggcctttatgagggagctggcaattgaacatcattcatctaaatatgcacactggaggcaagatgagaattcctgacagattgtccttcctgagaagacagccctctgccttggagctccagagagagggagccctgtattcttggctgtacccgtcgaatggagttttgatctcgctgagtttggagttgggggaggaaaggagtggtcttggttcaaatgtgactcacttttgctgttcttgtgaatgttagatcttctttaataaatatttatttcccata

SEQ ID NO: 39075 - protein, 121 aa, Artificial Sequence
  derived and/or modified sequence
MAAAALRDPAQQGYVTFEDVAVYFSQEEWRLLDDAQRLLYRNVMLENFTLLASLGCWHGAEAEEAPEQIASVGLLSSNIQQHQKQHCGEKPLKRQEGRVPVLRSCKVHLSEKSLQSREVGK

SEQ ID NO: 39076 - DNA, 366 bp, Artificial Sequence
  derived and/or modified sequence
atggccgccgccgccctgagagaccccgcccagcagggctacgtgaccttcgaggacgtggccgtgtacttcagccaggaggagtggagactgctggacgacgcccagagactgctgtacagaaacgtgatgctggagaacttcaccctgctggccagcctgggctgctggcacggcgccgaggccgaggaggcccccgagcagatcgccagcgtgggcctgctgagcagcaacatccagcagcaccagaagcagcactgcggcgagaagcccctgaagagacaggagggcagagtgcccgtgctgagaagctgcaaggtgcacctgagcgagaagagcctgcagagcagagaggtgggcaagtag

SEQ ID NO: 39077 - DNA, 366 bp, Artificial Sequence
  derived and/or modified sequence
atggcagccgcagctcttcgtgaccctgcccagcagggctacgtgacttttgaggatgtcgccgtttatttcagtcaggaagagtggcggttactggatgatgcacagagactcctctataggaacgtcatgcttgaaaatttcactctccttgcatccctgggttgctggcatggagctgaggccgaggaggcccctgagcagatcgcaagcgtgggcctactatcctccaacatccagcagcaccagaagcagcattgcggagagaagcccctgaagcgccaggagggcagagttcccgtgctgcgctcctgtaaggtgcacttatcagagaaaagcctgcaatctcgagaggtgggaaagtag

SEQ ID NO: 39078 - DNA, 366 bp, Artificial Sequence
  derived and/or modified sequence
atggctgctgctgccctgcgggaccctgcccagcagggctacgtgacctttgaagatgtggccgtgtacttcagccaggaggagtggaggctgctggatgatgcccagaggctgctgtacagaaatgtgatgctggagaacttcaccctgctggccagcctgggctgctggcacggggctgaggccgaggaggcccctgagcagatcgcctctgtgggcctgctgagcagcaacatccagcagcaccagaagcagcactgtggggagaagcccctgaagaggcaggagggccgggtgcctgtgctgcggagctgcaaggtgcacctgtctgagaagagcctgcagagccgggaggtgggcaagtag

SEQ ID NO: 39079 - DNA, 366 bp, Artificial Sequence
  derived and/or modified sequence
atggccgccgccgccctgcgggaccccgcccagcagggctacgtgacatttgaagacgtggccgtctacttctcgcaggaggaatggcgtctgttggatgatgcccagagactactttatcggaatgtaatgctggaaaatttcaccctccttgcaagcctgggctgctggcatggggcagaagcagaggaggcaccggaacagatcgcatcagttggtttgctatcaagcaacattcagcagcaccagaagcagcactgcggcgagaagcctttgaaacggcaggagggcagagtccctgtcctcagatcctgcaaggtccacctatcggaaaaaagcctgcagtcccgagaagtcggaaaatag

SEQ ID NO: 39080 - DNA, 366 bp, Artificial Sequence
  derived and/or modified sequence
atggctgctgccgcacttcgcgacccagcgcagcagggctatgttacctttgaggacgttgctgtctatttcagtcaggaagaatggcgcctgctggatgatgcccagcggctcctgtaccggaacgttatgctagaaaacttcactcttttggcgagcctaggatgctggcatggtgcagaagctgaggaggctccagagcagattgcttcggttggccttctctcctcaaatatccaacagcaccaaaagcaacactgtggagagaagcctctcaaacggcaggagggtcgagtgcccgtgctcaggagctgtaaagtacatttgtctgaaaagtcactgcaaagtagagaagtggggaagtag

SEQ ID NO: 39081 - protein, 464 aa, Artificial Sequence
  derived and/or modified sequence
MAAAALRDPAQGYVTFEDVAVYFSQEEWRLLDDAQRLLYRNVMLENFTLLASLGCWHGAEAEEAPEQIASVGLLSSNIQQHQKQHCGEKPLKRQEGRVPVLRSCKVHLSEKSLQSREVGKALLISSGVLKHQVTHTGEKSHRSSKSREAFHAGKRHYKCSECGKAFGQKYLLVQHQRLHAGKKTYECSECGKLFRDMSNLFIHQIVHTGERPYGCSNCGKSFSRNAHLIEHQRVHTGEKPFTCSECGKAFRHNSTLVQHHKIHTGVRPYECSECGKLFSFNSSLMKHQRIHTGERPYKCSECGKFYSHKSNLIKHWRVHTGERPYKCSDCGKFFTQCSSLMQHQKVHTGEKPFKCNECGRFFRENSTLVRHQRVHTGAKPYECRECGKFFSQSSTLMQHRKVHIGEKPFKCNECGRLFRENSSLVKHQRVHTGAKPYECRECGKFFRHNSSLFKHRRIHTGEMQ

SEQ ID NO: 39082 - DNA, 1395 bp, Artificial Sequence
  derived and/or modified sequence
atggccgccgccgccctgagagaccccgcccagggctacgtgaccttcgaggacgtggccgtgtacttcagccaggaggagtggagactgctggacgacgcccagagactgctgtacagaaacgtgatgctggagaacttcaccctgctggccagcctgggctgctggcacggcgccgaggccgaggaggcccccgagcagatcgccagcgtgggcctgctgagcagcaacatccagcagcaccagaagcagcactgcggcgagaagcccctgaagagacaggagggcagagtgcccgtgctgagaagctgcaaggtgcacctgagcgagaagagcctgcagagcagagaggtgggcaaggccctgctgatcagcagcggcgtgctgaagcaccaggtgacccacaccggcgagaagagccacagaagcagcaagagcagagaggccttccacgccggcaagagacactacaagtgcagcgagtgcggcaaggccttcggccagaagtacctgctggtgcagcaccagagactgcacgccggcaagaagacctacgagtgcagcgagtgcggcaagctgttcagagacatgagcaacctgttcatccaccagatcgtgcacaccggcgagagaccctacggctgcagcaactgcggcaagagcttcagcagaaacgcccacctgatcgagcaccagagagtgcacaccggcgagaagcccttcacctgcagcgagtgcggcaaggccttcagacacaacagcaccctggtgcagcaccacaagatccacaccggcgtgagaccctacgagtgcagcgagtgcggcaagctgttcagcttcaacagcagcctgatgaagcaccagagaatccacaccggcgagagaccctacaagtgcagcgagtgcggcaagttctacagccacaagagcaacctgatcaagcactggagagtgcacaccggcgagagaccctacaagtgcagcgactgcggcaagttcttcacccagtgcagcagcctgatgcagcaccagaaggtgcacaccggcgagaagcccttcaagtgcaacgagtgcggcagattcttcagagagaacagcaccctggtgagacaccagagagtgcacaccggcgccaagccctacgagtgcagagagtgcggcaagttcttcagccagagcagcaccctgatgcagcacagaaaggtgcacatcggcgagaagcccttcaagtgcaacgagtgcggcagactgttcagagagaacagcagcctggtgaagcaccagagagtgcacaccggcgccaagccctacgagtgcagagagtgcggcaagttcttcagacacaacagcagcctgttcaagcacagaagaatccacaccggcgagatgcagtag

SEQ ID NO: 39083 - DNA, 1395 bp, Artificial Sequence
  derived and/or modified sequence
atggcagcagccgcccttcgggatcctgcccagggctatgtcacatttgaggatgttgcggtatacttcagtcaagaggagtggcgcctactcgatgacgcccagcgccttctctatagaaacgtaatgctggaaaattttaccctgctggcatccctcgggtgctggcatggcgcggaagcagaggaagcacccgaacagattgcctccgtcgggctcttgtcatcaaatattcagcagcaccagaaacaacattgtggggaaaaaccactgaagaggcaggaaggacgggttccggtattacgtagctgcaaggttcatctctctgagaagagtctccagtcacgtgaagtcggaaaagcgcttcttatttcgagcggggtactgaaacaccaggtgacacacaccggcgagaagtctcaccggtcttctaagagcagggaggccttccacgcggggaagagacattacaagtgctcagagtgtggtaaagcctttggacagaaataccttctcgtacagcaccagaggctccatgccgggaaaaaaacatacgaatgctccgaatgtggcaaactttttagggacatgtccaacctgttcattcaccagatcgttcataccggagagaggccatacggatgctctaactgtggaaaatctttttcccggaacgctcatctgattgagcaccaaagagtgcataccggcgagaagccattcacctgttctgagtgcgggaaggcattcaggcataattctaccctggttcaacaccataagatccataccggcgtccggccttatgagtgcagcgagtgcggcaagctgtttagttttaattcatcccttatgaagcaccagagaattcacactggggagcgaccgtacaagtgttccgagtgtggtaaattctatagccacaaatccaatcttatcaagcactggcgagtgcacactggcgagcggccctacaagtgttccgattgtggtaaattttttactcagtgctcatccttgatgcaacaccagaaggttcacaccggcgagaagcccttcaaatgtaatgaatgtggccgttttttcagggagaactcaacactagttagacatcagcgggttcataccggcgccaagccctatgagtgtcgtgaatgtggtaagtttttttctcagtcatcgactctcatgcagcatcgcaaggttcatatcggcgagaaaccatttaagtgcaatgagtgtggcaggctgttccgggaaaattctagcttggttaaacaccagagagtgcacacgggcgcaaagccctatgagtgtcgcgagtgtgggaagttcttccgacataactcttccctgtttaagcaccgaagaattcacacaggtgaaatgcagtag

SEQ ID NO: 39084 - DNA, 1395 bp, Artificial Sequence
  derived and/or modified sequence
atggctgctgctgccctgcgggaccctgcccagggctacgtgacctttgaagatgtggccgtgtacttcagccaggaggagtggaggctgctggatgatgcccagaggctgctgtacagaaatgtgatgctggagaacttcaccctgctggccagcctgggctgctggcatggagctgaggccgaggaggcccctgagcagatcgcctctgtgggcctgctgagcagcaacatccagcagcaccagaagcagcactgtggggagaagcccctgaagaggcaggagggccgggtgcctgtgctgcggagctgcaaggtgcacctgtctgagaagagcctgcagagccgggaggtgggcaaggccctgctgatcagcagcggcgtgctgaagcaccaggtgacccacactggagagaagagccacaggagcagcaagagccgggaggccttccacgccggcaagaggcactacaagtgcagtgaatgtgggaaggccttcggccagaagtacctgctggtgcagcaccagaggctgcacgccggcaagaagacctatgagtgcagtgaatgtgggaagctgttccgggacatgagcaacctcttcatccaccagatcgtgcacactggagagcggccctacggctgcagcaactgtgggaagagcttcagcagaaatgcccacctgattgagcaccagagggtgcacactggagagaagcccttcacctgcagtgaatgtgggaaggccttccgccacaacagcaccctggtgcagcaccacaagatccacactggagtgcggccctatgagtgcagtgaatgtgggaagctgttctccttcaacagcagcctgatgaagcaccagaggatccacactggagagcggccctacaagtgcagtgaatgtgggaagttctacagccacaagagcaacctgatcaagcactggagggtgcacactggagagcggccctacaagtgcagcgactgtgggaagttcttcacccagtgcagcagcctgatgcagcaccagaaggtgcacactggagagaagcccttcaagtgcaatgaatgtggccgcttcttccgggagaacagcaccctggtgcgccaccagagggtgcacactggagccaagccctatgagtgcagagaatgtgggaagttcttcagccagagcagcaccctgatgcagcacaggaaggtgcacatcggggagaagcccttcaagtgcaatgaatgtggccgcctcttccgggagaacagcagcctggtgaagcaccagagggtgcacactggagccaagccctatgagtgcagagaatgtgggaagttcttccgccacaacagcagcctcttcaagcaccggcgcatccacactggagagatgcagtag

SEQ ID NO: 39085 - DNA, 1395 bp, Artificial Sequence
  derived and/or modified sequence
atggccgccgccgccctgcgggaccccgcccagggctacgtgaccttcgaagatgtcgccgtttatttttcccaggaggagtggcggcttctggatgacgctcagaggttactctacagaaacgtgatgctggagaactttactttgctcgcctctctcgggtgctggcacggagccgaagccgaagaagcacctgaacagatagcctctgtgggcctgctttcaagcaatatccaacagcaccaaaaacagcattgtggagaaaagccactaaaaaggcaggaggggagagtgcctgtactcaggagttgtaaagttcaccttagcgaaaaaagcctccaaagccgtgaagttggtaaagctctcttgatctcttctggcgtgttgaaacaccaggtgacccatactggagagaagagccacagaagttctaagagtagggaggctttccacgccggcaagcggcattataagtgttccgagtgtggaaaggctttcggacagaagtacctgttggtgcagcatcagcgcctccatgcagggaagaagacatacgaatgctccgagtgcggcaagttgtttagggacatgtcaaatctttttatccatcaaattgtgcatacgggagagcggccatatggatgcagcaattgtggcaagagtttttcacgtaacgctcatcttatcgagcaccagagagtccacacgggtgagaagcccttcacttgtagcgaatgcggtaaggctttcaggcacaattcaactttagtccagcatcacaagattcatactggtgtgcgaccctacgagtgcagcgaatgtggcaaattatttagcttcaacagctctctcatgaaacaccagagaatccataccggagaaaggccatataagtgtagcgagtgcgggaagttctacagccacaaatctaatcttatcaaacactggcgcgtccacactggcgaacgcccttataaatgttccgattgtggaaagtttttcacccaatgctcaagcctgatgcagcaccagaaggtgcacactggcgaaaagccttttaaatgcaacgagtgtggtaggttcttccgggaaaacagcacgctggtgcgtcaccaaagagttcacacgggcgccaaaccctacgagtgccgggagtgcggcaaatttttcagtcagtctagtactctgatgcaacacaggaaggtccatataggtgagaagcccttcaagtgcaatgagtgcgggcgtttgtttcgggagaattctagcttagtgaaacaccagcgcgttcacaccggcgccaaaccctacgaatgcagggaatgcggcaaattctttagacacaacagtagcttatttaagcatagaagaattcatacaggggaaatgcagtag

SEQ ID NO: 39086 - DNA, 1395 bp, Artificial Sequence
  derived and/or modified sequence
atggccgctgcggctctgagagaccccgctcaagggtatgttacgttcgaggatgtggcagtctacttctcacaggaagaatggagattgcttgatgatgcgcagcggctgctgtaccgaaacgtaatgctggaaaattttactctgctggctagcctgggttgttggcacggagctgaagccgaagaagcaccggagcagattgcctccgtggggttgctaagctctaatattcagcagcaccagaaacagcattgcggcgagaaacctttaaagcgacaggagggcagggtgccagttctcagatcatgtaaggtgcacttatctgaaaagagcctgcagagccgagaggttggcaaagccctgctgatcagctcgggcgtcctaaaacaccaagtgacacacacaggtgagaaaagccatcgtagctcgaagtcccgggaagcttttcacgcaggaaagcgtcattacaagtgctctgagtgcgggaaagcctttggtcaaaagtacctgctcgttcagcaccagcgtctccacgccggaaagaaaacctatgagtgcagtgagtgtgggaagttatttagggacatgagtaatctgttcatccaccaaatcgtgcatactggggagcgaccctatggctgtagtaactgcgggaagtccttctcaaggaacgcgcacttgatagagcatcagagggtgcacaccggcgagaaacctttcacttgcagcgaatgcggaaaggctttcagacataactccacactggttcaacatcacaagatccacaccggagttcgcccttatgagtgctctgaatgcggaaaactgttttcctttaactcttcactcatgaaacaccaaagaattcatactggcgagaggccttataaatgtagcgagtgtgggaagttctactcacataagtcaaatcttatcaagcactggagggtacacaccggcgagcgtccctacaagtgttccgattgtgggaaattctttactcaatgtagctctctgatgcaacaccaaaaggtgcacacaggtgagaaaccattcaaatgtaacgagtgcggcagattcttccgggagaattcaactctggtcagacaccagcgcgtgcacaccggggctaaaccttacgagtgtagagagtgcggcaaattcttttcccagagctcaacattgatgcagcatagaaaagtacacatcggagagaaaccattcaagtgtaacgagtgtggcaggctttttcgggagaactcaagcctcgtgaagcatcaaagagtgcacacgggggctaagccctacgagtgccgcgagtgtggaaagttcttccgacataattcatccctttttaagcatagaaggatccacacgggggagatgcagtag

SEQ ID NO: 39087 - DNA, 2186 bp, Artificial Sequence
  derived and/or modified sequence
ggtattcactttcgcgactcaggtgaactaacctgcgagaagctggttgtgcgctgaggcgaccagcgccggaaggcacggtggcgactcacgctgttctcgccgctcagaggcgggtctgaggctcggtggcggcgcccagggtggcccgggccctttcctcggtcattgtctcccctccagctctactcacaggctccgatggcggcggccgccctgagggaccccgctcagggctatgtgacctttgaggatgtggctgtctacttctcccaggaggaatggagattgcttgatgacgctcagaggctcctctaccgcaatgtgatgctggagaactttacacttctggcctctctgggttgttggcatggagccgaggctgaggaggctcctgagcagattgcttctgtaggactgctcagttcaaacattcagcaacaccagaagcagcactgtggagagaaacccttaaaaagacaagagggcagggtcccagttttgaggagttgcaaagttcacctatcagagaagtccttgcaaagcagggaggttgggaaggccctcctgatcagctcaggtgttctcaagcaccaggtgactcacacaggagagaagtcacataggagctccaaaagtagggaggcctttcatgctggaaaaaggcattacaaatgcagtgaatgtgggaaagcctttggtcagaaatatttacttgttcagcaccagagactacatgctgggaaaaagacgtatgaatgcagtgaatgtgggaagttatttagagatatgtccaacctttttatacaccaaatagttcacactggagaaaggccttacgggtgtagtaactgtggaaaatcctttagccgtaatgctcacctcattgaacaccagagagttcacactggagaaaagccttttacatgcagtgaatgtggaaaagctttcaggcataattccacacttgttcagcatcacaaaatccacactggagtaaggccttatgagtgcagtgaatgtggaaaattgtttagtttcaactccagcctcatgaaacatcagagaattcacactggagaaagaccttataagtgcagtgaatgtggaaaattctatagccacaagtccaaccttatcaaacattggcgtgttcatactggagaaaggccttacaagtgcagcgactgtgggaaattttttacccaatgctcaagcctcatgcaacatcaaaaagttcacactggagaaaagccttttaagtgcaatgaatgtgggagattctttagagagaattccaccctagttagacatcagagggttcacactggagcaaagccttatgagtgcagggaatgtgggaaattttttagccaaagctcaaccctcatgcaacatcgaaaagttcacattggagaaaagccttttaagtgcaatgaatgtgggagattgtttagagagaattccagccttgttaaacatcagagggttcacactggagcaaagccttatgagtgcagggaatgtgggaagttttttcgccacaactccagtctttttaaacatcgaaggattcacactggagaaatgcagtgattgtgtgaaatcctttagccagcgtttcaacctcattcaacaccagaaagttcacagtggaaaaaatcttgaaggtaacagatggaaatccgttagccacacctccagtctcattcaacactggacagtttacaatgtggacaatgtagtgaatatggaaaaaggtttcagccaaaggcctaaccctattcaacaccagaaagtttacactggagaaaggccttagggtgacaggttatgtactgtctctgaatcaatatgacctcacttaaaacagaaactctgaggatggcctttatgagggagctggcaattgaacatcattcatctaaatatgcacactggaggcaagatgagaattcctgacagattgtccttcctgagaagacagccctctgccttggagctccagagagagggagccctgtattcttggctgtacccgtcgaatggagttttgatctcgctgagtttggagttgggggaggaaaggagtggtcttggttcaaatgtgactcacttttgctgttcttgtgaatgttagatcttctttaataaatatttatttcccatacacccttatgaccatt

SEQ ID NO: 39088 - DNA, 561 bp, Artificial Sequence
  derived and/or modified sequence
attcactttcgcgactcaggtgaactaacctgcgagaagctggttgtgcgctgaggcgaccagcgccggaaggcacggtggcgactcacgctgttctcgccgctcagaggcgggtctgaggctcggtggcggcgcccagggtggcccgggccctttcctcggtcattgtctcccctccagctctactcacaggctccgatggcggcggccgccctgagggaccccgctcagcagggctatgtgacctttgaggatgtggctgtctacttctcccaggaggaatggagattgcttgatgacgctcagaggctcctctaccgcaatgtgatgctggagaactttacacttctggcctctctgggttgttggcatggagccgaggctgaggaggctcctgagcagattgcttctgtaggactgctcagttcaaacattcagcaacaccagaagcagcactgtggagagaaacccttaaaaagacaagagggcagggtcccagttttgaggagttgcaaagttcacctatcagagaagtccttgcaaagcagggaggttgggaag

SEQ ID NO: 39089 - protein, 1264 aa, Artificial Sequence
  derived and/or modified sequence
MQTSEMDRKREAFLEHLKQKYPHHASAIMGHQERLRDQTRSPKLSHSPQPPSLGDPVEHLSETSADSLEAMSEGDAPTPFSRGSRTRASLPVVRSTNQTKERSLGVLYLQYGDETKQLRMPNEITSADTIRALFVSAFPQQLTMKMLESPSVAIYIKDESRNVYYELNDVRNIQDRSLLKVYNKDPAHAFNHTPKTMNGDMRMQRELVYARGDGPGAPRPGSTAHPPHAIPNSPPSTPVPHSMPPSPSRIPYGGTRSMVVPGNATIPRDRISSLPVSRPISPSPSAILERRDVKPDEDMSGKNIAMYRNEGFYADPYLYHEGRMSIASSHGGHPLDVPDHIIAYHRTAIRSASAYCNPSMQAEMHMEQSLYRQKSRKYPDSHLPTLGSKTPPASPHRVSDLRMIDMHAHYNAHGPPHTMQPDRASPSRQAFKKEPGTLVYIEKPRSAAGLSSLVDLGPPLMEKQVFAYSTATIPKDRETRERMQAMEKQIASLTGLVQSALFKGPITSYSKDASSEKMMKTTANRNHTDSAGTPHVSGGKMLSALESTVPPSQPPPVGTSAIHMSLLEMRRSVAELRLQLQQMRQLQLQNQELLRAMMKKAELEISGKVMETMKRLEDPVQRQRVLVEQERQKYLHEEEKIVKKLCELEDFVEDLKKDSTAASRLVTLKDVEDGAFLLRQVGEAVATLKGEFPTLQNKMRAILRIEVEAVRFLKEEPHKLDSLLKRVRSMTDVLTMLRRHVTDGLLKGTDAAQAAQYMAMEKATAAEVLKSQEEAAHTSGQPFHSTGAPGDAKSEVVPLSGMMVRHAQSSPVVIQPSQHSVALLNPAQNLPHVASSPAVPQEATSTLQMSQAPQSPQIPMNGSAMQSLFIEEIHSVSAKNRAVSIEKAEKKWEEKRQNLDHYNGKEFEKLLEEAQANIMKSIPNLEMPPATGPLPRGDAPVDKVELSEDSPNSEQDLEKLGGKSPPPPPPPPRRSYLPGSGLTTTRSGDVVYTGRKENITAKASSEDAGPSPQTRATKYPAEEPASAWTPSPPPVTTSSSKDEEEEEEEGDKIMAELQGSSGAPQTSRMPVPMSAKNRPGTLDKPGKQSKLQDPRQYRQANGSAKKSGGDFKPTSPSLPASKIPALSPSSGKSSSLPSSSGDSSNLPNPPATKPSIASNPLSPQTGPPAHSASLIPSVSNGSLKFQSLTHTGKGHHLSFSPQSQNGRAPPPLSFSSSPPSPASSVSLNQGAKGTRTIHTPSLTSYKAQNGSSSKATPSTAKETS

SEQ ID NO: 39090 - DNA, 3795 bp, Artificial Sequence
  derived and/or modified sequence
atgcagaccagcgagatggacagaaagagagaggccttcctggagcacctgaagcagaagtacccccaccacgccagcgccatcatgggccaccaggagagactgagagaccagaccagaagccccaagctgagccacagcccccagccccccagcctgggcgaccccgtggagcacctgagcgagaccagcgccgacagcctggaggccatgagcgagggcgacgcccccacccccttcagcagaggcagcagaaccagagccagcctgcccgtggtgagaagcaccaaccagaccaaggagagaagcctgggcgtgctgtacctgcagtacggcgacgagaccaagcagctgagaatgcccaacgagatcaccagcgccgacaccatcagagccctgttcgtgagcgccttcccccagcagctgaccatgaagatgctggagagccccagcgtggccatctacatcaaggacgagagcagaaacgtgtactacgagctgaacgacgtgagaaacatccaggacagaagcctgctgaaggtgtacaacaaggaccccgcccacgccttcaaccacacccccaagaccatgaacggcgacatgagaatgcagagagagctggtgtacgccagaggcgacggccccggcgcccccagacccggcagcaccgcccaccccccccacgccatccccaacagcccccccagcacccccgtgccccacagcatgccccccagccccagcagaatcccctacggcggcaccagaagcatggtggtgcccggcaacgccaccatccccagagacagaatcagcagcctgcccgtgagcagacccatcagccccagccccagcgccatcctggagagaagagacgtgaagcccgacgaggacatgagcggcaagaacatcgccatgtacagaaacgagggcttctacgccgacccctacctgtaccacgagggcagaatgagcatcgccagcagccacggcggccaccccctggacgtgcccgaccacatcatcgcctaccacagaaccgccatcagaagcgccagcgcctactgcaaccccagcatgcaggccgagatgcacatggagcagagcctgtacagacagaagagcagaaagtaccccgacagccacctgcccaccctgggcagcaagaccccccccgccagcccccacagagtgagcgacctgagaatgatcgacatgcacgcccactacaacgcccacggccccccccacaccatgcagcccgacagagccagccccagcagacaggccttcaagaaggagcccggcaccctggtgtacatcgagaagcccagaagcgccgccggcctgagcagcctggtggacctgggcccccccctgatggagaagcaggtgttcgcctacagcaccgccaccatccccaaggacagagagaccagagagagaatgcaggccatggagaagcagatcgccagcctgaccggcctggtgcagagcgccctgttcaagggccccatcaccagctacagcaaggacgccagcagcgagaagatgatgaagaccaccgccaacagaaaccacaccgacagcgccggcaccccccacgtgagcggcggcaagatgctgagcgccctggagagcaccgtgccccccagccagcccccccccgtgggcaccagcgccatccacatgagcctgctggagatgagaagaagcgtggccgagctgagactgcagctgcagcagatgagacagctgcagctgcagaaccaggagctgctgagagccatgatgaagaaggccgagctggagatcagcggcaaggtgatggagaccatgaagagactggaggaccccgtgcagagacagagagtgctggtggagcaggagagacagaagtacctgcacgaggaggagaagatcgtgaagaagctgtgcgagctggaggacttcgtggaggacctgaagaaggacagcaccgccgccagcagactggtgaccctgaaggacgtggaggacggcgccttcctgctgagacaggtgggcgaggccgtggccaccctgaagggcgagttccccaccctgcagaacaagatgagagccatcctgagaatcgaggtggaggccgtgagattcctgaaggaggagccccacaagctggacagcctgctgaagagagtgagaagcatgaccgacgtgctgaccatgctgagaagacacgtgaccgacggcctgctgaagggcaccgacgccgcccaggccgcccagtacatggccatggagaaggccaccgccgccgaggtgctgaagagccaggaggaggccgcccacaccagcggccagcccttccacagcaccggcgcccccggcgacgccaagagcgaggtggtgcccctgagcggcatgatggtgagacacgcccagagcagccccgtggtgatccagcccagccagcacagcgtggccctgctgaaccccgcccagaacctgccccacgtggccagcagccccgccgtgccccaggaggccaccagcaccctgcagatgagccaggccccccagagcccccagatccccatgaacggcagcgccatgcagagcctgttcatcgaggagatccacagcgtgagcgccaagaacagagccgtgagcatcgagaaggccgagaagaagtgggaggagaagagacagaacctggaccactacaacggcaaggagttcgagaagctgctggaggaggcccaggccaacatcatgaagagcatccccaacctggagatgccccccgccaccggccccctgcccagaggcgacgcccccgtggacaaggtggagctgagcgaggacagccccaacagcgagcaggacctggagaagctgggcggcaagagcccccccccccccccccccccccccagaagaagctacctgcccggcagcggcctgaccaccaccagaagcggcgacgtggtgtacaccggcagaaaggagaacatcaccgccaaggccagcagcgaggacgccggccccagcccccagaccagagccaccaagtaccccgccgaggagcccgccagcgcctggacccccagccccccccccgtgaccaccagcagcagcaaggacgaggaggaggaggaggaggagggcgacaagatcatggccgagctgcagggcagcagcggcgccccccagaccagcagaatgcccgtgcccatgagcgccaagaacagacccggcaccctggacaagcccggcaagcagagcaagctgcaggaccccagacagtacagacaggccaacggcagcgccaagaagagcggcggcgacttcaagcccaccagccccagcctgcccgccagcaagatccccgccctgagccccagcagcggcaagagcagcagcctgcccagcagcagcggcgacagcagcaacctgcccaacccccccgccaccaagcccagcatcgccagcaaccccctgagcccccagaccggcccccccgcccacagcgccagcctgatccccagcgtgagcaacggcagcctgaagttccagagcctgacccacaccggcaagggccaccacctgagcttcagcccccagagccagaacggcagagcccccccccccctgagcttcagcagcagcccccccagccccgccagcagcgtgagcctgaaccagggcgccaagggcaccagaaccatccacacccccagcctgaccagctacaaggcccagaacggcagcagcagcaaggccacccccagcaccgccaaggagaccagctag

SEQ ID NO: 39091 - DNA, 3795 bp, Artificial Sequence
  derived and/or modified sequence
atgcagacatccgaaatggaccggaagcgtgaagcatttcttgaacacctcaagcagaagtatccacaccacgctagtgccataatgggccaccaagagagactgcgtgatcagacccgcagtccaaagctctcccatagtccccagcctccctcacttggggaccccgtcgagcatttgtcagaaacgtcggctgattccctggaggctatgagcgaaggcgacgcgcctacccctttcagtagaggctccaggacaagggcttcccttcctgtggtgcggagtaccaatcagaccaaggagcgttctctgggcgtgctgtacctgcaatacggtgacgagacaaagcagttaagaatgcccaacgagatcacgtctgcagatacaattagagcactgttcgtaagcgcattcccccagcagcttactatgaagatgctggaaagtccctcagttgcaatatatattaaagacgagagccgaaacgtgtactatgaacttaatgacgtcaggaatatccaggaccgctcattgttgaaggtttacaacaaggatcccgctcacgctttcaatcatacccctaaaacgatgaatggcgacatgcggatgcagcgcgagctggtgtatgcgcggggagacggcccaggcgcgcccagacctggatcaactgcccatcccccgcatgctattccaaacagcccaccttcaacaccagtgccccactctatgcccccgtcgccaagcaggattccatatggaggtacaagatctatggtggtcccggggaacgcgacaatacctcgggatagaatctccagtttgcccgtcagcaggccgatctcaccttccccctcagctatactagagcggagagatgtcaagcccgatgaggacatgtccggcaagaatattgccatgtataggaacgagggcttctacgccgacccctacctctaccacgagggaaggatgagtattgcaagtagccacggcgggcaccccctggacgtgccagatcacataatcgcctaccatagaacagctattagatctgcgagcgcatactgtaatccgtctatgcaggccgagatgcacatggagcagagcctgtatcgacagaaaagccgcaagtatccagactctcacttgcccactttaggcagcaagactccgcccgcctccccccatcgggtctcagaccttcgtatgatagacatgcacgcccactacaacgcccacggtcctcctcatacaatgcagccagatagagccagcccatctaggcaagccttcaaaaaggaacccgggactcttgtgtatatcgagaaaccccgtagcgctgcgggactatcttcgttggtagacctgggtcctccgctaatggagaagcaggtatttgcctactccaccgccaccatcccaaaggatcgtgagactagagagcggatgcaggccatggaaaagcaaatcgcttcgctgaccggcctggtgcaaagcgctctcttcaagggccccatcacatcctatagtaaagacgcttcatccgagaaaatgatgaagaccaccgccaatagaaaccacacagacagtgctggaacaccccacgttagcggagggaaaatgctgtctgctctcgagtccactgtgcctccctctcagccaccaccggtcggcacctcggcgattcacatgtcactgctcgagatgcggcgctctgtcgccgagctccggctccaactgcaacagatgaggcagctgcaattacaaaatcaggagctgctgcgggctatgatgaagaaagccgagcttgaaatcagcggtaaagtcatggaaacgatgaagcggctggaggacccagtccaacgccagcgagttctcgttgagcaggagagacagaagtaccttcacgaagaagagaagatcgtgaaaaagttgtgtgaactcgaagatttcgttgaggacctcaaaaaggattccactgccgccagccggttggtgactctcaaggatgttgaggatggcgccttccttttacgccaggtgggggaggcagtagccacactaaaaggggagtttcctaccctacagaataaaatgcgagcaattctccggatcgaagtcgaggccgtacggttcctgaaggaggaacctcacaaactggatagcctgctgaagagggtccgaagcatgacagatgtcctgactatgctgagacgtcacgtcaccgatggcctgctgaaaggaaccgatgccgcgcaggcagcccagtatatggccatggaaaaagccaccgctgctgaggtgctgaaatcccaggaagaggccgcccacactagcgggcagccatttcactcaacaggcgcccctggcgacgccaaatccgaggttgtcccgctcagcgggatgatggtgaggcacgcccagtcgtctccggttgtgattcagcccagccagcattctgttgccttgttgaatccagcccagaatctgcctcatgtggcctcttctccggccgtgcctcaggaggccacctcgacactgcagatgtctcaggccccacagtcaccacaaattccaatgaatggaagcgcgatgcaaagtcttttcattgaagaaatacatagtgtttccgctaaaaacagagccgtgagcatagaaaaggcagagaaaaaatgggaggagaagcgccaaaacctggaccattacaacggtaaggaattcgaaaaactgctagaggaggcccaggctaacataatgaaatctatccccaacctggaaatgccccctgctaccggacctctccccagaggcgatgcgccggtggataaagttgagctgagcgaagattcccctaacagcgaacaagacctggagaaacttggcggaaagtcccctccaccacctcctcctcctccaaggcgttcctatctgcccgggagcggccttaccaccacgaggtccggcgacgtagtttatacggggcgtaaagaaaatatcaccgcgaaagcaagtagtgaggatgcagggccctcgcctcagactagagcaacaaaatacccagctgaggagccggcctctgcgtggaccccttcacctcccccggtgacaacctctagttcaaaagatgaggaagaggaggaagaggagggagacaaaataatggcagagctgcaaggaagtagcggagccccacagactagccgaatgcctgtcccaatgagtgctaagaaccgaccagggacactggacaaacctggaaagcaaagtaaacttcaggaccctcgccagtacagacaggctaatgggagtgcaaaaaaatctggcggtgattttaagcccacctcacccagcttgcctgccagcaagattcctgctttatcaccttccagtggaaagagtagttccctgccatctagtagcggcgatagcagcaatctccctaatccccccgccactaaaccatctatcgcttctaacccgctgagcccccagaccggtcctcccgcccactccgcatcactgattccaagcgtttctaacggatcattaaagtttcagtcattaacacacacaggcaagggccatcacttatccttctctcctcagagccagaacggccgtgcaccacctcccttatctttttccagtagccctccaagtccggcctcttctgtgtccctgaatcaaggggcaaaagggacacgtactatccacactccctcattaacatcctataaggcacagaacgggtcaagctcaaaagcaactccttctacggctaaagaaaccagctag

SEQ ID NO: 39092 - DNA, 3795 bp, Artificial Sequence
  derived and/or modified sequence
atgcagaccagcgagatggacaggaagcgggaggccttcctggagcacctgaagcagaagtacccccaccacgccagcgccatcatgggccaccaggagcggctgcgggaccagaccaggagccccaagctgagccacagcccccagccccccagcctgggggaccctgtggagcacctgtctgagaccagcgctgacagcctggaggccatgtctgaaggagatgcccccacccccttcagccggggcagcaggacccgggccagcctgcctgtggtgcgcagcaccaaccagaccaaggagaggagcctgggcgtgctgtacctgcagtatggagatgagaccaagcagctgaggatgcccaatgagatcaccagcgctgacaccatccgggccctgtttgtgtctgccttcccccagcagctgaccatgaagatgctggagagccccagcgtggccatctacatcaaggatgagagcagaaatgtgtactatgagctgaatgatgtgaggaacatccaggacaggagcctgctgaaggtgtacaacaaggaccctgcccacgccttcaaccacacccccaagaccatgaatggagacatgaggatgcagcgggagctggtgtatgcccggggagatggccctggggccccccggcccggcagcacagcccaccccccccacgccatccccaacagcccccccagcacccctgtgccccacagcatgccacccagccccagccgcatcccctacggcggcaccaggtccatggtggtgcctggaaatgccaccatcccccgggaccgcatcagcagcctgcctgtgtcccggcccatcagccccagccccagcgccatcctggagaggagagatgtgaagccagatgaggacatgtctgggaagaacatcgccatgtacagaaatgaaggcttctacgccgacccctacctgtaccacgagggccgcatgagcatcgccagcagccacggcggccaccccctggatgtgcctgaccacatcatcgcctaccacaggacagccatccgcagcgccagcgcctactgcaaccccagcatgcaggccgagatgcacatggagcagagcctgtaccggcagaagagcaggaagtacccagacagccacctgcccaccctgggcagcaagaccccaccagccagcccccaccgggtgtctgacctgaggatgattgacatgcacgcccactacaatgcccacggccccccccacaccatgcagcctgaccgggccagccccagccggcaggccttcaagaaggagcccggcaccctggtgtacatcgagaagcccaggtctgctgctggcctgagcagcctggtggacctgggcccccccctgatggagaagcaggtgtttgcctacagcacagccaccatccccaaggaccgggagacccgggagaggatgcaggccatggagaagcagatcgccagcctgaccggcctggtgcagagcgccctcttcaagggccccatcaccagctacagcaaggatgccagcagcgagaagatgatgaagaccacagccaacagaaaccacacagacagcgctggcacccctcatgtgtctgggggcaagatgctgagcgccctggagagcacagtgccccccagccagcccccacctgtgggcaccagcgccatccacatgagcctgctggagatgagaagatctgtggccgagctgcggctgcagctgcagcagatgaggcagctgcagctgcagaaccaggagctgctgcgggccatgatgaagaaggccgagctggagatcagcggcaaggtgatggagaccatgaagaggctggaggaccctgtgcagaggcagagggtgctggtggagcaggagcggcagaagtacctgcacgaggaggagaagatcgtgaagaagctgtgtgagctggaggactttgtggaggacctgaagaaggacagcacagctgccagccggctggtgaccctgaaggatgtggaggatggagccttcctgctgcggcaggtgggggaggccgtggccaccctgaagggggagttccccaccctgcagaacaagatgagggccatcctgagaattgaggtggaggccgtgcgcttcctgaaggaggagccccacaagctggacagcctgctgaagagggtgcgctccatgacagatgtgctgaccatgctgcggcggcacgtgacagatggcctgctgaagggcacagatgctgcccaggccgcccagtacatggccatggagaaggccacagctgctgaggtgctgaagagccaggaggaggccgcccacaccagcggccagcccttccacagcactggagcccctggagatgccaagtctgaggtggtgcccctgagcggcatgatggtgagacatgcccagagcagccctgtggtgatccagcccagccagcacagcgtggccctgctgaacccagcccagaacctgccccacgtggccagcagccctgctgtgccccaggaggccaccagcaccctgcagatgagccaggccccccagagcccccagatccccatgaatggaagtgccatgcagagcctcttcatcgaggagatccacagcgtgtctgccaagaacagagctgtgtccattgagaaggccgagaagaagtgggaggagaagaggcagaacctggaccactacaacgggaaggagtttgagaagctgctggaggaggcccaggccaacatcatgaagagcatccccaacctggagatgcccccagccaccggccccctgcccagaggagatgcccctgtggacaaggtggagctgtctgaggacagccccaacagcgagcaggacctggagaagctgggcggcaagagccccccacctcctcctcctcctccaagaagaagctacctgcccggcagcggcctgaccaccaccaggtctggagatgtggtgtacacaggcaggaaagaaaacatcacagccaaggccagcagtgaagatgctggccccagcccccagacccgggccaccaagtacccagctgaggagcccgccagcgcctggacccccagccccccacctgtgaccaccagcagcagcaaggatgaggaggaggaggaggaggagggggacaagatcatggccgagctgcagggcagcagcggggccccccagaccagcaggatgcctgtgcccatgtctgccaagaacagacctggcaccctggacaagccaggcaagcagagcaagctgcaggacccccggcagtaccggcaggccaatggaagtgccaagaagtctggaggagacttcaagcccaccagccccagcctgcctgccagcaagatcccagccctgagccccagcagcggcaagagcagcagcctgcccagcagcagcggggacagcagcaacctgcccaaccccccagccaccaagcccagcatcgccagcaaccccctgagcccccagacaggccccccagcccacagcgccagcctcatccccagcgtgtccaatggcagcctgaagttccagagcctgacccacacaggcaagggccaccacctgtccttcagcccccagagccagaatggccgggcccccccacccctgtccttcagcagcagcccccccagccctgccagctctgtgtccctgaaccagggcgccaagggcaccaggaccatccacacccccagcctgaccagctacaaggcccagaatggcagcagcagcaaggccacccccagcacagccaaggagaccagctag

SEQ ID NO: 39093 - DNA, 3795 bp, Artificial Sequence
  derived and/or modified sequence
atgcagaccagcgagatggaccggaagcgggaggccttcctggagcacctcaagcaaaagtatcctcatcatgcctccgccatcatgggccaccaggaacgcctccgcgaccaaactcggtcacccaagctgtcccattcgccccagccaccgagtctgggcgaccccgtggagcatctgagtgaaacctctgccgattccctcgaagccatgtcagagggcgatgcccccacaccattctctcgagggagccgtacccgtgcttctttacccgtggttcggtccacaaatcagaccaaagagcggagccttggagtactgtacctgcagtatggggacgaaactaagcagctccggatgccaaatgagattacatctgcagatactatacgtgctctcttcgtgagtgcgttcccccaacagctcaccatgaaaatgctcgaatctccttctgtagccatttacattaaggacgagagcaggaatgtgtattatgagctgaatgacgtaagaaacattcaggaccgctcattgttaaaagtttacaacaaggaccctgcccacgcattcaatcatacacctaagaccatgaacggcgacatgaggatgcagagggagctcgtctacgcacggggcgacggacccggtgcgccacgccccgggtccactgcacatcctccacacgccattccgaactcccccccatcaaccccagtgccacattccatgccaccctccccctcacggataccctacgggggcacacgaagcatggtagtgcctggaaacgccactattcctcgggaccgtattagctctcttcccgtatctaggccaatctcaccttccccaagtgcaattctggaacgcagagacgttaagcctgatgaggacatgtctggtaagaatattgctatgtatagaaatgaaggattttacgctgacccctacttgtaccatgagggaaggatgagcatagccagcagtcatggtggccatcccctggatgttccggaccatattatcgcatatcaccgaaccgccatcaggagcgccagtgcctattgcaatccaagcatgcaggccgagatgcacatggagcagtcactgtatagacagaagagtcggaaatacccggattcccacttacccacccttggatccaaaactccacctgccagtccccaccgtgtgtcagacttgcgtatgattgatatgcacgcccactacaacgcccacggccctccacatacgatgcaaccggatagggcaagcccaagtcgccaggcgtttaagaaagagccgggtacattagtctatattgagaagcctagaagtgcggccgggcttagcagcttggtcgacttgggcccccctctgatggagaaacaggtgtttgcctatagcaccgcaactattcctaaggaccgggagacacgagaaaggatgcaggccatggagaaacagattgcctcactaacagggctggtacaaagcgctttattcaaaggccccatcacctcctatagcaaagatgccagtagtgagaagatgatgaaaaccacagccaatcgcaaccatacagactcggctggcaccccacacgttagcggcgggaagatgctatctgccttggagtctactgtgcccccaagtcagcctccacctgttggcacctcagcgatacacatgtccctgctagagatgcggcggtcagtagcggagctgcggctccagctgcagcaaatgcgacaattgcagttacaaaaccaagaattgttgcgtgccatgatgaaaaaagccgaattagaaataagtggaaaggtcatggaaactatgaagcgtttagaagatccggtccagagacagcgagtacttgtagaacaggaaagacaaaagtatctacacgaagaggagaagattgtgaaaaagctgtgtgaactcgaggattttgtggaggaccttaagaaggactccaccgcagcaagcaggcttgtcaccttaaaagacgtcgaggacggagccttcctgctgcgacaggtgggcgaggccgtggccactctcaagggagagttcccaaccctgcagaacaagatgcgtgccattcttcgtatcgaggtcgaggccgtgagattcctgaaggaggagccgcacaagcttgattccttgttgaaacgtgtcagaagcatgaccgacgtcctaacaatgcttaggcgtcacgttactgatgggctgctgaaaggcaccgacgccgcacaagctgctcagtatatggccatggaaaaggccacagcggcagaagtgcttaaatcacaggaggaagcagctcacacgagtgggcaacccttccattccaccggtgccccgggagacgccaagagtgaggtggtccccttatcaggaatgatggtccggcacgcccaatcatcacccgttgtcatccaacctagccagcattctgtagctttgctgaatcctgcccaaaatttgccgcatgtcgcctcaagtccagccgtgccccaggaagcgacatctacattgcagatgagccaggcgccacagtcccctcagatcccgatgaatgggtctgctatgcagtctttgtttattgaggaaatccattcagtcagcgcgaaaaacagagctgtgtcgattgaaaaggccgagaagaagtgggaagagaaacgccaaaatctggaccattacaatggcaaggagttcgagaagctgcttgaagaggctcaggccaatattatgaagagcattccaaaccttgagatgccgcctgctacaggcccactgcctcggggcgacgctcctgtggacaaggtcgaattaagtgaagacagtcctaactctgagcaagacctggaaaaactgggaggtaagtcgcctcctccaccccccccacccccgcgccgctcctacctccccggcagcggcctgacaacaaccagatctggggacgtagtgtacactggccggaaagagaacatcaccgctaaagcttcgtcagaggacgccgggcccagcccccaaactcgcgcaaccaaatatcctgccgaagagcccgcctctgcctggacccccagccctccaccagtgactacatcctcctcaaaagacgaggaagaggaggaggaagagggtgataaaatcatggccgagctccagggcagtagcggcgcgcctcagacctccaggatgcctgttcccatgtctgccaaaaaccgccctggaacacttgacaaacctgggaagcagtcaaaactccaagatcccaggcagtaccggcaggccaatggatcagccaaaaaaagcggaggcgacttcaagccaacgagcccttccctcccggccagtaaaatccccgctctatccccaagctcagggaagagctcgtcattgccatcctctagcggggatagcagtaacctcccaaaccccccggcaacaaagccctccattgcatccaatcccctgagccctcagaccggtccacctgcccactcagcgagtctgatccctagcgtaagcaacgggtcccttaagttccagagtctcactcatactggaaaaggccatcacctgtcttttagccctcagtctcagaatggcagagcaccgcctcctctgagtttctcttccagccccccaagtccggctagtagcgtctcgctgaatcagggtgccaaagggactcgaaccatccatacaccatctctgacctcatacaaagctcagaacggctcctcctctaaagcaaccccctccacggcaaaggaaacctcttag

SEQ ID NO: 39094 - DNA, 3795 bp, Artificial Sequence
  derived and/or modified sequence
atgcagacgtcagagatggacaggaagcgcgaggcattcctggagcatctgaagcagaagtacccgcaccatgcatctgccattatgggccatcaggagcggctccgcgaccagacccggtctcccaagctgagtcacagtcctcagcccccaagtcttggtgaccctgtagagcacctgagcgagactagcgccgattctttggaggccatgagtgaaggcgacgctcctaccccattttctaggggtagtagaacccgggcttccctgccagttgttaggagtactaatcagacgaaagaacggtcactgggagtcctataccttcagtacggtgacgagactaaacaactcaggatgcctaacgagatcaccagtgccgatacaatccgtgcacttttcgtgtcagctttcccccagcagctcaccatgaagatgctggagagccctagcgttgcaatatacatcaaggacgagtccaggaacgtgtattatgaattaaacgatgtgcggaatattcaggacagaagtcttctgaaggtgtataataaggatccagcccatgcattcaatcatacccccaagacaatgaatggagacatgagaatgcaacgggaactggtttatgctcggggtgatgggccaggggcaccacgccctggctctactgctcacccacctcacgcgatacccaacagtccaccatccacacccgtcccccattctatgccgccttcaccctcacgaatcccatacgggggaacaaggtcaatggtggtgcccggaaacgcaactataccgagagaccgcatttccagcttgccagtcagcagacccatatcgccatccccatccgctattctggaaaggcgtgacgttaagccagatgaagatatgtcagggaagaacattgcaatgtatcggaatgaaggtttttacgccgatccctacttgtaccacgaaggtcgcatgtccattgccagttctcacggtggacacccgctggacgtgccagaccacattattgcctaccaccggactgccatccgttcagcctcagcctactgtaaccccagcatgcaggccgaaatgcatatggaacaaagcctctaccggcagaaaagtagaaaataccccgacagtcatcttccaactctggggtcaaagactccaccagcttctccacacagagtttctgacctgcgcatgatagacatgcacgcccactacaatgcacatggtccaccacatacaatgcagccagatcgggcttctcctagtagacaggcatttaagaaggagcccggtaccctggtgtacatagagaagccaaggtcagctgctggcttgagcagccttgtggatctgggaccaccactaatggaaaagcaagtcttcgcatactcaacggccaccataccgaaggatcgggagacccgggaaaggatgcaggctatggagaaacagatagcgtcgctcacgggactggtccagtcagctctctttaaagggccaatcacatcatatagtaaggacgcatcttctgaaaaaatgatgaagaccaccgctaatcgaaaccacaccgattccgccggaacgccgcatgtgtctggaggtaagatgttgagcgccctggagagtaccgttccaccttcacagccacctcccgtgggtacatccgccattcatatgagcctattggagatgaggcggtcagttgctgaactacgtttacagcttcagcagatgagacagttgcagctgcagaaccaggagctgctgagagcaatgatgaagaaggcagagttagaaatcagtggcaaggtaatggagactatgaagcggctcgaggaccccgtgcagcgccagcgggtgctggtggagcaggagcggcagaagtaccttcatgaagaagagaaaattgttaagaaactctgcgaactagaggactttgtcgaggacctgaagaaggatagtacagcggcaagtagactcgtgaccctgaaggacgttgaggatggagccttcctcctccggcaggtaggagaggccgtggcgacactgaaaggggaatttcctaccctgcagaacaagatgcgcgcaattctgcggattgaagtagaggctgtgagattcctaaaggaggagccacataaacttgacagccttctgaagagagttcgaagcatgaccgatgtcctcactatgttgcgcagacacgttaccgacggcctgctgaaaggaaccgacgccgctcaggctgcccagtacatggcgatggaaaaagccacagccgctgaagtgctgaagtctcaggaggaagcagcacacaccagcggtcaaccttttcattctaccggtgcccctggggacgcaaaaagtgaagtggtccccttgagtgggatgatggttcggcacgctcaatcaagcccagtggtcattcaacctagccagcatagtgtggctttgttgaaccctgctcagaatcttccccacgtggcctctagccctgccgtacctcaagaggccacttcaacgctgcaaatgtcccaggcgccacaatcaccccaaattccgatgaacgggagcgcaatgcaatccctgttcatcgaggaaattcacagtgtctcagccaaaaatcgagctgtgtccatcgaaaaggccgaaaagaagtgggaggaaaaacggcagaatctggatcactacaacgggaaggaatttgagaagttgttggaggaggcccaggctaacataatgaagtctataccaaacttagagatgccacccgctaccggtccactacccagaggcgatgcacctgtggacaaggtggaacttagcgaggacagccccaactctgaacaggatctggaaaaactgggcggaaagagcccacccccaccgccacctccacctagaagatcttatctcccaggctcaggactgactaccacccgtagtggtgatgtggtgtacacgggcagaaaggagaatattactgcgaaggccagctctgaggacgctggcccatcgccccagacccgtgccacaaagtatcccgcagaggagcctgccagtgcctggaccccgtccccacccccagtgacaacaagcagctctaaggatgaggaggaagaagaggaagagggggacaagatcatggccgagttgcagggcagcagcggcgcaccacagaccagtcgtatgcctgttccaatgtccgctaagaatcggcctgggaccctggataaacccggaaagcagtccaagcttcaggaccccaggcagtataggcaagccaacgggagcgccaagaaatcagggggagactttaaaccaaccagcccaagcctgccagcctcaaagattcccgctctatcaccatcatccggcaagtcctcttccctcccatcaagctcaggagattcttcgaacttgccaaacccgcctgccacaaaacctagtatcgcgtcaaatccgcttagtccccagaccggtcctccagctcattcagctagcctaatcccctctgtcagcaacggcagcctgaagtttcagtcactgactcacactggaaaggggcatcatctttctttcagtccgcagagccaaaacggtcgggctccccctcccctgtcctttagctcttcaccgcctagtcctgccagcagtgtgagtttgaaccagggggctaagggcactaggacgatccacactccgtccctgacaagctacaaagcccagaatggtagctcttcgaaggcgacccctagtacagctaaggagaccagctag

SEQ ID NO: 39095 - protein, 539 aa, Artificial Sequence
  derived and/or modified sequence
MKPAAREARLPPRSPGLRWALPLLLLLLRLGQILCAGGTPSPIPDPSVATVATGENGITQISSTAESFHKQNGTGTPQVETNTSEDGESSGANDSLRTPEQGSNGTDGASQKTPSSTGPSPVFDIKAVSISPTNVILTWKSNDTAASEYKYVVKHKMENEKTITVVHQPWCNITGLRPATSYVFSITPGIGNETWGDPRVIKVITEPIPVSDLRVALTGVRKAALSWSNGNGTASCRVLLESIGSHEELTQDSRLQVNISGLKPGVQYNINPYLLQSNKTKGDPLGTEGGLDASNTERSRAGSPTAPVHDESLVGPVDPSSGQQSRDTEVLLVGLEPGTRYNATVYSQAANGTEGQPQAIEFRTNAIQVFDVTAVNISATSLTLIWKVSDNESSSNYTYKIHVAGETDSSNLNVSEPRAVIPGLRSSTFYNITVCPVLGDIEGTPGFLQVHTPPVPVSDFRVTVVSTTEIGLAWSSHDAESFQMHITQEGAGNSRVEITTNQSIIIGGLFPGTKYCFEIVPKGPNGTEGASRTVCNRTG

SEQ ID NO: 39096 - DNA, 1278 bp, Artificial Sequence
  derived and/or modified sequence
atgaaaccagccgcgcgggaggcgaggcttccaccacgcagccccggtctgagatgggccctgccattactgctcctgcttctccggttgggccagattctgtgcgctgggggcacccctagtcccatccccgatccatcagttgctactgttgctacaggggagaacggaattacccagattagttctactgccgagtcatttcacaagcaaaatgggaccgggactccgcaggtggagaccaatacctcagaggatggtgagagctctggagcaaatgacagcctgagaactccggagcagggctcgaatggcaccgatggggcttctcagaaaacacccagcagtacgggcccgtctcccgtgtttgatatcaaggcagtaagcatctcaccaacaaatgtaatcctcacctggaagtctaacgacactgcagcctcagaatataaatacgtggtcaagcacaaaatggaaaatgagaaaacaataactgtggtgcaccaaccctggtgcaacattaccgggctgcgccccgctacaagctacgttttctctattacccctggaatcggaaatgaaacctggggagacccaagggtgattaaggtcatcacagagcctatccctgtgtcagacctcagggtggctctcaccggcgtacgaaaagcggccctctcatggagtaacggtaatggcactgctagctgtcgggtgctgttggagagcatcggcagccatgaggagcttacccaagacagtcgtctgcaggttaacatctcagggctaaagcctggagtgcagtacaacatcaatccttatctattacagagcaacaaaacgaaaggcgacccacttggcactgaggggggactggatgcttctaataccgagcgctctcgcgccggaagtcccactgcccctgtacacgatgagtctctggtgggcccagtggatcccagcagcggccaacagtctagggacactgaagttctcctggtgggcctcgagcccgggacccggtataacgccacagtgtactctcaggccgctaatggaaccgaagggcagccacaggccattgaatttagaaccaacgccatccaagtgtttgatgtgactgccgttaatatttcagccacgtccttgacactgatatggaaggtgagtgataacgagtcctctagcaattatacatacaagattcatgtggcaggcgagacggattcctccaatctgaacgtgtccgaacccagagccgtcattcctgggctacgctag

SEQ ID NO: 39097 - DNA, 1620 bp, Artificial Sequence
  derived and/or modified sequence
atgaagcccgccgcccgggaagcaaggttgccaccccggagccccggtttgcgctgggcactccctttgttgttgttgcttctcagactcggccagatactctgtgccgggggtacccctagtccgattccagacccctctgtggccaccgttgcaaccggagagaacggcattacccagattagcagcacagcggaaagtttccataaacaaaatggaaccgggacgccccaggtggagaccaatacaagcgaggatggggagtctagcggcgccaacgactccctaaggactcctgaacaggggtccaacgggacggacggagcatctcagaagaccccctcttctacagggccttcacctgtcttcgacattaaagctgtgagtatttccccaacaaacgttatcctgacctggaaatccaacgatactgccgccagcgagtataagtatgtagttaagcacaagatggagaacgagaagaccatcactgtggtccatcaaccatggtgtaatatcactggactgcgaccagcgacaagttacgtgttcagcatcaccccaggtatcggcaatgagacatggggagatcccagggtgatcaaggtgatcaccgaaccgatccccgtgtccgatcttagagtagcattaaccggcgtgagaaaggcagccttgtcgtggtcaaatggtaatggtacagcctcatgtcgagtgctgctcgagtcaataggatctcacgaagaactgacacaggattcccgcttgcaggtcaatatttccgggcttaagcccggagtgcagtataatatcaacccctatctcctgcagagcaacaagaccaaaggcgaccccctgggcaccgaaggagggctggacgcctctaacaccgaacggtccagagccgggtcccctaccgctcctgtacacgacgagtcactcgtgggtcccgtggatccctcatctggacagcagtcccgcgacactgaggtgctgttggtgggactggaacccggcacacgttataacgcaacagtgtactcccaggctgcaaatggaactgaggggcagccgcaggccatcgagtttcggaccaacgcaatccaggtctttgatgtaactgctgtgaacatttccgccacctccctgactttaatttggaaggtcagcgataacgagagttcatcaaattatacctataaaattcacgttgctggcgagacagattcctcaaatctgaacgtgtctgaacctcgcgcagtcattcccggcctgaggagttccacattctataatataactgtgtgtcccgtgctgggagacattgagggcacacccggatttctacaggtgcacacgccacccgtccctgtgtccgactttcgcgtgaccgtggttagcaccactgagattggccttgcctggtcaagccatgacgcggagagctttcagatgcatataactcaggaaggtgcgggaaattctcgcgtggagattactactaaccaaagcattattattgggggcctttttcctgggacgaagtattgctttgaaattgtgcccaagggacctaacgggactgagggggcatcccgaaccgtttgcaacagaacggggtag

SEQ ID NO: 39098 - DNA, 1278 bp, Artificial Sequence
  derived and/or modified sequence
atgaagccagctgcccgggaggcccggctgcccccaagaagccctggcctgcgctgggccctgcccctgctgctgctgctgctgcggctgggccagatcctgtgtgccggcggcacccccagccccatcccagaccccagcgtggccaccgtggccactggagaaaatggcatcacccagatcagcagcacagctgagagcttccacaagcagaatggcaccggcaccccccaggtggagaccaacaccagtgaagatggagagagcagcggggccaatgacagcctgcggaccccagagcagggcagcaatggaacagatggagccagccagaagacccccagcagcacaggccccagccctgtgtttgacatcaaggctgtgtccatcagccccaccaacgtcatcctgacctggaagagcaatgacacagctgccagcgagtacaagtatgtggtgaagcacaagatggagaatgagaagaccatcaccgtggtgcaccagccctggtgcaacatcaccggcctgcggcctgccaccagctatgtgttcagcatcaccccaggcattggaaatgagacctggggagaccccagggtcatcaaggtgatcacagagcccatccctgtgtctgacctgcgggtggccctgactggagtgaggaaggccgccctgtcctggagcaatggaaatggaacagccagctgccgggtgctgctggagagcatcggcagccatgaggagctgacccaggacagccggctgcaggtgaacatcagcggcctgaagccaggagtgcagtacaacatcaacccctacctgctgcagagcaacaagaccaagggggaccccctgggcacagaaggaggcctggatgccagcaacacagagaggagcagagctggcagccccacagcccctgtgcatgatgagagcctggtgggccctgtggaccccagcagcggccagcagagccgggacacagaggtgctgctggtgggcctggagcccggcacccgctacaatgccaccgtgtacagccaggccgccaatggaacagagggccagccccaggccatcgagttccgcaccaatgccatccaggtgtttgatgtgacagctgtgaacatcagcgccaccagcctgaccctcatctggaaggtgtctgacaatgaaagcagcagcaactacacctacaagatccacgtggccggggagacagacagcagcaacctgaatgtgtctgagcccagggctgtgattcctggcctgaggtag

SEQ ID NO: 39099 - DNA, 1620 bp, Artificial Sequence
  derived and/or modified sequence
atgaagccagctgcccgggaggcccggctgcccccaagaagccctggcctgcgctgggccctgcccctgctgctgctgctgctgcggctgggccagatcctgtgtgccggcggcacccccagccccatcccagaccccagcgtggccaccgtggccactggagaaaatggcatcacccagatcagcagcacagctgagagcttccacaagcagaatggcaccggcaccccccaggtggagaccaacaccagtgaagatggagagagcagcggggccaatgacagcctgcggaccccagagcagggcagcaatggaacagatggagccagccagaagacccccagcagcacaggccccagccctgtgtttgacatcaaggctgtgtccatcagccccaccaacgtcatcctgacctggaagagcaatgacacagctgccagcgagtacaagtatgtggtgaagcacaagatggagaatgagaagaccatcaccgtggtgcaccagccctggtgcaacatcaccggcctgcggcctgccaccagctatgtgttcagcatcaccccaggcattggaaatgagacctggggagaccccagggtcatcaaggtgatcacagagcccatccctgtgtctgacctgcgggtggccctgactggagtgaggaaggccgccctgtcctggagcaatggaaatggaacagccagctgccgggtgctgctggagagcatcggcagccatgaggagctgacccaggacagccggctgcaggtgaacatcagcggcctgaagccaggagtgcagtacaacatcaacccctacctgctgcagagcaacaagaccaagggggaccccctgggcacagaaggaggcctggatgccagcaacacagagaggagcagagctggcagccccacagcccctgtgcatgatgagagcctggtgggccctgtggaccccagcagcggccagcagagccgggacacagaggtgctgctggtgggcctggagcccggcacccgctacaatgccaccgtgtacagccaggccgccaatggaacagagggccagccccaggccatcgagttccgcaccaatgccatccaggtgtttgatgtgacagctgtgaacatcagcgccaccagcctgaccctcatctggaaggtgtctgacaatgaaagcagcagcaactacacctacaagatccacgtggccggggagacagacagcagcaacctgaatgtgtctgagcccagggctgtgattcctggcctgcggagcagcaccttctacaacatcaccgtgtgccctgtgctgggggacatcgagggcaccccaggcttcctgcaggtgcacaccccacctgtgcctgtgtctgacttccgggtgacagtggtgtccaccacagagatcggcctggcctggagcagccatgatgctgagagcttccagatgcacatcacccaggagggcgccggcaacagccgggtggagatcaccaccaaccagagcatcatcatcggcggcctcttccctggcaccaagtactgctttgaaattgtgcccaagggccccaatggaacagaaggagccagcaggacagtgtgcaacagaactggatag

SEQ ID NO: 39100 - DNA, 1278 bp, Artificial Sequence
  derived and/or modified sequence
atgaagcccgccgcccgggaggcccggctgcccccccggagccccggtttacggtgggccctgcccttacttttattacttttacggttggggcagatcctttgcgcaggcggcacgccgagccccattcctgacccaagcgtagctaccgtagcaaccggtgaaaatgggattactcagataagcagcactgcagagtcattccataaacagaatggcacaggtaccccccaagtggagaccaatacgtcggaggatggggagtcaagcggggctaacgacagtctcaggacccccgagcaaggttccaatgggaccgatggagccagtcagaagactcccagctccactggtccatcccctgtcttcgacattaaggccgtaagcatcagtccgaccaacgtgattctgacctggaagagtaacgatacagccgcttccgagtataagtacgtagtaaaacacaaaatggaaaacgagaagactatcacagttgttcatcagccatggtgcaacattactggattaagaccggccacctcttacgtgttcagtatcactcccgggatcggcaatgaaacctggggggacccacgggtcattaaggtgattacagagcccatacctgtgtccgatctgcgcgtggcgctaaccggtgtgcgcaaggctgctctcagctggtccaacggcaatgggaccgcatcatgtcgcgtgttactggagtcaatagggagccacgaagagttgacccaggacagccgcctccaggtgaacatttcaggcctgaagcccggagtccagtacaacatcaacccttacctgctgcaatcgaacaaaacaaaaggcgatcccctgggtactgagggtggcctggacgcatcaaacactgagaggtctcgcgccggctctccgactgcacccgtgcatgatgaatccctggtcggcccagtcgatccaagctccggtcagcagagtcgagatacagaggtgctactggtgggcctagaaccagggacaaggtacaatgctacggtgtattctcaggctgctaatggcaccgaaggccagcctcaggctatcgagtttcggaccaatgcaattcaggtctttgacgtgacagctgttaacatatctgcgacttcccttactcttatctggaaggtaagcgataacgagagcagtagcaactacacttataagatccacgtggctggggagacagatagtagtaacttaaatgtctccgagccccgcgccgttatccctggactgagatag

SEQ ID NO: 39101 - DNA, 1620 bp, Artificial Sequence
  derived and/or modified sequence
atgaagcccgccgcccgggaggcccggctgcccccccggagccccgggctgcggtgggcccttcctctgttattgttgctcctcaggctcgggcaaattctttgcgctggtgggacacccagtcccattcccgatccttcggtcgccacggttgctacaggagagaatgggattacacaaattagttccaccgcagagtcttttcataagcagaacggcacgggtacacctcaagtggagacaaacacctcagaggatggcgaatcttctggtgcaaacgattccctcagaactccagagcaaggttccaacggcacagacggcgcttcccagaaaaccccatcgagcaccggtccgagcccagtgtttgacataaaagccgtcagtattagccctacgaatgtgatcttgacatggaaaagcaacgatacagctgcgtccgaatacaaatacgtggtgaaacacaaaatggaaaacgaaaagaccattacagtcgtccaccagccttggtgtaatatcaccgggcttagacccgcaaccagctacgtgtttagcatcacccccgggattggaaacgagacttggggtgacccccgggtcatcaaagtgatcaccgagcctattccagtttcagacttgagggtggccctgacaggagttcggaaggccgcactctcatggtcaaatggcaatggcacagcctcttgccgcgttctgttagaaagcattgggtcgcacgaggagttgactcaggatagccgcctccaggtcaatatctctggactgaagccaggtgtccagtacaatatcaacccttatctcctacagtccaataaaaccaagggcgatcctctcggcacagaaggtggcttagatgcttctaataccgaaagaagtcgcgcaggatcaccaacggcccccgtgcatgatgagagcctggtcgggccagtggacccaagctctggccagcagtccagagacacagaggtgcttctggtcggtcttgaacccgggacacgatataacgccaccgtctattcacaggccgctaatggaacggaaggacagccccaagctatcgaatttcgaaccaacgctatccaggtatttgacgttacagccgtgaacattagcgcgacctctctgacacttatatggaaggtctctgacaacgagtcgtcgtccaattatacgtacaagattcacgtcgcaggcgaaacggactcatccaacttgaacgtttccgagccacgggcagtgatccccggtctgagaagctctactttctataacattaccgtgtgccccgtccttggagacatcgaaggtacccccggctttctccaggtgcatacaccaccagtgccggtgagtgacttccgagtgactgtggtaagcacaactgaaatcggcctggcctggagctctcacgacgccgagtcgttccagatgcacattactcaagagggagccggtaactcccgagttgagattacaaccaatcagtctattatcatcggcggactgtttccgggtacaaagtactgttttgaaatagtccctaagggccctaacggaaccgagggggcaagccggaccgtgtgtaacaggaccggctag

SEQ ID NO: 39102 - DNA, 1278 bp, Artificial Sequence
  derived and/or modified sequence
atgaaacccgctgcccgtgaagcgaggttgcccccaagaagccccggattgagatgggctctccccctcctgctgcttcttctgcgcttaggtcagattctttgtgccggaggaacaccctccccaataccggatcccagcgtagctaccgtcgccaccggggaaaacggtatcacacagatttccagcaccgcggaatccttccataagcaaaacggtacagggaccccccaggtggaaactaacaccagtgaggatggagaatccagcggggcaaacgactctctgcgcacaccagagcaagggtctaatggcacagacggggctagtcagaagacccctagctccaccgggccatctccggtcttcgatatcaaggctgtgtccatctcgcccaccaatgtaatcctcacttggaaatccaacgacaccgctgcctctgagtacaaatatgtcgtaaagcataagatggaaaacgaaaagaccataaccgtcgtgcatcaaccctggtgcaatattacgggcctgagacccgctacgtcatatgtgttctcaatcacgccgggtattggaaacgagacttggggcgatccccgagtaattaaggtcattaccgagcctatccctgtaagcgacctccgcgtcgccttgaccggggtgcggaaggcggctctgtcatggtccaacggtaacggaactgcaagctgcagggtcctcctagagagtatcggaagtcacgaggagttaacacaagattcacgcttacaggtgaacattagtggtctgaagcccggagtccagtacaatatcaatccatacctactgcagagcaacaaaacgaagggagaccccttgggaacagaaggtggcctggatgctagcaacacagagaggagtcgcgctggatcacccacagccccagtgcacgatgaaagcttggttggccctgtggaccccagtagcggacagcagtcacgagacacagaggtattactagttggcctcgagccaggcacccggtacaacgctacagtgtattcccaggccgctaatggcaccgagggtcagccccaggccatcgagttcagaacaaacgctattcaagtcttcgacgtgaccgccgttaacatcagcgcaacttctctgactctgatctggaaagtttctgataatgaatctagctcaaactacacttacaagatacatgtagccggtgaaactgactcgtccaaccttaatgtgtccgagccaagagccgtcatacctggcttgagatag

SEQ ID NO: 39103 - DNA, 1620 bp, Artificial Sequence
  derived and/or modified sequence
atgaagcctgctgcaagagaagcacgcctgcctccaagatcaccgggtttgagatgggccctgccattgttattactcctgcttcggctgggccagatactgtgtgccggtggcactccatcccccattcccgatccatccgtggcgacggtcgctactggcgagaatgggatcacacagatttcctccacggccgaaagctttcataagcagaacgggactgggactcctcaagtcgagacaaacacctctgaagatggcgagagctccggagctaatgactccctgcgtacacccgagcaagggtcgaatggaacagatggtgccagccagaagacacccagctcaacaggcccaagccccgtgtttgacattaaggcagtaagcatctcaccaactaacgttatcttaacttggaaatcaaatgacacagctgcctccgagtacaaatatgtggtgaagcacaaaatggagaatgaaaaaaccatcacagtggtgcaccagccatggtgcaatataaccggcctgaggccagcgacgtcatacgtgttcagtatcacgcccggaatcggcaatgagacgtggggggacccgagggtcatcaaggtcattaccgaaccgatccccgtctccgatctcagggtggcgctcaccggggtgcgtaaggccgctttgtcttggagtaacggaaatggcacagcctcctgtagagtgctgctggaatcgattggctctcacgaggagctcacccaggacagcagactgcaagtgaatatctcaggactgaaaccaggggtacagtacaacataaatccgtacctcctacagagcaataaaactaaaggcgatcccctcggcaccgagggaggactggacgcttccaatacagaaaggtcaagggccggtagcccgactgctccagtccacgatgaatccttggttggccctgtggacccaagctccggacagcagtctagagataccgaggtgctgctcgtaggcctggaacccggaacccgatataatgccaccgtgtatagtcaagcagccaatgggactgaaggacaaccacaggccatcgaatttcggactaacgccattcaggtgtttgacgtgaccgccgttaatatatccgcaactagcctcacactcatttggaaagtgagcgacaatgagagcagttctaattatacttacaaaattcatgtggctggcgaaacagattccagtaatctgaacgtgtcagagccacgggcagtcattcctgggttgaggtctagtacattctacaacatcaccgtgtgtccagtgctgggcgatatcgagggcacaccaggtttcctgcaggtgcacacacctccggtgccagtttctgacttcagagtgacagtagtaagtactacagagattggccttgcatggtcttctcatgacgctgaaagcttccagatgcatattacacaggagggcgctggaaactcccgtgtggagatcacaactaatcaatccatcatcatagggggtctgttcccaggtaccaaatactgtttcgagatcgtccctaaggggcctaacggaaccgaaggagctagcaggactgtctgcaataggactggctag

SEQ ID NO: 39104 - DNA, 3158 bp, Artificial Sequence
  derived and/or modified sequence
ggaggaggcagcgggagcagccgcgggagccgggaccgggtagccgcgcgctgggggtgggcgccgctcgctccgccccgcgaagcccctgcgcgctcagggacgcggcccccccgcggcagccgcgctaggctccggcgtgtggccgcggccgccgccgccgctgccatgtctccggggaagcccggggcgggcggagcggggacgaggcggaccggctggcggaggaggaggcgaaggagacggcaggaggcggcgacgacggtgcccgggctcgggcgcacggcggggcccgattcgcgcgtccggggcacgttccagggcgcgcggggcatgaagccggcggcgcgggaggcgcggctgcctccgcgctcgcccgggctgcgctgggcgctgccgctgctgctgctgctgctgcgcctgggccagatcctgtgcgcaggtggcacccctagtccaattcctgacccttcagtagcaactgttgccacaggggaaaatggcataacgcagatcagcagtacagcagaatcctttcataaacagaatggaactggaacacctcaggtggaaacaaacaccagtgaggatggtgaaagctctggagccaacgatagtttaagaacacctgaacaaggatctaatgggactgatggggcatctcaaaaaactcccagtagcactgggcccagtcctgtgtttgacattaaagctgtttccatcagtccaaccaatgtgatcttaacttggaaaagtaatgacacagctgcttctgagtacaagtatgtagtaaagcataagatggaaaatgagaagacaattactgttgtgcatcaaccatggtgtaacatcacaggcttacgtccagcgacttcatatgtattctccatcactccaggaataggcaatgagacttggggagatcccagagtcataaaagtcatcacagagccgatcccagtttctgatctccgtgttgccctcacgggtgtgaggaaggctgctctctcctggagcaatggcaatggcactgcctcctgccgggttcttcttgaaagcattggaagccatgaggagttgactcaagactcaagacttcaggtcaatatctcgggcctgaagccaggggttcaatacaacatcaacccgtatcttctacaatcaaataagacaaagggagaccccttgggcacagaaggtggcttggatgccagcaatacagagagaagccgggcagggagccccaccgcccctgtgcatgatgagtccctcgtgggacctgtggacccatcctccggccagcagtcccgagacacggaagtcctgcttgtcgggttagagcctggcacccgatacaatgccaccgtttattcccaagcagcgaatggcacagaaggacagccccaggccatagagttcaggacaaatgctattcaggtttttgacgtcaccgctgtgaacatcagtgccacaagcctgaccctgatctggaaagtcagcgataacgagtcgtcatctaactatacctacaagatacatgtggcgggggagacagattcttccaatctcaacgtcagtgagcctcgcgctgtcatccccggactccgctccagcaccttctacaacatcacagtgtgtcctgtcctaggtgacatcgagggcacgccgggcttcctccaagtgcacaccccccctgttccagtttctgacttccgagtgacagtggtcagcacgacggagatcggcttagcatggagcagccatgatgcagaatcatttcagatgcatatcacacaggagggagctggcaattctcgggtagaaataaccaccaaccaaagtattatcattggtggcttgttccctggaaccaagtattgctttgaaatagttccaaaaggaccaaatgggactgaaggggcatctcggacagtttgcaatagaactggatgatttgaacacctgcctggaattccatcatctgaaacagagttggcagataagaatggcccctatgccaaatttggctcattgtctgtttttgtaaataaagttttattggatcacagccatgttcatttgcttatgtactgtctatggctactttggtgctagaattgagtagtggcagcagagaacgtgtggcttgtgaagcctgagatatttattttctggccattacagagaatgtttgctgacctctgggctagatcagtggttttcaaattgtggtccagggctctctagggatccctaggttctttcaaggggtctccaaggtagtattatcataacaatactaaaatgttatttggctttttcattctcattctcttttggagttttccaactttgatccgatatgggatgacattgtctctcaggtctaatggaatatatgctgtggattcttacattttaaaaatttcttcattttaaatccctgatatagtaaatattaataaatataacctatgtaaatacaaattctctgagagccttaataacttttaagatggtaaagaagtcctgagagcaaaaagtttaagaacctctggtcaagatgtgttagaaattaactactgtgctgtgttgggcaggtggactgttcacagtctttcctaaacaacactgtgatgagatactttgttagttctagaaggctaattgaaattgataaaatcattttatagtcagctacggtggcctgcacccatcgtcccagctacttgagaggctgcggcaggaggattgcttggcccaacagttgcagactagcaccagcctgggagaccctgtctcaaaaaaaaatttttttttatagaaacagtttaaattattaaattatttctaggcctacaggagaaacttctgggaaatcctagagagtaatgttcattattgttgttttaaaattttgaaataattgttttttggaaaggttgaaaaacatacagtcttccttgatctaagattcaagatagttgaaatcttttatacagagggtagaataaagatatacctaatgtaaatgatgagttaatgggtgcagcacaccaacatggcacatgtatacatatgtaacaaacctgcacgttgtgcacatgtaccctagaacttaaagtataataaaaacatatatatatatataaaagaaa

SEQ ID NO: 39105 - DNA, 1278 bp, Artificial Sequence
  derived and/or modified sequence
atgaagcccgccgccagagaggccagactgccccccagaagccccggcctgagatgggccctgcccctgctgctgctgctgctgagactgggccagatcctgtgcgccggcggcacccccagccccatccccgaccccagcgtggccaccgtggccaccggcgagaacggcatcacccagatcagcagcaccgccgagagcttccacaagcagaacggcaccggcaccccccaggtggagaccaacaccagcgaggacggcgagagcagcggcgccaacgacagcctgagaacccccgagcagggcagcaacggcaccgacggcgccagccagaagacccccagcagcaccggccccagccccgtgttcgacatcaaggccgtgagcatcagccccaccaacgtgatcctgacctggaagagcaacgacaccgccgccagcgagtacaagtacgtggtgaagcacaagatggagaacgagaagaccatcaccgtggtgcaccagccctggtgcaacatcaccggcctgagacccgccaccagctacgtgttcagcatcacccccggcatcggcaacgagacctggggcgaccccagagtgatcaaggtgatcaccgagcccatccccgtgagcgacctgagagtggccctgaccggcgtgagaaaggccgccctgagctggagcaacggcaacggcaccgccagctgcagagtgctgctggagagcatcggcagccacgaggagctgacccaggacagcagactgcaggtgaacatcagcggcctgaagcccggcgtgcagtacaacatcaacccctacctgctgcagagcaacaagaccaagggcgaccccctgggcaccgagggcggcctggacgccagcaacaccgagagaagcagagccggcagccccaccgcccccgtgcacgacgagagcctggtgggccccgtggaccccagcagcggccagcagagcagagacaccgaggtgctgctggtgggcctggagcccggcaccagatacaacgccaccgtgtacagccaggccgccaacggcaccgagggccagccccaggccatcgagttcagaaccaacgccatccaggtgttcgacgtgaccgccgtgaacatcagcgccaccagcctgaccctgatctggaaggtgagcgacaacgagagcagcagcaactacacctacaagatccacgtggccggcgagaccgacagcagcaacctgaacgtgagcgagcccagagccgtgatccccggcctgagatag

SEQ ID NO: 39106 - DNA, 1620 bp, Artificial Sequence
  derived and/or modified sequence
atgaagcccgccgccagagaggccagactgccccccagaagccccggcctgagatgggccctgcccctgctgctgctgctgctgagactgggccagatcctgtgcgccggcggcacccccagccccatccccgaccccagcgtggccaccgtggccaccggcgagaacggcatcacccagatcagcagcaccgccgagagcttccacaagcagaacggcaccggcaccccccaggtggagaccaacaccagcgaggacggcgagagcagcggcgccaacgacagcctgagaacccccgagcagggcagcaacggcaccgacggcgccagccagaagacccccagcagcaccggccccagccccgtgttcgacatcaaggccgtgagcatcagccccaccaacgtgatcctgacctggaagagcaacgacaccgccgccagcgagtacaagtacgtggtgaagcacaagatggagaacgagaagaccatcaccgtggtgcaccagccctggtgcaacatcaccggcctgagacccgccaccagctacgtgttcagcatcacccccggcatcggcaacgagacctggggcgaccccagagtgatcaaggtgatcaccgagcccatccccgtgagcgacctgagagtggccctgaccggcgtgagaaaggccgccctgagctggagcaacggcaacggcaccgccagctgcagagtgctgctggagagcatcggcagccacgaggagctgacccaggacagcagactgcaggtgaacatcagcggcctgaagcccggcgtgcagtacaacatcaacccctacctgctgcagagcaacaagaccaagggcgaccccctgggcaccgagggcggcctggacgccagcaacaccgagagaagcagagccggcagccccaccgcccccgtgcacgacgagagcctggtgggccccgtggaccccagcagcggccagcagagcagagacaccgaggtgctgctggtgggcctggagcccggcaccagatacaacgccaccgtgtacagccaggccgccaacggcaccgagggccagccccaggccatcgagttcagaaccaacgccatccaggtgttcgacgtgaccgccgtgaacatcagcgccaccagcctgaccctgatctggaaggtgagcgacaacgagagcagcagcaactacacctacaagatccacgtggccggcgagaccgacagcagcaacctgaacgtgagcgagcccagagccgtgatccccggcctgagaagcagcaccttctacaacatcaccgtgtgccccgtgctgggcgacatcgagggcacccccggcttcctgcaggtgcacaccccccccgtgcccgtgagcgacttcagagtgaccgtggtgagcaccaccgagatcggcctggcctggagcagccacgacgccgagagcttccagatgcacatcacccaggagggcgccggcaacagcagagtggagatcaccaccaaccagagcatcatcatcggcggcctgttccccggcaccaagtactgcttcgagatcgtgcccaagggccccaacggcaccgagggcgccagcagaaccgtgtgcaacagaaccggctag

SEQ ID NO: 39107 - protein, 731 aa, Artificial Sequence
  derived and/or modified sequence
LPTGFVAPILCVLLPSPTREAATVASATGDSASERESAAPAAAPTAEAPPPSVVTRPEPQALPSPAIRAPLPDLYPFGTMRGGGFGDRDRDRDRGGFGARGGGGLPPKKFGNPGERLRKKKWDLSELPKFEKNFYVEHPEVARLTPYEVDELRRKKEITVRGGDVCPKPVFAFHHANFPQYVMDVLMDQHFTEPTPIQCQGFPLALSGRDMVGIAQTGSGKTLAYLLPAIVHINHQPYLERGDGPICLVLAPTRELAQQVQQVADDYGKCSRLKSTCIYGGAPKGPQIRDLERGVEICIATPGRLIDFLESGKTNLRRCTYLVLDEADRMLDMGFEPQIRKIVDQIRPDRQTLMWSATWPKEVRQLAEDFLRDYTQINVGNLELSANHNILQIVDVCMESEKDHKLIQLMEEIMAEKENKTIIFVETKRRCDDLTRRMRRDGWPAMCIHGDKSQPERDWVLNEFRSGKAPILIATDVASRGLDVEDVKFVINYDYPNSSEDYVHRIGRTARSTNKGTAYTFFTPGNLKQARELIKVLEEANQAINPKLMQLVDHRGGGGGGGKGGRSRYRTTSSANNPNLMYQDECDRRLRGVKDGGRRDSASYRDRSETDRAGYANGSGYGSPNSAFGAQAGQYTYGQGTYGAAAYGTSSYTAQEYGAGTYGASSTTSTGRSSQSSSQQFSGIGRSGQQPQPLMSQQFAQPPGATNMIGYMGQTAYQYPPPPPPPPPSRK

SEQ ID NO: 39108 - protein, 737 aa, Artificial Sequence
  derived and/or modified sequence
PNLPTGFVAPILCVLLPSPTREAATVASATGDSASERESAAPAAAPTAEAPPPSVVTRPEPQALPSPAIRAPLPDLYPFGTMRGGGFGDRDRDRDRGGFGARGGGGLPPKKFGNPGERLRKKKWDLSELPKFEKNFYVEHPEVARLTPYEVDELRRKKEITVRGGDVCPKPVFAFHHANFPQYVMDVLMDQHFTEPTPIQCQGFPLALSGRDMVGIAQTGSGKTLAYLLPAIVHINHQPYLERGDGPICLVLAPTRELAQQVQQVADDYGKCSRLKSTCIYGGAPKGPQIRDLERGVEICIATPGRLIDFLESGKTNLRRCTYLVLDEADRMLDMGFEPQIRKIVDQIRPDRQTLMWSATWPKEVRQLAEDFLRDYTQINVGNLELSANHNILQIVDVCMESEKDHKLIQLMEEIMAEKENKTIIFVETKRRCDDLTRRMRRDGWPAMCIHGDKSQPERDWVLNEFRSGKAPILIATDVASRGLDVEDVKFVINYDYPNSSEDYVHRIGRTARSTNKGTAYTFFTPGNLKQARELIKVLEEANQAINPKLMQLVDHRGGGGGGGKGGRSRYRTTSSANNPNLMYQDECDRRLRGVKDGGRRDSASYRDRSETDRAGYANGSGYGSPNSAFGAQAGQYTYGQGTYGAAAYGTSSYTAQEYGAGTYGASSTTSTGRSSQSSSQQFSGIGRSGQQPQPLMSQQFAQPPGATNTLLLLPLLLLHVNETTQVVVTPADLITF

SEQ ID NO: 39109 - DNA, 2196 bp, Artificial Sequence
  derived and/or modified sequence
ctacccaccggctttgtcgcacctattttgtgcgtgctgctgccatcgccaaccagggaggctgcaactgttgccagcgccaccggcgattccgcttcagagcgagaatctgcagctcccgctgctgcgcccaccgcggaagcacccccgcccagtgttgttactaggcccgaacctcaggccttgccgagtcccgccattagggcgccccttccagatctatatccttttgggactatgagagggggtggcttcggagacagggaccgcgaccgagataggggaggctttggcgcgcgtggcggaggagggcttcctcctaagaaattcgggaatcctggcgaacgactgcgcaagaagaaatgggacctgtcagagttgcctaaattcgaaaagaacttttacgtggaacatcctgaggtcgcccggctgactccctatgaagtggacgagttaaggaggaaaaaggagataacagttcgtgggggggacgtgtgcccaaagcccgtattcgcctttcaccacgccaatttcccccagtacgtgatggatgtactgatggaccaacacttcaccgaacctactcccatccagtgtcagggattcccattggcgctgtccgggagggacatggtggggatcgctcagactggctccggcaaaaccttagcctaccttcttccagctattgtccacattaatcaccaaccctacctggagaggggagacggtccaatttgtctggtgttggccccaaccagggaactggctcaacaggtgcagcaggtggccgatgattatggaaagtgctccaggctgaagtctacttgcatctacggcggtgcacctaaggggccccagattcgggacctagaacgaggagtcgaaatatgtatcgccactcctggaaggctcattgactttctcgagtctggtaagaccaatctgaggagatgtacctacctggtgcttgatgaggccgatcggatgctggacatgggatttgagccccagatccgcaagattgttgatcagattaggcccgatcggcaaaccctgatgtggagtgctacttggcccaaggaggtgcgacagcttgcagaagatttcttgagagattacactcagatcaatgtggggaaccttgaactgtctgcaaatcacaacatactgcaaatcgtggacgtttgcatggaatcagagaaagatcacaaattgatccaactgatggaggaaatcatggccgagaaagagaataagacaatcatttttgtggagaccaagcggcggtgtgatgacctgacaagaagaatgaggagagacggctggccagccatgtgcatccacggagacaaaagccaaccagagcgcgattgggtcctcaatgaattcaggtcggggaaagctcctatcctgatcgccactgatgtagcaagtagggggctcgatgtcgaggatgtgaagtttgtgattaactacgactacccaaactcgtcagaggattacgtgcaccgcatcggacggacggctcgttctactaacaaaggtacagcatacaccttcttcacccccgggaacctcaagcaggctcgggaattgatcaaggtattggaggaagcaaatcaggccattaaccccaagctcatgcagttagtggaccaccggggcggcggcggtgggggagggaaaggaggtagatcccggtatcgaactacaagtagtgccaacaacccaaacttgatgtaccaagacgaatgcgatagacgcctccgcggcgtcaaagacggcggacggcgggattccgcatcatacagggatagatccgagacagacagagctggatacgcaaatggctccggatacggttctcccaacagtgcctttggagcccaggccggccagtatacctatgggcagggtacctatggcgctgcggcatatggcacatcatcctataccgcccaggaatacggtgccgggacgtatggggcaagtagcactacgtctacagggagatcttcacagagttcatcccagcagttcagcggcatcggccgatccggacagcagcctcagccacttatgagtcagcagttcgcacagcccccaggagctaccaatatgatcgggtacatgggtcagactgcatatcagtaccccccaccaccccccccccccccgccttcccgcaaatag

SEQ ID NO: 39110 - DNA, 2214 bp, Artificial Sequence
  derived and/or modified sequence
ccaaacctgccaacgggattcgttgcacctatcctatgcgtgctgttgccgtcccccacaagggaggccgccacagtggcctctgctaccggtgacagtgctagtgagcgggaatcagctgctcctgctgctgccccaacagcggaagcacctcccccatctgttgtaacaaggccagagcctcaagccttgcctagcccagctatccgggccccactgccagatctgtaccccttcggcacaatgcgaggagggggatttggggatcgcgacagggatcgggacagagggggattcggagccagaggaggagggggcttgccccctaaaaagttcggcaatcccggtgagagacttcgtaagaagaaatgggacctgagcgaacttcctaaattcgagaaaaacttttatgttgagcatcctgaggttgccagactgaccccttatgaggtggatgagttgcgccgaaaaaaagagatcaccgtccgtggcggtgatgtctgtccaaagccggtttttgcatttcatcacgccaatttcccccagtacgtgatggacgttttgatggaccagcactttacagaacccacccccatccaatgccaaggtttccctttagcattatccggacgcgatatggttggaattgcacagaccgggtccggaaaaaccctggcttacttgttacccgccatagtgcatattaatcaccagccttacctggaacgaggagacggccccatctgcctcgtcctagcaccaactagagagctggcgcaacaggtgcaacaggtggccgatgactacggaaaatgctcgcgcctgaaatccacctgcatctacggtggggctcccaaagggcctcagattagggacctcgaaagaggggtggaaatctgcatcgcaacacctgggcgtctgatcgacttcctggagagcggcaaaaccaacctcagacgttgcacatatctggtgctggatgaggcagataggatgctggacatgggtttcgagccgcagatacgaaagatagtcgaccagattcgaccggaccgccagactctcatgtggtcagccacgtggccgaaggaggtcagacaactggccgaggactttctaagggactacacacagatcaacgtgggcaatcttgaactgtctgcaaatcacaacattctgcagatcgtagacgtgtgcatggagtctgaaaaagaccacaagctgatccagctcatggaggagatcatggccgagaaagagaacaagactatcatcttcgtggaaacaaagcgaaggtgcgatgacctgactagaagaatgcgtagagatggctggcccgccatgtgtattcacggtgacaagtcacagcctgaaagggactgggttctaaacgaattcagatccggcaaggcacctatactgatcgctacagacgtcgcctctagaggacttgacgtggaggacgtcaagttcgttatcaattatgactatccgaactcaagcgaggattacgtgcataggatcggcagaaccgccaggtccacaaacaaaggtaccgcgtacacatttttcactccaggtaatctgaagcaggcccgcgagctaattaaagtgcttgaggaagccaaccaggctataaaccccaagcttatgcagcttgtggatcataggggcggtggcggtggagggggaaaagggggccggtctaggtaccggacaacgtcttccgccaacaaccccaatcttatgtaccaggatgaatgtgatcgccggctgcgcggggttaaagacggggggcgtagagacagcgcgtcctaccgggatcggagtgagacagatcgggcaggctacgctaatggcagtggatacggatcgcctaattccgcgttcggcgcccaggccggccagtacacatatggccagggaacgtacggggccgctgcgtacggaacgagctcctataccgcacaggaatacggggccggcacgtatggtgcatcctccactacctcgacaggccgttcatctcagagctcctcacaacagttcagcggtattgggagaagcggccagcagccacaaccactgatgagccagcaattcgctcagccaccgggcgcgaccaatacacttctgcttcttcccttgctgctgctgcacgttaacgaaaccacacaggtcgttgtgacacctgcggatctaatcaccttttag

SEQ ID NO: 39111 - DNA, 2196 bp, Artificial Sequence
  derived and/or modified sequence
ctgcccactggatttgtggcccccatcctgtgtgtgctgctgcccagccccacccgggaggccgccaccgtggccagcgccaccggggacagcgccagcgagcgggagagcgctgccccagctgctgcccccacagctgaggcccccccacccagcgtggtgaccaggcctgagccccaggccctgcccagccctgccatccgggcccccctgcctgacctgtaccccttcggcaccatgaggggcggcggctttggagaccgggaccgggaccgggacagaggaggctttggagcccggggcggcggcggcctgccccccaagaagtttggaaatcctggagagcggctgaggaagaagaagtgggacctgtctgagctgcccaagtttgagaagaacttctacgtggagcaccctgaggtggcccggctgaccccctatgaggtggatgagctgcggaggaagaaggagatcaccgtgagaggaggagatgtgtgccccaagcctgtgtttgccttccaccacgccaacttcccccagtatgtgatggatgtgctgatggaccagcacttcacagagcccacccccatccagtgccagggcttccccctggccctgagcggccgggacatggtgggcatcgcccagacaggcagcggcaagaccctggcctacctgctgcctgccatcgtgcacatcaaccaccagccctacctggagagaggagatggccccatctgcctggtgctggcccccacccgggagctggcccagcaggtgcagcaggtggctgatgattatggcaagtgcagccggctgaagagcacctgcatctatggaggagcccccaagggcccccagatccgggacctggagcggggcgtggagatctgcatcgccaccccaggccgcctgattgacttcctggagagcggcaagaccaacctgcggcgctgcacctacctggtgctggatgaagctgacaggatgctggacatgggctttgagccccagatcaggaagatcgtggaccagatccggccagaccggcagaccctgatgtggagcgccacctggcccaaggaggtgcggcagctggccgaggacttcctgcgggactacacccagatcaacgtgggcaacctggagctgagcgccaaccacaacatcctgcagatcgtggatgtgtgcatggagagcgagaaggaccacaagctgatccagctgatggaggagatcatggccgagaaggagaacaagaccatcatctttgtggagaccaagagaagatgtgatgacctgaccaggaggatgagaagagatggctggccagccatgtgcatccatggagacaagagccagcctgagcgggactgggtgctgaatgagttccgcagcggcaaggcccccatcctgattgccacagatgtggccagccggggcctggatgtggaggatgtgaagtttgtgatcaactatgactaccccaacagcagcgaggactatgtgcaccgcatcggccgcacagcccggagcaccaacaagggcacagcctacaccttcttcaccccaggcaacctgaagcaggcccgggagctgatcaaggtgctggaggaggccaaccaggccatcaaccccaagctgatgcagctggtggaccaccggggcggcggcggcggcggcggcaaaggaggccgcagccgctaccgcaccaccagcagcgccaacaaccccaacctgatgtaccaggatgaatgtgaccggcggctgcggggcgtgaaggatggcggccggcgggacagcgccagctacagagacagaagtgaaacagacagagctggctacgccaatggaagtggctacggcagccccaacagcgccttcggggcccaggccggccagtacacctacggccagggcacctacggggctgctgcctacggcaccagcagctacacagcccaggagtatggagctggcacctacggggccagcagcaccaccagcacaggccgcagcagccagagcagcagccagcagttcagcggcatcggccgcagcggccagcagccccagcccctgatgagccagcagtttgcccagcccccaggggccaccaacatgattggctacatgggccagacagcctaccagtacccacctcctcctcctcctcctccacccagcaggaagtag

SEQ ID NO: 39112 - DNA, 2214 bp, Artificial Sequence
  derived and/or modified sequence
cccaacctgcccactggatttgtggcccccatcctgtgtgtgctgctgcccagccccacccgggaggccgccaccgtggccagcgccaccggggacagcgccagcgagcgggagagcgctgccccagctgctgcccccacagctgaggcccccccacccagcgtggtgaccaggcctgagccccaggccctgcccagccctgccatccgggcccccctgcctgacctgtaccccttcggcaccatgaggggcggcggctttggagaccgggaccgggaccgggacagaggaggctttggagcccggggcggcggcggcctgccccccaagaagtttggaaatcctggagagcggctgaggaagaagaagtgggacctgtctgagctgcccaagtttgagaagaacttctacgtggagcaccctgaggtggcccggctgaccccctatgaggtggatgagctgcggaggaagaaggagatcaccgtgagaggaggagatgtgtgccccaagcctgtgtttgccttccaccacgccaacttcccccagtatgtgatggatgtgctgatggaccagcacttcacagagcccacccccatccagtgccagggcttccccctggccctgagcggccgggacatggtgggcatcgcccagacaggcagcggcaagaccctggcctacctgctgcctgccatcgtgcacatcaaccaccagccctacctggagagaggagatggccccatctgcctggtgctggcccccacccgggagctggcccagcaggtgcagcaggtggctgatgattatggcaagtgcagccggctgaagagcacctgcatctatggaggagcccccaagggcccccagatccgggacctggagcggggcgtggagatctgcatcgccaccccaggccgcctgattgacttcctggagagcggcaagaccaacctgcggcgctgcacctacctggtgctggatgaagctgacaggatgctggacatgggctttgagccccagatcaggaagatcgtggaccagatccggccagaccggcagaccctgatgtggagcgccacctggcccaaggaggtgcggcagctggccgaggacttcctgcgggactacacccagatcaacgtgggcaacctggagctgagcgccaaccacaacatcctgcagatcgtggatgtgtgcatggagagcgagaaggaccacaagctgatccagctgatggaggagatcatggccgagaaggagaacaagaccatcatctttgtggagaccaagagaagatgtgatgacctgaccaggaggatgagaagagatggctggccagccatgtgcatccatggagacaagagccagcctgagcgggactgggtgctgaatgagttccgcagcggcaaggcccccatcctgattgccacagatgtggccagccggggcctggatgtggaggatgtgaagtttgtgatcaactatgactaccccaacagcagcgaggactatgtgcaccgcatcggccgcacagcccggagcaccaacaagggcacagcctacaccttcttcaccccaggcaacctgaagcaggcccgggagctgatcaaggtgctggaggaggccaaccaggccatcaaccccaagctgatgcagctggtggaccaccggggcggcggcggcggcggcggcaaaggaggccgcagccgctaccgcaccaccagcagcgccaacaaccccaacctgatgtaccaggatgaatgtgaccggcggctgcggggcgtgaaggatggcggccggcgggacagcgccagctacagagacagaagtgaaacagacagagctggctacgccaatggaagtggctacggcagccccaacagcgccttcggggcccaggccggccagtacacctacggccagggcacctacggggctgctgcctacggcaccagcagctacacagcccaggagtatggagctggcacctacggggccagcagcaccaccagcacaggccgcagcagccagagcagcagccagcagttcagcggcatcggccgcagcggccagcagccccagcccctgatgagccagcagtttgcccagcccccaggggccaccaacaccctgctgctgctgcccctgctgctgctgcacgtgaatgagaccacccaggtggtggtgaccccagctgacctgatcaccttctag

SEQ ID NO: 39113 - DNA, 2196 bp, Artificial Sequence
  derived and/or modified sequence
ctgcccaccggcttcgtggcccccatcctgtgcgtgctgctgcccagtccaacccgggaagccgccacagtggctagcgctaccggagatagtgctagcgaaagggagtcagcggctcctgcggcggcacccaccgcagaagcacctcctcctagtgttgttacccgcccggaacctcaagccttaccatctccggctattagagcccctttaccagatctgtacccctttggaacaatgcgtgggggcggctttggcgacagagatagagatcgggatagaggcggattcggcgcaaggggaggcggagggctgccacctaaaaaatttggcaatcctggcgagagactgcggaagaaaaaatgggacttgagcgagctgccaaagtttgagaagaacttttacgtggaacatcctgaagtggccagactcacaccatatgaggtggatgaactgcggaggaaaaaagaaattactgtgagaggcggagacgtttgccctaagcctgtcttcgcttttcaccatgcaaatttcccacagtacgtgatggacgtcctaatggatcagcactttacggaaccaaccccaatccagtgtcagggatttcctctggcactctccggacgcgacatggttggcatcgctcagactgggtctggcaagaccctcgcttacctgttaccagcaatcgtgcacatcaatcaccagccttacctcgagagaggggacggcccaatttgtttggtcttggcacctacacgtgaattagcacagcaagtgcagcaagttgcagacgactatgggaaatgcagcagactcaaaagcacatgcatctacggcggcgcacctaagggtccccaaattagagatctggagaggggcgtggaaatctgcattgccaccccaggtcggttgatagactttctcgaatctggtaaaaccaatcttcgcagatgtacctatttggttcttgatgaggcagatagaatgctcgacatgggatttgagccccagattagaaaaatcgtggaccagattaggcctgatcgccaaacactcatgtggtccgccacctggcctaaggaggtgcgtcagctggcggaggatttccttagggattatacgcagattaacgtggggaatttagaactgagcgctaatcataacatcttgcagattgtggatgtgtgtatggaatcagaaaaggatcacaagctgattcaactcatggaggagattatggcggagaaggaaaataaaactatcatcttcgtggagacaaaaagaaggtgcgatgacctgactaggagaatgcgacgggatgggtggccagctatgtgcatccatggcgataaaagtcagcccgagagagactgggttctgaatgaatttaggagcggaaaggctcctatcttaatagctaccgatgtggcaagccgtggcctggatgttgaagacgtgaagttcgttattaattatgactacccaaattcttccgaggactacgtgcatagaataggccggacagcgagaagcacgaataaagggaccgcctatacattcttcactcctggaaatctgaagcaggccagggaactgattaaagtcctggaggaggctaatcaagcaatcaaccccaaactcatgcaattggttgatcaccgagggggaggaggaggaggtgggaagggaggacgctccaggtatcgaacaacttcctctgcaaacaatccaaacctgatgtatcaagacgagtgcgatcgaagactgcgtggtgtcaaggacggtggacgccgtgattcggcctcgtaccgtgaccgttccgaaacggacagggccggatatgccaatggaagtggctatggctctccaaacagcgcattcggggctcaggcaggacaatacacttatgggcagggaacttacggcgccgccgcgtatgggacctctagttatactgcccaggaatatggagccggcacatatggcgcgagttccacgactagtaccggaagatcctcacaatcatcatcacagcagttttcgggtatcggcaggtcgggccaacaacctcaacctttaatgtcccagcagttcgcccagccgccgggtgcgaccaacatgataggctacatgggccagacagcctatcaatacccccctccccctccacctccgcccccgtccagaaagtag

SEQ ID NO: 39114 - DNA, 2214 bp, Artificial Sequence
  derived and/or modified sequence
cccaacctgcccaccggcttcgtggcccccatcctgtgcgtgctgctgccttcacccactcgggaagcagccaccgtcgcttctgcaactggcgactctgcttcagaacgggaatcggcagcaccagcagctgccccgaccgccgaagctccacctccaagcgttgtgacaagaccggaaccccaggcactgccatcccccgcaatacgcgcccctctgcctgatctctatccgttcgggacaatgcgggggggaggatttggagatagagatcgcgaccgggaccgcggcggttttggagctagaggagggggaggcctaccaccaaaaaaatttgggaacccgggcgagcgcctcagaaaaaaaaagtgggatctgtcagagcttccaaagttcgagaagaatttctacgtcgagcacccggaggtagcccggctcacaccatatgaagtggacgaactgcggcgcaagaaggaaattaccgtaaggggcggtgacgtatgtcctaaaccagttttcgcctttcatcatgctaattttcctcagtacgtaatggacgtgctgatggaccaacacttcacagagcccacacctatacaatgccaagggtttcccctggccctgagcggccgggatatggtcggaattgcccagacagggagcggcaagacgttggcttaccttttgccagcgatcgtgcatatcaatcatcagccttatctcgaacggggagacggcccaatatgtctggttctggctcccacccgggaactggcacaacaggttcaacaggtcgcggatgactatggaaaatgttctcggctcaaatctacctgcatctacggaggtgcacctaaaggaccccagatcagagacctggagcgaggggtcgaaatctgcatcgccacccctgggcggctgattgacttccttgagtcgggcaagacaaatctgcgaagatgtacgtatctggtcctggatgaagcagatagaatgctcgacatggggttcgagcctcagatacggaagattgttgatcagatacggccagaccgccaaactctgatgtggagcgccacgtggcccaaagaagtgcgtcagctcgccgaagacttccttagggactatacccaaatcaatgtgggtaatctggagttgagtgcaaaccacaatatcctccagatagtggacgtttgcatggagtcagaaaaagaccacaagttaattcagctcatggaggaaattatggccgagaaagagaacaagaccattatttttgtagagacaaaaaggcgctgcgacgacctcacgcgacggatgagacgagacgggtggcctgcgatgtgcatccacggagataagagccagccagagcgggactgggtgctgaatgaatttaggtctggtaaagctcccatcctcatcgctaccgacgttgcatcccggggattggacgtcgaagacgtcaaattcgtcatcaactatgattacccgaactcaagcgaggactacgtgcatcggatcggtaggacggcccgcagcacaaacaaggggaccgcctatacgtttttcacaccaggtaacctgaaacaggctcgggagctgattaaggttctagaagaagccaatcaagcaatcaacccaaagctcatgcaactagttgaccacaggggtggaggaggtggtggtggcaagggcggccgctcgaggtacaggactacgtcaagtgctaacaaccccaacttgatgtatcaagacgagtgcgatcgtaggcttaggggagtgaaagacggtgggagacgtgattccgcgtcctatcgggacaggtctgagaccgaccgcgcaggctacgccaacggctctggttacgggagcccaaactccgcctttggtgcacaggccggccagtatacttacggccaggggacctatggtgccgcagcctacgggacatcttcttatactgcccaggagtacggggctggaacttatggagcttcttccacaacaagcactggacgtagttcacagagctcatcccagcaattttcagggattggccgatcggggcagcagccacagcccctgatgtcacagcaatttgctcagccacccggtgctacaaacactttgttgcttctccccctgttactgctccatgttaatgagactacacaggtcgtggtcaccccggccgatctgatcactttttag

SEQ ID NO: 39115 - DNA, 2196 bp, Artificial Sequence
  derived and/or modified sequence
ctgcctaccgggttcgtggcacctatcctctgtgtcctgctgccttcccccacccgggaagccgctacagttgcctcagctaccggcgactctgcgtcagagcgcgaatctgcagcacccgcagccgctccgaccgcagaggcaccaccccctagtgtcgtcacgcgacccgaaccacaggcacttccctcccctgctatccgcgctccactgccagacctgtacccatttggtaccatgcgcggtggtggcttcggggatcgggaccgagatcgggaccgcggagggttcggcgcacgcggtggtgggggactccccccaaagaagtttggcaacccaggggaacggctgcggaaaaagaaatgggacctatcagagctgcccaagttcgaaaaaaacttctatgtggaacacccagaggttgctcggttgacaccatatgaagtagatgagctgcgcagaaaaaaggagatcactgtgagaggtggtgatgtctgtcctaagccagtgttcgcatttcaccacgccaactttccgcagtatgtcatggacgtactcatggaccagcactttacagaacctacacccatccagtgccagggtttccctctggccctcagcggtcgcgatatggtggggatcgctcagactggatctggtaagacattggcctatttgttgcccgcaatcgtacacatcaaccaccagccctacctcgagagaggggacgggccaatctgtttggtcttagcaccaaccagagagctggcacaacaggtgcagcaggttgcggacgattatggcaaatgttctcggctcaaaagcacctgtatttatggaggggcacctaaaggaccgcagataagagatcttgagcgaggggtggagatttgcatcgccacacccggacgactgattgactttctcgaatcaggcaagaccaatctcaggaggtgcacgtacttggtgcttgacgaggccgacaggatgctggatatgggatttgagccgcaaatacgtaaaatcgttgaccagattcgacccgacaggcagaccttaatgtggtcagctacatggccgaaggaggtcagacagttggcagaggacttcctacgagactatacccagatcaacgtcgggaatcttgaactctccgccaatcataacatccttcagatcgttgatgtttgtatggaaagcgaaaaagatcacaaactgatccagctgatggaagagattatggccgaaaaggagaacaagactattatattcgtggagacgaagcggcgatgcgatgatttaacacgcaggatgagaagagatggttggccggcaatgtgcattcatggtgacaaatcacagccggagcgagactgggtgcttaatgaattccgtagtggcaaagcaccaatactcatagccacagacgtcgcaagcagagggctcgacgtggaggatgttaaattcgtgattaactatgactaccctaacagttccgaagactatgttcatcggattggcagaactgcccgttccacaaataaaggaaccgcatatacatttttcactccagggaacctaaaacaggcccgagagctgatcaaggtcttagaagaggcaaaccaagccataaaccccaaactgatgcaactcgtggaccaccggggtggcggaggaggtggaggcaaagggggtcgcagtcggtacaggactaccagtagtgcaaacaaccccaatctgatgtatcaggacgagtgtgatcgcagactccggggtgtgaaagacgggggtcgacgagactctgccagttatcgtgaccgctccgaaacagatcgagccggatacgccaatggatcaggatacgggagtcctaattccgcttttggtgcccaagctggtcagtacacatatgggcagggtacttacggggcagccgcttatggaacctcaagctatacagcacaggaatatggcgcaggtacatacggagcctccagcaccacttcgacaggacgctcaagtcagtcttccagccagcagttcagtggaataggtagaagcgggcagcagccccaaccactcatgtcacagcagtttgcacagcccccaggggctacgaatatgattggatatatgggccagactgcttaccagtacccaccaccccctcccccacctcccccaagccgcaaatag

SEQ ID NO: 39116 - DNA, 2214 bp, Artificial Sequence
  derived and/or modified sequence
cctaacctacctacgggatttgtggcgccaatcctgtgtgttctgcttccatcgcctacgagagaggccgcaactgttgcctcggcaacaggcgatagcgcgagcgagcgcgagtctgctgccccagcggctgcgccaacagcagaagcgcctcccccttctgtggtgacaaggcccgaaccacaggctctgccatcccccgcaattcgcgcaccactgccagatctttacccatttggcactatgaggggcggagggtttggcgatcgagaccgggaccgcgataggggcggattcggcgctcgcggaggcggaggattaccgcctaagaagtttggtaaccctggggagcgactgcggaagaaaaagtgggacttatcagaactccctaaattcgagaagaatttttatgtggagcaccctgaggtcgctcgcctgacgccttacgaagtggacgagctgaggagaaagaaggagataactgttagaggcggagacgtgtgtcctaagcctgtcttcgccttccaccatgccaacttcccccaatacgtcatggatgtgctcatggaccagcatttcacagaaccaacacctatccagtgccaggggtttcctctggccctatccggaagggacatggtggggatagctcagactggcagtggcaagacgttagcatacctcctgccggctattgtccatatcaatcaccaaccctacctggaaaggggcgacggccctatttgcctcgtcctcgcccctacaagggagctggctcagcaagtccagcaggtggctgatgattacgggaaatgtagtaggcttaaatcaacctgcatttatgggggtgctccaaaaggaccgcagatcagagacctggagagaggggttgagatctgtattgcgaccccgggtcgtttgattgacttcctggagagtggaaaaaccaatctgcgcaggtgtacctacctggtgctggacgaggctgaccgtatgctggacatgggctttgagccgcagatccgcaaaatcgtggatcaaattaggcctgacagacaaactctgatgtggagtgctacatggcccaaagaggttcgtcaactggctgaggactttcttagggactacacacagatcaacgtgggaaatctcgaactgtctgctaatcataacatattgcagattgttgatgtgtgcatggaaagtgaaaaggaccataaactgatccagctgatggaggaaatcatggccgaaaaagagaataaaaccatcatattcgtagaaaccaagaggaggtgtgacgacctcactaggcggatgagacgcgacggctggcccgcaatgtgcatccacggagacaaaagccaacccgagagagattgggttttgaatgaatttaggtccgggaaagcccctattctgatagcgactgacgtggcgtcaagaggactggatgtagaagatgttaaattcgtcatcaactacgattatcccaacagcagcgaggactatgtgcacaggatcggtcgtaccgcaagatccaccaacaagggcaccgcctataccttttttactcccggtaatcttaaacaggctagagagttgatcaaagtgctcgaggaggccaaccaggccatcaatcccaaactgatgcagcttgtagaccaccgcggtggtggtggaggcggaggcaagggcggaagatcacggtatagaacaacaagttccgccaacaaccccaatctgatgtatcaggacgagtgtgataggcgcctgcggggagtgaaggatgggggtcgaagagactccgcctcctacagagatcggtctgagacagaccgtgccggatacgccaacgggagtggctacggctctcccaattcggctttcggtgcgcaggcaggtcaatacacctacggacaggggacctacggggcagccgcttacgggacctcttcctacacggcccaggaatacggagccggaacatacggggcttcatcaactacgtcaaccgggcgttcgagccagagctcatcacaacaattttccggcatcggacgcagtggacagcagcctcaacctctgatgtcccagcaatttgctcaacctcctggtgcaacgaatacactgcttctcctgcccctccttctgctccatgtgaacgaaaccacccaagtcgttgtcacaccagcagacctgatcactttctag

SEQ ID NO: 39117 - DNA, 4791 bp, Artificial Sequence
  derived and/or modified sequence
aagttggagccgactcagcggcggccgccattttgtgcagtcgctgggaaggaaggagacgcctaaaccgcggcactgcccggtttgagcgtagccaaacctgcccaccggctttgtagccccgattctctgtgttttgctcccgtctccgacgagagaggcggcgacggtggcgtctgcgacgggagacagcgcgtcggagcgagagagcgctgcgcctgccgccgccccaacagcggaggcgccgccgccatcggtcgtcaccagaccggagccgcaggccctcccgagcccggccatccgtgccccgctcccagatctctatccttttgggaccatgcgcggaggaggctttggggaccgggaccgggatcgtgaccgtggaggatttggagcaagaggtggtggtggccttcccccgaagaaatttggtaatcctggggagcgtttgcgtaaaaaaaagtgggatttgagtgagctccccaagtttgagaaaaatttttatgtggaacatccggaagtagcaaggctgacaccatatgaggttgatgagctacgccgaaagaaggagattacagtgagggggggagatgtttgtcctaaacccgtgtttgccttccatcatgctaacttcccacaatatgtaatggatgtgttgatggatcagcactttacagaaccaactccaattcagtgccagggatttccgttggctcttagtggccgggatatggtgggcattgctcagactggctctgggaagacgttggcgtatctcctgcctgcaattgttcatattaaccaccagccatacttggaaaggggagatggcccaatctgtctagttctggctcctaccagagagcttgcccagcaagtacagcaggtggccgatgactatggcaaatgttctagattgaagagtacttgtatttatggaggtgctcctaaaggtccccagattcgagacttggaaagaggtgttgagatctgcatagccactcctggacgtctgatagatttcctggagtcaggaaagacaaatcttcgccgatgtacttaccttgtattggacgaagctgacagaatgcttgatatggggtttgaaccccagatccgtaaaattgttgaccaaatcaggcctgataggcagacactgatgtggagtgcaacctggccaaaagaagtaagacagcttgcagaggatttccttcgtgattacacccagatcaacgtaggcaatctggagttgagtgccaaccacaacatcctccagatagtggatgtctgcatggaaagtgaaaaagaccacaagttgatccaactaatggaagaaataatggctgaaaaggaaaacaaaacaataatatttgtggagacaaagagacgctgtgatgatctgactcgaaggatgcgcagagatggttggccagctatgtgtatccatggagacaagagtcaaccagaaagagattgggtacttaatgagttccgttctggaaaggcacccatccttattgctacagatgtagcctcccgtgggctagatgtggaagatgtcaagtttgtgatcaactatgactatccaaacagctcagaggattatgtgcaccgtattggccgaacagcccgtagcaccaacaagggtaccgcctataccttcttcaccccagggaacctaaaacaggccagagagcttatcaaagtgctggaagaggccaatcaggctatcaatccaaaactgatgcagcttgtggaccacagaggaggcggcggaggcgggggtaagggtggtcgttctcgttaccggaccacttcttcagccaacaatcccaatctgatgtatcaggatgagtgtgaccgaaggcttcgaggagtcaaggatggtggccggagagactctgcaagctatcgggatcgtagtgaaaccgatagagctggttatgctaatggcagtggctatggaagtccaaattctgcctttggagcacaagcaggccaatacacctatggtcaaggcacctatggggcagctgcttatggcaccagtagctatacagctcaagaatatggtgctggcacttatggagctagtagcaccacctcaactgggagaagttcacagagctctagccagcagtttagtgggataggccggtctgggcagcagccacagccactgatgtcacaacagtttgcacagcctccgggagctaccaatatgataggttacatggggcagactgcctaccaataccctcctcctcctccccctcctcctccttcacgtaaatgaaaccactcaagtggtagtgactccagcagacttaattacattttaaggaacactgtctttcctttttttttcctcttcgccttttctttttttttccttttttctttttttttttttaatttttccccccaaccatcgtgatttgtcttttcatgcagattagttagaattcactgccaggtttcttctgcccaccaaaatgatccagtctggaataacattttgtaaaaaaaaaaaaaatatatatatatatatatagctgactggaagagattaatttcttcccccaacttcttgcatgttgaagatatttgagctatttttcatctaaaagagtaaggtattaggcccttttgtgggagccccatgttttgtttttctgagttggtggggagggagggagggggagggctgaattgttttgcagaggaagatggcatctgtgctttaaatttctcattactgggttagaaaacaaagagggattgccctgcacattttcttttgtgcttttaaatgtttcttaagttggaacaggtttcctcgggcctgttttgactgattgctggagtgcatttgatagttaaaaattactaattggttttatttcccttcacactctgcctccccacttctccccccgttactgaaaaataaccattttagtgtcaggctagaaattgaattgctgagttttgtgtatcctttaaattaaaaaccacaagtgtttattgtagtggttaaactgtagcatctcagcatctgggtggaagctgcctatatttcttcccagtttaactggggaccatctgtgaaattaattttccatccagacagctgctgtgagcaaatgaacataaatgctcgctggaaatttactaaccagtttttatattgacctgcagtgtaaaaagcacatttaattataaacaatatattcaaaatgggcaaattttattttcaaatgcagtgtagagctagattaaaagcaactctttgccacctactctgcccttttggcaaagttaccttgaacaaagaatcttaagggtttattaagaactctttattttcttcataccctgttctctgcagtgctttctaacagcttctgggtgcagattttcttcggcatccttttgcactcagcttattacaggtaggtagtgcttaagaaaagtcatggaggactaaagcctaagtccttttcacttttcctccatctgaaggtaggtgagttcatcctcttcatggtaatgctgttttaccaagactttatagcagatggacccagaaagaattttctgctattgtgttcactacaacaggatagggacatcagacagccccagaaaccccttccagatctgatatgggactattaatttttatgctgttaattggtattcattcacaatgcagttgaagggggaaggctccactgcattctttggctaaggcctgaatgcttgctcatctgtaagatctatactcgaggttttgttttccttttaaaattctttagggagagagggatggtttctgaggggttctgaaagtatgattcaatgtgcaacatacaggtaggtcttcagcataagctgaaatatatgcatgtaaaaactttgacatctttttttttaattttccactttcttcttaactttacttctctttttgtcccccccccatcttacagaagttgaggccaagggagaatggtaggcacagaagaaacatggcaaactgctctgtgctttcaaaccaaagtgttccccccaaccccaaatttgtctaagcactggccagtctgttgtgggcattgttttctacaaccaaattctgggtttttttcttctttctttaaacatagaggtaccaccacaagggatgccctactctctcgcagctcttgaaagcatctgtttgagggaaaggtctctgggcaagcaagtggttatttggattgcttgcttccctttttccacctgggacattgtaatcataaaataacagtaaattccaaacctcaaaaactattatggcctgagcacagctgaaatctagcagagtttaactcttctgcctccatgtctgtcacttataattcaggttctgctgttggcttcagaacatgagcagaagaatcgttttatgctagttattgcattcatggttgaaactcaacttagggaaagggttccaatgtattaagcaatgggctgcttctccccaatcctccctaacaattcgttgtgtggacttctcatctaaaaggttagtggcttttgcttgggatcagtgctctctattgatgttcttgctggtctccagacacattcctgttgcattaagacttgaaagacttgtagatgtgtgatgttcaggcacaggatgctgaaagctatgttactattcttagtttgtaaattgtccttttgataccatcatcttgttttctttttgtaggtataaataaaaacactgttgacaat

SEQ ID NO: 39118 - DNA, 2311 bp, Artificial Sequence
  derived and/or modified sequence
gttaagttggagccgactcagcggcggccgccattttgtgcagtcgctgggaaggaaggagacgcctaaaccgcggcactgcccggtttgagcgtagccaaacctgcccaccggctttgtagccccgattctctgtgttttgctcccgtctccgacgagagaggcggcgacggtggcgtctgcgacgggagacagcgcgtcggagcgagagagcgctgcgcctgccgccgccccaacagcggaggcgccgccgccatcggtcgtcaccagaccggagccgcaggccctcccgagcccggccatccgtgccccgctcccagatctctatccttttgggaccatgcgcggaggaggctttggggaccgggaccgggatcgtgaccgtggaggatttggagcaagaggtggtggtggccttcccccgaagaaatttggtaatcctggggagcgtttgcgtaaaaaaaagtgggatttgagtgagctccccaagtttgagaaaaatttttatgtggaacatccggaagtagcaaggctgacaccatatgaggttgatgagctacgccgaaagaaggagattacagtgagggggggagatgtttgtcctaaacccgtgtttgccttccatcatgctaacttcccacaatatgtaatggatgtgttgatggatcagcactttacagaaccaactccaattcagtgccagggatttccgttggctcttagtggccgggatatggtgggcattgctcagactggctctgggaagacgttggcgtatctcctgcctgcaattgttcatattaaccaccagccatacttggaaaggggagatggcccaatctgtctagttctggctcctaccagagagcttgcccagcaagtacagcaggtggccgatgactatggcaaatgttctagattgaagagtacttgtatttatggaggtgctcctaaaggtccccagattcgagacttggaaagaggtgttgagatctgcatagccactcctggacgtctgatagatttcctggagtcaggaaagacaaatcttcgccgatgtacttaccttgtattggacgaagctgacagaatgcttgatatggggtttgaaccccagatccgtaaaattgttgaccaaatcaggcctgataggcagacactgatgtggagtgcaacctggccaaaagaagtaagacagcttgcagaggatttccttcgtgattacacccagatcaacgtaggcaatctggagttgagtgccaaccacaacatcctccagatagtggatgtctgcatggaaagtgaaaaagaccacaagttgatccaactaatggaagaaataatggctgaaaaggaaaacaaaacaataatatttgtggagacaaagagacgctgtgatgatctgactcgaaggatgcgcagagatggttggccagctatgtgtatccatggagacaagagtcaaccagaaagagattgggtacttaatgagttccgttctggaaaggcacccatccttattgctacagatgtagcctcccgtgggctagatgtggaagatgtcaagtttgtgatcaactatgactatccaaacagctcagaggattatgtgcaccgtattggccgaacagcccgtagcaccaacaagggtaccgcctataccttcttcaccccagggaacctaaaacaggccagagagcttatcaaagtgctggaagaggccaatcaggctatcaatccaaaactgatgcagcttgtggaccacagaggaggcggcggaggcgggggtaagggtggtcgttctcgttaccggaccacttcttcagccaacaatcccaatctgatgtatcaggatgagtgtgaccgaaggcttcgaggagtcaaggatggtggccggagagactctgcaagctatcgggatcgtagtgaaaccgatagagctggttatgctaatggcagtggctatggaagtccaaattctgcctttggagcacaagcaggccaatacacctatggtcaaggcacctatggggcagctgcttatggcaccagtagctatacagctcaagaatatggtgctggcacttatggagctagtagcaccacctcaactgggagaagttcacagagctctagccagcagtttagtgggataggccggtctgggcagcagccacagccactgatgtcacaacagtttgcacagcctccgggagctaccaataccctcctcctcctccccctcctcctccttcacgtaaatgaaaccactcaagtggtagtgactccagcagacttaattacattttaa

SEQ ID NO: 39119 - DNA, 2196 bp, Artificial Sequence
  derived and/or modified sequence
ctgcccaccggcttcgtggcccccatcctgtgcgtgctgctgcccagccccaccagagaggccgccaccgtggccagcgccaccggcgacagcgccagcgagagagagagcgccgcccccgccgccgcccccaccgccgaggcccccccccccagcgtggtgaccagacccgagccccaggccctgcccagccccgccatcagagcccccctgcccgacctgtaccccttcggcaccatgagaggcggcggcttcggcgacagagacagagacagagacagaggcggcttcggcgccagaggcggcggcggcctgccccccaagaagttcggcaaccccggcgagagactgagaaagaagaagtgggacctgagcgagctgcccaagttcgagaagaacttctacgtggagcaccccgaggtggccagactgaccccctacgaggtggacgagctgagaagaaagaaggagatcaccgtgagaggcggcgacgtgtgccccaagcccgtgttcgccttccaccacgccaacttcccccagtacgtgatggacgtgctgatggaccagcacttcaccgagcccacccccatccagtgccagggcttccccctggccctgagcggcagagacatggtgggcatcgcccagaccggcagcggcaagaccctggcctacctgctgcccgccatcgtgcacatcaaccaccagccctacctggagagaggcgacggccccatctgcctggtgctggcccccaccagagagctggcccagcaggtgcagcaggtggccgacgactacggcaagtgcagcagactgaagagcacctgcatctacggcggcgcccccaagggcccccagatcagagacctggagagaggcgtggagatctgcatcgccacccccggcagactgatcgacttcctggagagcggcaagaccaacctgagaagatgcacctacctggtgctggacgaggccgacagaatgctggacatgggcttcgagccccagatcagaaagatcgtggaccagatcagacccgacagacagaccctgatgtggagcgccacctggcccaaggaggtgagacagctggccgaggacttcctgagagactacacccagatcaacgtgggcaacctggagctgagcgccaaccacaacatcctgcagatcgtggacgtgtgcatggagagcgagaaggaccacaagctgatccagctgatggaggagatcatggccgagaaggagaacaagaccatcatcttcgtggagaccaagagaagatgcgacgacctgaccagaagaatgagaagagacggctggcccgccatgtgcatccacggcgacaagagccagcccgagagagactgggtgctgaacgagttcagaagcggcaaggcccccatcctgatcgccaccgacgtggccagcagaggcctggacgtggaggacgtgaagttcgtgatcaactacgactaccccaacagcagcgaggactacgtgcacagaatcggcagaaccgccagaagcaccaacaagggcaccgcctacaccttcttcacccccggcaacctgaagcaggccagagagctgatcaaggtgctggaggaggccaaccaggccatcaaccccaagctgatgcagctggtggaccacagaggcggcggcggcggcggcggcaagggcggcagaagcagatacagaaccaccagcagcgccaacaaccccaacctgatgtaccaggacgagtgcgacagaagactgagaggcgtgaaggacggcggcagaagagacagcgccagctacagagacagaagcgagaccgacagagccggctacgccaacggcagcggctacggcagccccaacagcgccttcggcgcccaggccggccagtacacctacggccagggcacctacggcgccgccgcctacggcaccagcagctacaccgcccaggagtacggcgccggcacctacggcgccagcagcaccaccagcaccggcagaagcagccagagcagcagccagcagttcagcggcatcggcagaagcggccagcagccccagcccctgatgagccagcagttcgcccagccccccggcgccaccaacatgatcggctacatgggccagaccgcctaccagtaccccccccccccccccccccccccccccagcagaaagtag

SEQ ID NO: 39120 - DNA, 2214 bp, Artificial Sequence
  derived and/or modified sequence
cccaacctgcccaccggcttcgtggcccccatcctgtgcgtgctgctgcccagccccaccagagaggccgccaccgtggccagcgccaccggcgacagcgccagcgagagagagagcgccgcccccgccgccgcccccaccgccgaggcccccccccccagcgtggtgaccagacccgagccccaggccctgcccagccccgccatcagagcccccctgcccgacctgtaccccttcggcaccatgagaggcggcggcttcggcgacagagacagagacagagacagaggcggcttcggcgccagaggcggcggcggcctgccccccaagaagttcggcaaccccggcgagagactgagaaagaagaagtgggacctgagcgagctgcccaagttcgagaagaacttctacgtggagcaccccgaggtggccagactgaccccctacgaggtggacgagctgagaagaaagaaggagatcaccgtgagaggcggcgacgtgtgccccaagcccgtgttcgccttccaccacgccaacttcccccagtacgtgatggacgtgctgatggaccagcacttcaccgagcccacccccatccagtgccagggcttccccctggccctgagcggcagagacatggtgggcatcgcccagaccggcagcggcaagaccctggcctacctgctgcccgccatcgtgcacatcaaccaccagccctacctggagagaggcgacggccccatctgcctggtgctggcccccaccagagagctggcccagcaggtgcagcaggtggccgacgactacggcaagtgcagcagactgaagagcacctgcatctacggcggcgcccccaagggcccccagatcagagacctggagagaggcgtggagatctgcatcgccacccccggcagactgatcgacttcctggagagcggcaagaccaacctgagaagatgcacctacctggtgctggacgaggccgacagaatgctggacatgggcttcgagccccagatcagaaagatcgtggaccagatcagacccgacagacagaccctgatgtggagcgccacctggcccaaggaggtgagacagctggccgaggacttcctgagagactacacccagatcaacgtgggcaacctggagctgagcgccaaccacaacatcctgcagatcgtggacgtgtgcatggagagcgagaaggaccacaagctgatccagctgatggaggagatcatggccgagaaggagaacaagaccatcatcttcgtggagaccaagagaagatgcgacgacctgaccagaagaatgagaagagacggctggcccgccatgtgcatccacggcgacaagagccagcccgagagagactgggtgctgaacgagttcagaagcggcaaggcccccatcctgatcgccaccgacgtggccagcagaggcctggacgtggaggacgtgaagttcgtgatcaactacgactaccccaacagcagcgaggactacgtgcacagaatcggcagaaccgccagaagcaccaacaagggcaccgcctacaccttcttcacccccggcaacctgaagcaggccagagagctgatcaaggtgctggaggaggccaaccaggccatcaaccccaagctgatgcagctggtggaccacagaggcggcggcggcggcggcggcaagggcggcagaagcagatacagaaccaccagcagcgccaacaaccccaacctgatgtaccaggacgagtgcgacagaagactgagaggcgtgaaggacggcggcagaagagacagcgccagctacagagacagaagcgagaccgacagagccggctacgccaacggcagcggctacggcagccccaacagcgccttcggcgcccaggccggccagtacacctacggccagggcacctacggcgccgccgcctacggcaccagcagctacaccgcccaggagtacggcgccggcacctacggcgccagcagcaccaccagcaccggcagaagcagccagagcagcagccagcagttcagcggcatcggcagaagcggccagcagccccagcccctgatgagccagcagttcgcccagccccccggcgccaccaacaccctgctgctgctgcccctgctgctgctgcacgtgaacgagaccacccaggtggtggtgacccccgccgacctgatcaccttctag

SEQ ID NO: 39121 - protein, 1006 aa, Artificial Sequence
  derived and/or modified sequence
MGSAEDAVKEKLLWNVKKEVKQIMEEAVTRKFVHEDSSHIIALCGAVEACLLHQLRRRAAGFLRSDKMAALFTKVGKTCPVAGEICHKVQELQQQAEGRKPSGVSQEALRRQGSASGKAPALSPQALKHVWVRTALIEKVLDKVVQYLAENCSKYYEKEALLADPVFGPILASLLVGPCALEYTKLKTADHYWTDPSADELVQRHRIRGPPTRQDSPAKRPALGIRKRHSSGSASEDRLAACARECVESLHQNSRTRLLYGKNHVLVQPKEDMEAVPGYLSLHQSAESLTLKWTPNQLMNGTLGDSELEKSVYWDYALVVPFSQVVCIHCHQQKSGGTLVLVSQDGIQRPPLHFPQGGHLLSFLSCLENGLLPRGQLEPPLWTQQGKGKVFPKLRKRSSIRSVDMEEMGTGRATDYVFRIIYPGHRHEHNAGDMIEMQGFGPSLPAWHLEPLCSQGSSCLSCSSSSSPHATPSHCSCIPDRLPLRLLCESMKRQIVSRAFYGWLAHCRHLSTVRTHLSALVHHSVIPPDRPPGASAGLTKDVWSKYQKDKKNYKELELLRQVYYGGIEHEIRKDVWPFLLGHYKFGMSKKEMEQVDAVVAARYQQVLAEWKACEVVVRQREREAHPATRTKFSSGSSIDSHVQRLIHRDSTISNDVFISVDDLEPPEPQDPEDSRPKPEQEAGPGTPGTAVVEQQHSVEFDSPDSGLPSSRNYSVASGIQSSLDEGQSVGFEEEDGGGEEGSSGPGPAAHTLREPQDPSQEKPQAGELEAGEELAAVCAAAYTIELLDTVALNLHRIDKDVQRCDRNYWYFTPPNLERLRDVMCSYVWEHLDVGYVQGMCDLLAPLLVTLDNDQLAYSCFSHLMKRMSQNFPNGGAMDTHFANMRSLIQILDSELFELMHQNGDYTHFYFCYRWFLLDFKRELLYEDVFAVWEVIWAARHISSEHFVLFIALALVEAYREIIRDNNMDFTDIIKFFNERAEHHDAQEILRIARDLVHKVQMLIENK

SEQ ID NO: 39122 - DNA, 3021 bp, Artificial Sequence
  derived and/or modified sequence
atggggagcgccgaagatgccgtcaaggaaaagctcctgtggaatgttaagaaggaagttaagcagatcatggaggaggccgtcactagaaaatttgtccatgaggactcttcacatataatagcactgtgtggcgctgttgaggcctgtcttttacatcagctcagacgaagagctgcaggatttctcagatctgataaaatggcggccctgtttactaaggtgggaaaaacctgtccagtggctggtgagatttgccacaaggtacaggaactgcagcagcaagccgaggggagaaagccttcaggtgtgtcccaggaggccctgaggcggcaggggagtgcctcaggaaaagcaccagctctaagcccccaggccctaaaacacgtatgggtacgtacagcactgattgaaaaagtactcgacaaggtggtgcagtatctggcagaaaactgttccaaatactatgaaaaagaagctctcttagccgatcctgtgttcggtcctatcttagccagtctcttagtggggccatgtgccctcgagtacaccaagcttaagaccgctgaccactattggaccgatccatcagctgatgaattagtgcagcgccatcggatcaggggaccaccaacgaggcaggatagcccagcgaagcgtccggctttgggaattcgcaagcgtcatagttcagggtctgcgagcgaagataggcttgccgcctgtgcaagggaatgcgtggaatccctccatcagaactctagaaccagactcctctatggcaaaaaccacgtactggttcagcccaaggaggacatggaggctgttccaggctacttatctctgcaccagtcggccgaaagtctgactctcaaatggacccccaaccagctcatgaacggcaccctgggggacagcgagctcgaaaaatctgtatactgggactacgccctggtagtgcctttctctcaagtggtctgcatccactgtcaccaacagaagagtggagggaccctggtcctggtcagccaagatggcatacagcgaccccctctccactttccgcagggggggcatcttttatcgttcctgagttgtctggagaacggccttctgccccgcgggcagttagagcctcctctttggacccagcaaggcaaaggcaaagttttcccaaaactgcggaaacgttcctccatcagatctgtggacatggaggaaatgggcactggcagggctaccgactacgtttttaggattatttacccaggccatagacacgagcataacgctggcgatatgatcgagatgcagggctttggaccaagcctccccgcttggcatctggagcccctgtgttcccagggatctagttgcctcagctgttcatcatcatcttcaccacatgccactccatcacactgtagttgcataccagacagactacctctgagattactgtgtgaatctatgaaaagacaaattgttagtcgggccttctacggctggctggcacattgtcggcatctctccactgtgagaacacatctgtcggcactcgtgcaccatagcgtcattccccccgataggccaccaggggctagcgctggcctcaccaaagatgtgtggtcaaagtatcaaaaagataagaaaaactacaaggaacttgagctgctgcgtcaggtgtactacggtggcatagagcacgagataagaaaagatgtgtggccgttcctcctggggcattataagttcgggatgtcaaagaaagagatggaacaagtagacgccgtcgtggccgccagatatcagcaggtgttggccgagtggaaggcttgcgaagtagtggtacggcagcgtgagcgcgaggcccacccagcaacaaggacaaagttcagtagcggttcctcaatcgatagccacgttcagcgactcatccaccgggactctactatatctaatgatgttttcatctctgtagacgacctcgagcccccagaaccacaggatcccgaagactcgcgccccaaacccgagcaggaagcgggacctggcacaccagggacagccgttgtggagcagcagcatagcgttgaatttgactcccctgacagcgggttaccttcgagccgcaattactcagtggcttccggtattcagtcttccctcgatgagggacagtctgtcggcttcgaagaagaagatggtgggggggaagaagggtcaagtggtccagggccagcggcccacacccttcgagagcctcaagatccttctcaggagaagccccaggctggagagttagaggccggagaagagctggctgctgtctgtgcagcggcttatacaatcgagctcctagacactgtggcattgaatctccaccgcatcgacaaggacgtccagcgctgcgacagaaactattggtactttacaccaccgaacctggagcgcctccgagacgtgatgtgcagctacgtttgggagcatttggatgtcggttatgtacagggcatgtgcgatctactggcaccgctcctggtgactttggacaatgaccagctggcctactcttgtttcagtcacttgatgaaaagaatgtcccagaactttcctaacggcggcgcgatggatacacactttgccaatatgaggagcctgatacaaatcctggactccgagttgttcgagttaatgcaccagaatggcgattacacccatttctatttctgctaccgatggttcctgctagacttcaagcgcgagctgctctatgaggacgtcttcgccgtttgggaggttatttgggctgccagacatatctcctctgagcatttcgtgctctttatcgcccttgcattggtggaagcttaccgcgagatcatcagggacaacaacatggattttacagacatcatcaagttcttcaacgagagagcagagcaccacgacgcccaggaaatcctaagaatcgcacgggatctcgtgcacaaagtacagatgctgattgagaacaaatag

SEQ ID NO: 39123 - DNA, 3021 bp, Artificial Sequence
  derived and/or modified sequence
atgggcagcgcagaagatgctgtgaaggagaagctgctgtggaatgtgaagaaggaggtgaagcagatcatggaggaggccgtgaccaggaagtttgtgcatgaggacagcagccacatcatcgccctgtgtggggctgtggaggcctgcctgctgcaccagctgcggaggagagctgctggcttcctgcggagtgacaagatggccgccctcttcaccaaggtgggcaagacctgccctgtggccggggagatctgccacaaggtgcaggagctgcagcagcaggccgagggcaggaagcccagcggcgtgtcccaggaggccctgcggcggcagggcagcgccagcggcaaggccccagccctgagcccccaggccctgaagcacgtgtgggtgaggacagccctgattgagaaggtgctggacaaggtggtgcagtacctggccgagaactgcagcaagtactatgagaaggaggccctgctggccgaccctgtgtttggccccatcctggccagcctgctggtgggcccctgtgccctggagtacaccaagctgaagacagctgaccactactggacagaccccagcgcagatgagctggtgcagaggcaccgcatccggggcccccccacccggcaggacagccctgccaagaggcctgccctgggcatcaggaagaggcacagcagcggcagcgccagcgaggaccggctggccgcctgtgccagagaatgtgtggagagcctgcaccagaacagcaggacccggctgctgtatggcaagaaccacgtgctggtgcagcccaaggaggacatggaggccgtgcccggctacctgagcctgcaccagagcgctgagagcctgaccctgaagtggacccccaaccagctgatgaatggcaccctgggggacagcgagctggagaagtctgtgtactgggactatgccctggtggtgcccttcagccaggtggtgtgcatccactgccaccagcagaagagcggcggcaccctggtgctggtgtcccaggacggcatccagaggcctcccctgcacttcccccagggcggccacctgctgtccttcctgagctgcctggagaatggcctgctgccccggggccagctggagccccccctgtggacccagcagggcaagggcaaggtgttccccaagctgaggaagaggagcagcatccgctctgtggacatggaggagatgggcaccggccgggccacagattatgtgttccgcatcatctacccaggccacagacatgagcacaatgctggggacatgattgagatgcagggcttcggccccagcctgcctgcctggcacctggagcccctgtgcagccagggcagcagctgcctgagctgcagcagcagcagcagcccccacgccacccccagccactgcagctgcatcccagaccggctgcccctgcggctgctgtgtgagagcatgaagaggcagatcgtgtcccgggccttctacggctggctggcccactgccgccacctgagcacagtgaggacccacctgagcgccctggtgcaccacagcgtcatccccccagacaggcctcctggggccagcgctggcctgaccaaggatgtgtggagcaagtaccagaaggacaagaagaactacaaggagctggagctgctgcggcaggtgtactacggcggcattgaacatgagatcaggaaggatgtgtggcccttcctgctgggccactacaagtttggcatgagcaagaaggagatggagcaggtggatgctgtggtggccgcccgctaccagcaggtgctggccgagtggaaggcctgtgaggtggtggtgcggcagcgggagcgggaggcccacccagccaccaggaccaagttcagcagcggcagcagcattgacagccacgtgcagaggctcatccaccgggacagcaccatcagcaatgatgtgttcatctctgtggatgacctggagcccccagagccccaggaccctgaggacagccggcccaagccagagcaggaggccggccctggcaccccaggcacagctgtggtggagcagcagcacagcgtggagtttgacagcccagattctggcctgcccagcagcaggaactacagcgtggccagcggcatccagagcagcctggatgagggccagagcgtgggctttgaggaggaggatggcggcggggaggagggcagcagcggccctggccctgctgcccacaccctgcgggagccccaggaccccagccaggagaagccccaggccggggagctggaggccggggaggagctggccgctgtgtgtgccgccgcctacaccatcgagctgctggacacagtggccctgaacctgcacagaattgacaaggatgtgcagagatgtgacaggaactactggtacttcaccccacccaacctggagcggctgagagatgtgatgtgcagctatgtgtgggagcacctggatgtgggctacgtgcagggcatgtgtgacctgctggcccccctgctggtgaccctggacaatgaccagctggcctacagctgcttcagccacctgatgaagaggatgagccagaacttccccaatggaggagccatggacacccactttgccaacatgaggagcctcatccagatcctggacagcgagctgtttgagctgatgcaccagaatggagactacacccacttctacttctgctaccgctggttcctgctggacttcaagcgggagctgctgtatgaagatgtgtttgctgtgtgggaggtgatctgggccgcccggcacatcagcagcgagcactttgtgctcttcatcgccctggccctggtggaggcctaccgggagatcatccgggacaacaacatggacttcacagacatcatcaagttcttcaatgaaagagctgagcaccatgatgcccaggagatcctgagaattgcccgggacctggtgcacaaggtgcagatgctgattgagaacaagtag

SEQ ID NO: 39124 - DNA, 3021 bp, Artificial Sequence
  derived and/or modified sequence
atgggcagcgccgaggacgccgtgaaggagaagctgctgtggaacgtgaagaaagaggttaagcagattatggaagaggctgtgacacgcaaattcgtgcacgaagactcgagccacattattgctctttgtggagcagttgaggcctgcctcctacatcaactgaggagacgcgctgctggctttctaaggagcgacaagatggctgcactctttacaaaggtgggaaagacatgccccgtagctggagaaatttgccacaaagtgcaggagttacaacagcaggcagagggccggaaaccctctggggtctcgcaggaagctttacgacggcagggctccgcttctggcaaggctcctgccctgagtccgcaagcactcaagcatgtgtgggtccgcaccgccctcatcgagaaagttctggacaaagtggtgcaatacctagccgagaattgttccaagtactatgagaaggaagcgctgctggcagatccagtgttcggtccaatcctggcaagcctgctagtgggcccgtgcgccctggaatacaccaaattgaaaacagcagaccactactggacggaccccagcgcagacgaactagtccagcgacaccgcatccgtggcccacccactcggcaggatagccccgccaagcgtcctgcgctgggtattcgcaagcgtcattcttctggcagcgccagcgaggatcgcctggcggcctgtgcgcgcgaatgtgttgaatcactccaccagaacagtaggacgaggctactctacggtaagaaccacgttctggtacagccaaaagaagacatggaggcggtgccaggctatctctctcttcaccagtctgcagaaagtctgactctaaagtggaccccaaaccagttaatgaatggcacactaggggacagcgagcttgaaaaaagcgtgtactgggattacgctttggtagtgcctttcagtcaagtcgtctgtattcattgtcatcagcagaagtccggcggcacattggtcctcgtctcacaggacggtatccagagaccccccctccactttccccaaggcggacacttgcttagcttcctgagctgtctcgaaaatggcctgctgccccgggggcagcttgagcctcccctttggacacagcaggggaaaggcaaagtgttcccgaaacttcggaagaggagttctatcagaagcgttgatatggaggaaatgggcacgggacgcgcaactgactacgtcttcaggattatatatcctggccatagacacgagcacaatgctggagacatgatcgagatgcagggctttggaccatcgctgcccgcatggcatcttgaacctctgtgctcacaggggtcaagctgtctatcctgcagctcatcaagttcacctcatgctacgccgtcacactgttcgtgcatccccgaccggctcccacttagactgctctgcgaatctatgaagagacagatagtatctcgtgcattctacggttggctggcacactgccgccatctttctactgtccggacgcatctttcagctctcgttcaccactccgtcattccacccgatagaccaccgggggcctctgcaggtctgaccaaggatgtctggagcaagtatcagaaggataagaaaaactataaagagttggaactgctgcggcaggtctattacggcggaatcgaacacgagattcgcaaagacgtatggccatttctgctggggcactacaagtttggcatgtcaaagaaggaaatggaacaagttgatgccgtggtcgcggcccggtatcagcaggtcctggccgaatggaaggcgtgcgaggtggtggtgagacaacgagaacgagaggcgcatccagccacccgtacaaagttttcttccgggtcaagcattgacagccacgtgcagagactaattcatcgcgacagcacaatcagtaatgacgtgtttatctccgtggatgacttggaaccgcccgaaccccaggatcctgaggactcaaggcctaagccagaacaggaagctggacccggaacccccggtaccgcggtggtagagcaacagcattcagtggagttcgatagtccagattctgggctacccagctcaagaaactattctgtcgcctctggtattcagtctagtctagacgaaggccaaagcgtcggctttgaagaggaggacggcgggggggaagagggatcttctggccccggacccgcagcccacacccttcgcgagccgcaagacccgtcacaggaaaaacctcaggctggagagcttgaagcgggagaggaactggcagctgtttgtgctgcagcctacactatcgagctgttagatactgtcgccctgaatttacatcggattgataaggacgtccaaaggtgcgacagaaattactggtatttcacgcctccaaacctggaacggctccgggacgtaatgtgcagctatgtgtgggaacacctggacgttggctacgtccagggcatgtgtgacttgctagctccgctgctcgtaactctggacaacgatcagttagcttactcctgtttctctcatctcatgaagagaatgtcacagaacttccccaacggcggtgcgatggatacgcactttgcaaatatgagaagcctcattcagattttggactcggagctatttgaactaatgcaccagaacggcgattatacacatttttacttttgctacaggtggttccttctggactttaaaagagagctgctttatgaggacgtctttgctgtgtgggaagtgatatgggcagcaaggcatatcagctcagagcattttgtcttattcatcgcgcttgccctggtggaagcatatcgggagataatacgagacaacaacatggatttcaccgacatcatcaagttttttaacgaaagagccgagcatcacgatgctcaggaaatacttagaatcgcacgagatctggttcacaaagtgcagatgttaatcgagaataaatag

SEQ ID NO: 39125 - DNA, 3021 bp, Artificial Sequence
  derived and/or modified sequence
atgggctcagcagaggacgcagtcaaagaaaaactcttatggaacgtgaagaaggaagtaaaacagattatggaggaggctgttaccagaaagttcgtgcacgaggactcgagtcacataattgcactctgtggagcagtggaggcatgtctcctgcaccagctgaggcggcgtgcggctggttttctgaggagcgacaagatggccgctctcttcaccaaggtaggcaagacatgtcccgtcgcaggcgagatctgtcacaaggtgcaagagctgcagcagcaggccgaggggaggaaacctagcggggtgagtcaggaagcactgagacgccaggggtcagccagcggaaaggcccctgccctgtcgcctcaggcgctcaaacatgtgtgggtgagaaccgcgctaatcgagaaagtgttagataaagttgttcaataccttgccgaaaattgctctaagtattacgaaaaggaagccctcctggccgaccctgttttcgggcctatcttagcctcattgctcgttggtccctgtgctttggaatacacaaaacttaaaacagctgatcactattggaccgacccgtctgctgatgaattagtgcagagacaccgcataaggggcccaccaaccagacaggatagtcctgctaagaggcccgctctgggtatccggaagcgtcatagttctgggtccgccagcgaagatcgcctggccgcttgcgccagggaatgcgttgagtcgctgcaccagaatagccgcactagactgctctatggtaagaaccatgtgttagtccaacccaaggaggacatggaggccgtgccaggatacttaagccttcatcagtcggctgagagcctgaccctgaagtggactcccaaccaactcatgaacggcacactcggtgactccgagttggagaaaagtgtgtactgggactatgcactggtggtgcctttcagtcaggttgtgtgtatccactgccaccagcagaaaagtggcggtaccctggttctcgtttcgcaggacggcatccagcgaccgccacttcatttccctcaaggaggccatctgctttcctttctgtcttgcctggaaaatgggctgttaccgcgaggccaactggaacctccactatggactcagcaggggaagggcaaagtgttccctaagttaagaaagaggtcttctattagaagcgtggatatggaggagatgggtaccggccgagctactgactatgtgtttcggataatttaccccggacacaggcatgaacataacgcaggtgacatgatcgagatgcaaggcttcggcccatctcttccagcctggcatctagagcctctgtgcagtcagggcagttcttgtctgagttgctctagctcaagctccccccacgccaccccgtcacattgcagttgtattccggaccgcctcccgctgcgacttctctgtgagtcaatgaagcgccaaatcgtgagccgtgccttttacggatggttggcccattgtcggcatctgtccacagtgcggacccacttgtctgccctcgtccatcactccgttattcctcccgaccggccacccggagcgagcgcgggattgacaaaggatgtgtggtccaaataccagaaagacaaaaaaaattacaaggaactcgagctgcttaggcaggtatactacggcggtatagagcacgaaattagaaaggatgtctggccctttctcctcggacactacaagttcggaatgagcaagaaagaaatggaacaggtggatgctgtggtcgccgcacgttatcagcaggtactggccgaatggaaagcctgcgaggtggtcgtcaggcaaagagagagagaggctcatcctgcaacccgaaccaagttttcatctggctccagtatcgatagccatgtgcaacgtttgatccacagggattctacaattagtaatgacgtcttcatatccgtcgacgacttggagccacctgaacctcaggacccagaggacagcaggcccaagccagagcaggaggcaggacctggaacccccggtacagccgtggtagagcaacaacactccgtggagttcgacagtccggattcaggcctcccatcaagcagaaattattccgttgccagcggcatccaatccagtctggatgaggggcagtctgtagggttcgaagaggaggacggcggaggggaggaggggagttccggaccgggtcctgccgcacataccctgcgtgagccccaggatccaagccaggagaagccgcaggccggagagctggaagcaggcgaagagctcgccgcagtgtgcgctgccgcatacactatcgagctgctggacaccgtggccttgaacctgcacagaatcgataaggatgtccaacggtgtgatcgtaactattggtattttacaccaccgaacctggaacgactcagggatgttatgtgctcttacgtttgggaacaccttgatgttgggtatgtccaggggatgtgtgatctcctagcacccctgctggtcaccctcgataacgaccagctcgcctattcctgcttttctcacctgatgaaacggatgagccaaaactttcccaacggcggtgcaatggacactcatttcgcaaacatgaggagcctgattcagatcctggactccgaactgtttgagctcatgcaccagaacggcgattacacccacttttacttctgctataggtggttcctacttgatttcaaaagagaactgctctatgaggatgtgtttgccgtgtgggaggtcatatgggcagccaggcacatctcctctgaacacttcgtactcttcatcgcacttgctttggtcgaagcttatcgcgagataatcagagataataacatggacttcactgatataatcaagttctttaacgaacgcgcagagcatcatgacgcacaggagatcctgcgtatcgctagagatcttgtccacaaagtgcagatgcttatagaaaataagtag

SEQ ID NO: 39126 - DNA, 4728 bp, Artificial Sequence
  derived and/or modified sequence
ggaagatggctgcggagccgagcaccgggcagtggctgcggcggcggcggcggcggcgggccgggagcgcggcgggcgggggctccgccttgcgcgtggggcgctgagccgagaggcgcggaggcggcgagggcgcgggggctctgaggaccgctcggcgccgcctcctgccacaccatgggcagcgcagaggacgcagtcaaagagaaactgctgtggaacgtgaagaaggaggtgaagcaaatcatggaggaggctgtcaccaggaagtttgtgcatgaagacagcagccacatcattgctttatgtggtgcagtggaggcttgcctcttgcatcagctgagacgccgtgccgctggcttcctgcgcagtgacaagatggcagccctgttcaccaaggtggggaagacgtgcccagtggcgggggagatttgccacaaggtacaggagctgcagcaacaagcagagggcaggaaaccctcaggggtcagccaggaggccctgcggagacagggctcagccagcgggaaggccccggccctcagccctcaggccttgaaacacgtatgggtacgcacggcgctcatcgagaaagttctggacaaggtcgtgcaatacctggcggaaaactgcagcaagtactacgagaaggaggcactgctggcagaccctgtgttcggcccgatcctggcctctcttctagtgggaccctgtgccttggaatacactaagctcaagacagccgatcactactggactgacccctctgctgatgagctggtccagcggcaccgcatccggggtccacctactcgccaggactcccctgcaaagcgcccagccctggggatccggaaacggcactcaagcggcagcgcgtcggaggacaggctggctgcctgtgcccgcgagtgtgtggagtccctgcaccagaactcacggacgcggctgctctatggcaagaaccacgtgctggtgcagccgaaggaggatatggaggcggtccctggctacctctccctgcaccagtctgcagagagcctgactctgaagtggacccccaaccagctcatgaatgggactctgggggactccgagctggaaaagagcgtttactgggactatgccctcgtggtgcccttcagccaggtcgtgtgcatccactgccaccagcaaaagagcggtggcacgcttgtgctggtgagccaggatggcatccagaggccgccgctgcatttcccacagggaggacacctgctgtcctttctgtcctgtctggagaatgggctgctgcctcggggacagctagagcccccgctgtggacccagcaagggaaggggaaagtgttccccaagctacggaaacgaagcagcattcgctccgtggatatggaggagatgggcacggggcgggccaccgactatgtgttccggatcatctaccccggccacaggcacgagcacaacgctggtgacatgatcgagatgcagggctttgggcccagcctgccagcctggcacctggagcccctgtgcagtcagggctcctcctgcctctcctgctcctccagcagctccccacatgcaacccccagccactgtagctgcatccccgaccggttgccgctcaggctactgtgtgagagtatgaagaggcagatcgtgtcccgggccttctacggctggctggcacactgccgccacctgtccacggtgcggacccacctgtcggcgctggtgcaccatagcgttatcccacctgaccggcccccgggggcctccgcgggcctcaccaaggacgtgtggagcaagtatcagaaggacaaaaagaactacaaagagctggagctgctgcggcaagtttactacggaggcatagagcacgagatccgcaaggacgtctggccctttctgcttggccactacaagttcggcatgagcaagaaggagatggagcaggtggacgcagtggtggcagcaaggtaccagcaggtgttggcagagtggaaggcctgcgaggtggtggtgaggcagcgggagcgggaggcccacccagccacacgcaccaagttctcctcaggcagcagcatcgacagccacgtgcagcgcctcatccaccgagactccaccatcagcaacgatgtgtttatctcagtggatgatctggaacccccggagccccaggaccctgaagattccagaccaaaacctgagcaggaagcaggacccgggactccgggcaccgccgtggtggagcagcagcattccgtggagttcgactctccagactcaggactgccctcctctcgcaattactccgtggcctcgggcatccagtcaagcctagatgaggggcagagcgtgggcttcgaagaggaggacggcggtggggaggaaggctccagtgggcccggccctgcagctcacactttgagggagccccaggatcccagccaggagaagcctcaggccggagaactggaggccggagaggagcttgcggctgtgtgtgcggctgcctacactatagaattactggacactgtggccttaaacctgcaccgcatagacaaggatgtgcagaggtgtgaccgcaactactggtacttcacgccccccaacctcgagaggctcagagacgtcatgtgcagctacgtgtgggagcacctggacgtgggctatgtgcagggcatgtgcgatctgctggcgcctctcctggtcaccctcgacaatgatcagctggcctacagctgcttcagccacctcatgaagaggatgagccagaacttccccaacgggggtgccatggacacccactttgccaacatgcgctccctcatccagatcctggactcagagctgtttgagctgatgcatcagaatggagactacacccacttctacttctgttatcgctggttcctgctggattttaagagagaactgctgtatgaggatgtgtttgctgtgtgggaggtgatctgggcagccaggcacatctcatcggagcactttgtcctgttcatcgccctcgccctggtggaggcctaccgagagatcatccgtgacaacaacatggacttcactgacatcatcaagtttttcaatgaacgtgctgagcatcacgatgcccaggagatcctgcggattgcccgggacctcgtccacaaggtgcagatgctcatagagaacaagtgagctggggccaggaggcagcagccgtgcagagcctgggctccggcagggagaggtgcaggggagtcaccgcccagacctccccagccaccaaccgaccccacctctgttcctaacaaagcggttgtgagcctggatccgactcccggcagtgctgaccctgcagggcaagtcaggggccaggatgccctcggatcagggccgggatgggaggggtcagcctcagggagcagctgccttgggggacacacctactctgctcccctctcacacatctgggagtagccccactgccacctgcagccgcagcctggactgctgcccacgagtgaacctggggccccacaggattaacaggggctatagcggcctgggccctactcagctggggtggcagagggcgagaggctctgtgctgtgtcccttctgagggtccctttgcagtcccagtatattgtgcgtgcaccagccccagctggagcaaccaaaactgcttctggtttaggcacacgtcacgggtgcgggagacccgggcacgggagacccgggccgccttcaggccgctcccccgagattctggggcagtcggaagatgtgggccctgggtgggagcagcccacttcagcagcactgccactgcctttggccacctgaggtgacccccaggcctccccggccttgtacagtgtacctctgtgtatctgtacagcctcgctcctgccaccccacccttgcgttctgcattaggtacttccctgaaaaccacgtgtaagaagtgatgcttttgccagtggatgatctggaatgcgaccggagcacttgctctgaggaatcccagggtgactctgtcggggaagaatccggtcacagcctcccctcagagacaggcctcagttcgagggcagcccattatctgtcgcagacatctgccatgtccctgagactgcgggaggcaggggatgcatgggtgtccccatctgtccctggtgagaagcaaggctagctctgccttccacatgcttctcaggatgccaagaggcctaggaacccagaaacccccttggaggagctgtgtatgcgggggtgccaggaagggcatagctcctgcccccaggcctaggcatgctgcttgctcggccatccccacttcctcctctaccccaacacatgcaggctaggccttgccctggaacatggaggccctgcccggggctggggcctagtccagcagccaccaaagtctggcagactttctgcatttgagaaacatgacaaagggccccgcagcccttctgcacccagcacagcctgcccagcccagccctgcccccgggcactgcacagcctgtctgggggccagaccaccccattgtccatccttgttgtccgtgagtccttggcctccaccaagcacgtgtggccattgtgtgcctgccttagtgactccgtggttttgtgaggagcagagtgtgtatgatttttgcctcagaaactatactcttctgtgtaacagaccaataaacaacatttgtc

SEQ ID NO: 39127 - DNA, 3021 bp, Artificial Sequence
  derived and/or modified sequence
atgggcagcgccgaggacgccgtgaaggagaagctgctgtggaacgtgaagaaggaggtgaagcagatcatggaggaggccgtgaccagaaagttcgtgcacgaggacagcagccacatcatcgccctgtgcggcgccgtggaggcctgcctgctgcaccagctgagaagaagagccgccggcttcctgagaagcgacaagatggccgccctgttcaccaaggtgggcaagacctgccccgtggccggcgagatctgccacaaggtgcaggagctgcagcagcaggccgagggcagaaagcccagcggcgtgagccaggaggccctgagaagacagggcagcgccagcggcaaggcccccgccctgagcccccaggccctgaagcacgtgtgggtgagaaccgccctgatcgagaaggtgctggacaaggtggtgcagtacctggccgagaactgcagcaagtactacgagaaggaggccctgctggccgaccccgtgttcggccccatcctggccagcctgctggtgggcccctgcgccctggagtacaccaagctgaagaccgccgaccactactggaccgaccccagcgccgacgagctggtgcagagacacagaatcagaggcccccccaccagacaggacagccccgccaagagacccgccctgggcatcagaaagagacacagcagcggcagcgccagcgaggacagactggccgcctgcgccagagagtgcgtggagagcctgcaccagaacagcagaaccagactgctgtacggcaagaaccacgtgctggtgcagcccaaggaggacatggaggccgtgcccggctacctgagcctgcaccagagcgccgagagcctgaccctgaagtggacccccaaccagctgatgaacggcaccctgggcgacagcgagctggagaagagcgtgtactgggactacgccctggtggtgcccttcagccaggtggtgtgcatccactgccaccagcagaagagcggcggcaccctggtgctggtgagccaggacggcatccagagaccccccctgcacttcccccagggcggccacctgctgagcttcctgagctgcctggagaacggcctgctgcccagaggccagctggagccccccctgtggacccagcagggcaagggcaaggtgttccccaagctgagaaagagaagcagcatcagaagcgtggacatggaggagatgggcaccggcagagccaccgactacgtgttcagaatcatctaccccggccacagacacgagcacaacgccggcgacatgatcgagatgcagggcttcggccccagcctgcccgcctggcacctggagcccctgtgcagccagggcagcagctgcctgagctgcagcagcagcagcagcccccacgccacccccagccactgcagctgcatccccgacagactgcccctgagactgctgtgcgagagcatgaagagacagatcgtgagcagagccttctacggctggctggcccactgcagacacctgagcaccgtgagaacccacctgagcgccctggtgcaccacagcgtgatcccccccgacagaccccccggcgccagcgccggcctgaccaaggacgtgtggagcaagtaccagaaggacaagaagaactacaaggagctggagctgctgagacaggtgtactacggcggcatcgagcacgagatcagaaaggacgtgtggcccttcctgctgggccactacaagttcggcatgagcaagaaggagatggagcaggtggacgccgtggtggccgccagataccagcaggtgctggccgagtggaaggcctgcgaggtggtggtgagacagagagagagagaggcccaccccgccaccagaaccaagttcagcagcggcagcagcatcgacagccacgtgcagagactgatccacagagacagcaccatcagcaacgacgtgttcatcagcgtggacgacctggagccccccgagccccaggaccccgaggacagcagacccaagcccgagcaggaggccggccccggcacccccggcaccgccgtggtggagcagcagcacagcgtggagttcgacagccccgacagcggcctgcccagcagcagaaactacagcgtggccagcggcatccagagcagcctggacgagggccagagcgtgggcttcgaggaggaggacggcggcggcgaggagggcagcagcggccccggccccgccgcccacaccctgagagagccccaggaccccagccaggagaagccccaggccggcgagctggaggccggcgaggagctggccgccgtgtgcgccgccgcctacaccatcgagctgctggacaccgtggccctgaacctgcacagaatcgacaaggacgtgcagagatgcgacagaaactactggtacttcaccccccccaacctggagagactgagagacgtgatgtgcagctacgtgtgggagcacctggacgtgggctacgtgcagggcatgtgcgacctgctggcccccctgctggtgaccctggacaacgaccagctggcctacagctgcttcagccacctgatgaagagaatgagccagaacttccccaacggcggcgccatggacacccacttcgccaacatgagaagcctgatccagatcctggacagcgagctgttcgagctgatgcaccagaacggcgactacacccacttctacttctgctacagatggttcctgctggacttcaagagagagctgctgtacgaggacgtgttcgccgtgtgggaggtgatctgggccgccagacacatcagcagcgagcacttcgtgctgttcatcgccctggccctggtggaggcctacagagagatcatcagagacaacaacatggacttcaccgacatcatcaagttcttcaacgagagagccgagcaccacgacgcccaggagatcctgagaatcgccagagacctggtgcacaaggtgcagatgctgatcgagaacaagtag

SEQ ID NO: 39128 - protein, 744 aa, Artificial Sequence
  derived and/or modified sequence
MATANFGKIQIGIYVEIKRSDGRIHQAMVTSLNEDNESVTVEWIENGDTKGKEIDLESIFSLNPDLVPDEEIEPSPETPPPPASSAKVNKIVKNRRTVASIKNDPPSRDNRVVGSARARPSQFPEQSSSAQQNGSVSDISPVQAAKKEFGPPSRRKSNCVKEVEKLQEKREKRRLQQQELREKRAQDVDATNPNYEIMCMIRDFRGSLDYRPLTTADPIDEHRICVCVRKRPLNKKETQMKDLDVITIPSKDVVMVHEPKQKVDLTRYLENQTFRFDYAFDDSAPNEMVYRFTARPLVETIFERGMATCFAYGQTGSGKTHTMGGDFSGKNQDCSKGIYALAARDVFLMLKKPNYKKLELQVYATFFEIYSGKVFDLLNRKTKLRVLEDGKQQVQVVGLQEREVKCVEDVLKLIDIGNSCRTSGQTSANAHSSRSHAVFQIILRRKGKLHGKFSLIDLAGNERGADTSSADRQTRLEGAEINKSLLALKECIRALGRNKPHTPFRASKLTQVLRDSFIGENSRTCMIATISPGMASCENTLNTLRYANRVKEFGISPSDIPFSQGSGSRPDLSPSYEYDDFSPSVTRVKELTVDPTAAGDVRPIMHHPPNQIDDLETQWGVGSSPQRDDLKLLCEQNEEEVSPQLFTFHEAVSQMVEMEEQVVEDHRAVFQESIRWLEDEKALLEMTEEVDYDVDSYATQLEAILEQKIDILTELRDKVKSFRAALQEEEQASKQINPKRPRAL

SEQ ID NO: 39129 - DNA, 2235 bp, Artificial Sequence
  derived and/or modified sequence
atggccaccgccaacttcggcaagatccagatcggcatctacgtggagatcaagagaagcgacggcagaatccaccaggccatggtgaccagcctgaacgaggacaacgagagcgtgaccgtggagtggatcgagaacggcgacaccaagggcaaggagatcgacctggagagcatcttcagcctgaaccccgacctggtgcccgacgaggagatcgagcccagccccgagaccccccccccccccgccagcagcgccaaggtgaacaagatcgtgaagaacagaagaaccgtggccagcatcaagaacgacccccccagcagagacaacagagtggtgggcagcgccagagccagacccagccagttccccgagcagagcagcagcgcccagcagaacggcagcgtgagcgacatcagccccgtgcaggccgccaagaaggagttcggcccccccagcagaagaaagagcaactgcgtgaaggaggtggagaagctgcaggagaagagagagaagagaagactgcagcagcaggagctgagagagaagagagcccaggacgtggacgccaccaaccccaactacgagatcatgtgcatgatcagagacttcagaggcagcctggactacagacccctgaccaccgccgaccccatcgacgagcacagaatctgcgtgtgcgtgagaaagagacccctgaacaagaaggagacccagatgaaggacctggacgtgatcaccatccccagcaaggacgtggtgatggtgcacgagcccaagcagaaggtggacctgaccagatacctggagaaccagaccttcagattcgactacgccttcgacgacagcgcccccaacgagatggtgtacagattcaccgccagacccctggtggagaccatcttcgagagaggcatggccacctgcttcgcctacggccagaccggcagcggcaagacccacaccatgggcggcgacttcagcggcaagaaccaggactgcagcaagggcatctacgccctggccgccagagacgtgttcctgatgctgaagaagcccaactacaagaagctggagctgcaggtgtacgccaccttcttcgagatctacagcggcaaggtgttcgacctgctgaacagaaagaccaagctgagagtgctggaggacggcaagcagcaggtgcaggtggtgggcctgcaggagagagaggtgaagtgcgtggaggacgtgctgaagctgatcgacatcggcaacagctgcagaaccagcggccagaccagcgccaacgcccacagcagcagaagccacgccgtgttccagatcatcctgagaagaaagggcaagctgcacggcaagttcagcctgatcgacctggccggcaacgagagaggcgccgacaccagcagcgccgacagacagaccagactggagggcgccgagatcaacaagagcctgctggccctgaaggagtgcatcagagccctgggcagaaacaagccccacacccccttcagagccagcaagctgacccaggtgctgagagacagcttcatcggcgagaacagcagaacctgcatgatcgccaccatcagccccggcatggccagctgcgagaacaccctgaacaccctgagatacgccaacagagtgaaggagttcggcatcagccccagcgacatccccttcagccagggcagcggcagcagacccgacctgagccccagctacgagtacgacgacttcagccccagcgtgaccagagtgaaggagctgaccgtggaccccaccgccgccggcgacgtgagacccatcatgcaccacccccccaaccagatcgacgacctggagacccagtggggcgtgggcagcagcccccagagagacgacctgaagctgctgtgcgagcagaacgaggaggaggtgagcccccagctgttcaccttccacgaggccgtgagccagatggtggagatggaggagcaggtggtggaggaccacagagccgtgttccaggagagcatcagatggctggaggacgagaaggccctgctggagatgaccgaggaggtggactacgacgtggacagctacgccacccagctggaggccatcctggagcagaagatcgacatcctgaccgagctgagagacaaggtgaagagcttcagagccgccctgcaggaggaggagcaggccagcaagcagatcaaccccaagagacccagagccctgtag

SEQ ID NO: 39130 - DNA, 2235 bp, Artificial Sequence
  derived and/or modified sequence
atggcaaccgctaactttgggaagatacaaatagggatatatgtggagatcaaacgcagtgatgggaggatccaccaagctatggtcacgtcactcaacgaggacaacgagtctgtgactgttgagtggatcgaaaacggtgacaccaagggtaaagagatcgatctcgagtccatcttttccctgaacccagatttggtgccagatgaggagattgaaccctcgccagaaactcctccaccacctgcgtctagtgctaaagtgaacaagattgttaaaaatcggagaaccgtggcaagcattaaaaatgaccctccttcccgagataaccgagtcgtgggctccgctagagcgcggccctctcaattcccggagcagagtagctctgcacaacagaatgggtccgtgagcgatatcagccctgtgcaagccgctaaaaaggagttcggcccaccaagccgacggaaatcaaactgtgttaaggaagtcgagaaactccaagaaaaacgcgaaaaaaggcgcttgcagcagcaggagcttagagagaagcgtgcccaggatgtggacgcgactaaccctaactatgagattatgtgcatgattagggactttagaggtagtctggattaccgccctctaaccaccgcggatccaatcgacgagcatcggatctgtgtgtgtgtgcgcaagagaccgctcaacaagaaagaaacacaaatgaaagacctggacgtgatcacgatcccatccaaagacgtggtgatggttcacgaacccaaacaaaaggtggatttgaccaggtacctggagaaccagacattccggtttgactacgcattcgatgacagcgctccaaatgagatggtctaccgttttacagctaggcctttagtggagactatttttgaacgaggaatggctacatgctttgcttatggacagacaggatccggcaagacacacacaatgggaggcgacttctctggaaagaatcaggactgtagcaaaggtatatatgcattagccgctcgcgatgtgtttctgatgcttaaaaagcctaattataaaaaactcgaacttcaggtgtacgcaacatttttcgagatctatagtggaaaagtgtttgatttgttaaataggaaaacgaaactgcgagttctggaggatgggaaacagcaggttcaggtggtcgggttacaggaaagggaggttaagtgcgtggaggacgtgctgaagttgatcgatatcggaaattcttgtcgcaccagtggtcagacctctgcaaatgctcattcctcacggagtcacgccgtgttccagattatcctgcgccgcaaaggcaaactccatggtaagttttctttgattgatctggcaggaaacgagcgtggcgcagacacttcttcagcagacaggcagacaaggttagagggcgccgaaatcaacaagtcattacttgccttgaaagagtgcattagggctcttggtcggaacaagccccacacacccttccgcgcgtctaagctgacgcaggtgctccgtgacagctttattggcgagaactccaggacatgtatgatagctacaatctctcctggaatggcttcctgcgaaaatactctgaacacgctccggtacgctaatcgtgttaaagagtttggaatatcacctagcgatattcctttcagtcagggctctggctccaggcccgatctatctcctagctatgaatacgatgacttctcaccttccgtcacccgggtgaaggagctgaccgtcgacccaaccgcagcaggcgatgttaggcccatcatgcaccatcctcctaatcaaatagacgatctggaaacacagtggggtgtcgggtcaagtccacagcgggacgatctcaaactcctctgcgaacagaacgaagaagaggtctccccgcagctgtttacatttcatgaggccgtatcacaaatggtcgagatggaggaacaggtcgtagaagaccacagggcagtgtttcaggaaagtatcagatggctggaagatgagaaagctcttttggaaatgactgaggaagtggattatgacgtggacagttatgcaacccagctggaggcaatattggagcagaagattgacatcctcacagaactgagggacaaagttaagtcctttagagccgcactgcaggaagaggagcaggcttccaaacagatcaacccaaaaaggcccagagcgctatag

SEQ ID NO: 39131 - DNA, 2235 bp, Artificial Sequence
  derived and/or modified sequence
atggccacagccaactttgggaagatccagatcggcatctacgtggagatcaagagaagtgatggccgcatccaccaggccatggtgaccagcctgaatgaagataatgaatctgtgacagtggagtggattgaaaatggagacaccaagggcaaggagattgacctggagagcatcttcagcctgaacccagacctggtgcctgatgaggagattgagcccagccctgagaccccacctcctccagccagcagcgccaaggtgaacaagatcgtgaagaacagaagaacagtggccagcatcaagaatgacccccccagccgggacaacagagtggtgggcagcgcccgggcccggcccagccagtttcctgagcagagcagcagcgcccagcagaatggatctgtgtctgacatcagccctgtgcaggccgccaagaaggagtttggaccacccagcaggaggaagagcaactgtgtgaaggaggtggagaagctgcaggagaagcgggagaagaggcggctgcagcagcaggagctgcgggagaagagggcccaggatgtggatgccaccaaccccaactatgagatcatgtgcatgatccgggacttccggggcagcctggactaccggcccctgaccacagctgaccccattgatgagcaccgcatctgtgtgtgtgtgaggaagaggcccctgaacaagaaggagacccagatgaaggacctggatgtgatcaccatccccagcaaggatgtggtgatggtgcatgagcccaagcagaaggtggacctgacccgctacctggagaaccagaccttccgctttgattatgcctttgatgattctgccccaaatgagatggtgtaccgcttcaccgcccggcccctggtggagaccatctttgagcggggcatggccacctgctttgcctacggccagacaggcagcggcaagacccacaccatgggcggggacttcagcggcaagaaccaggactgcagcaagggcatctatgccctggccgccagagatgtgttcctgatgctgaagaagcccaactacaagaagctggagctgcaggtgtatgccaccttctttgagatctacagcggcaaggtgtttgacctgctgaacaggaagaccaagctgcgggtgctggaggatggcaagcagcaggtgcaggtggtgggcctgcaggagcgggaggtgaagtgtgtggaggatgtgctgaagctgattgacatcggcaacagctgcaggaccagcggccagaccagcgccaatgcccacagcagccgcagccatgctgtgttccagatcatcctgcggaggaagggcaagctgcacggcaagttcagcctgattgacctggccggaaatgaaagaggagctgacaccagcagcgctgaccggcagacccggctggagggcgctgagatcaacaagagcctgctggccctgaaggagtgcatccgggccctgggcaggaacaagccccacacccccttccgggccagcaagctgacccaggtgctgcgggacagcttcatcggggagaacagcaggacctgcatgattgccaccatcagccctggcatggccagctgtgagaacaccctgaacaccctgcgctatgccaacagagtgaaggagtttggcatcagccccagcgacatccccttcagccagggcagcggcagcaggccagacctgagccccagctatgaatatgatgacttcagccccagcgtgaccagggtgaaggagctgactgtggaccccacagctgctggagatgtgcggcccatcatgcaccacccccccaaccagattgatgacctggagacccagtggggcgtgggcagcagcccccagagagatgacctgaagctgctgtgtgagcagaatgaggaggaggtgagcccccagctgttcaccttccatgaagctgtgtcccagatggtggagatggaggagcaggtggtggaggaccacagagctgtgttccaggagagcatccgctggctggaggatgagaaggccctgctggagatgacagaggaggtggactatgatgtggacagctatgccacccagctggaggccatcctggagcagaagattgacatcctgacagagctgcgggacaaggtgaagagcttccgggccgccctgcaggaggaggagcaggccagcaagcagatcaaccccaagaggccccgggccctgtag

SEQ ID NO: 39132 - DNA, 2235 bp, Artificial Sequence
  derived and/or modified sequence
atggccaccgccaacttcggcaagatccagatcggcatctacgtggaaatcaaaagatctgatgggcgcatacatcaggccatggtgacctctctgaacgaggacaatgagagtgtgacagtagagtggatcgagaatggcgataccaaagggaaggagattgatcttgaatcaatttttagccttaatccagacctcgtgcctgatgaggagattgaaccttctcctgaaactccaccaccaccagcctctagcgctaaggtaaacaagattgtaaagaacagaaggacagttgcctcgatcaagaatgatccaccctctagggacaatagggtggtcggctccgccagggccagaccaagccaatttcccgagcagtcctcaagtgcccaacagaacggtagcgtctcagacatcagccccgtccaggcagcgaaaaaggagttcggcccaccctccagacgtaagtcaaactgcgtcaaggaggtggaaaagcttcaggagaaaagggaaaagcgtcgattgcagcagcaggagctgagagagaagcgagcgcaggatgtggatgcaaccaatcccaactatgagataatgtgcatgatccgagatttcaggggtagcttagattataggcctctgacgactgctgatccgattgatgaacatcggatctgcgtctgcgtgagaaaacgacctctgaataagaaggagacacaaatgaaagaccttgacgttattacaattccaagcaaggacgtggttatggtacacgaacccaaacagaaagtggacctgacgcgctatcttgaaaatcagacatttcggtttgactatgcctttgatgattcggcaccaaatgagatggtctatcgatttaccgcccggcccctcgtggagactatatttgagagggggatggcaacatgtttcgcatacggccagaccggcagcggaaagactcatacaatggggggcgacttctctggcaaaaatcaggattgttcgaaaggaatatacgcactggctgcacgtgacgtgtttctcatgctgaaaaagccaaattataagaagctcgaactgcaggtgtacgccactttcttcgaaatttattcaggcaaggtttttgacctcctgaacaggaaaactaagctccgggtcttggaggacgggaagcagcaggttcaggtagtcgggctgcaagagagagaggttaagtgtgtggaggacgtactgaaactgatagacatcggaaatagctgtcgtacctccggccagaccagtgctaacgcacactcatccagatctcatgccgtgttccagatcattctaagaagaaagggcaagttacacggcaaattcagtcttattgacctcgcaggaaacgagcggggagctgatacttctagcgccgaccgtcagacacggttagaaggggccgaaatcaacaagagtctgctggcactgaaagagtgcatcagagccctggggagaaacaaacctcacactccatttagagcttctaaattgacacaggtgctgcgggattcattcatcggggaaaattctagaacttgtatgatcgcaacaatttcccccggtatggcctcatgtgagaacacattaaacaccctgaggtatgctaatcgcgtcaaggagttcggcatcagccctagcgacatccccttcagccaaggaagtggcagcagaccagatctgagcccatcttacgagtatgatgatttcagccccagcgttacgcgggtcaaggagcttactgtagatcctaccgctgccggcgacgtaaggcctatcatgcatcacccacccaaccagatcgatgacctggagactcagtggggcgtagggagctccccccaaagagatgatctgaaactgctgtgtgaacagaacgaagaggaggtcagtcctcagctcttcacgttccacgaagccgtgagccagatggtggagatggaggagcaggttgtcgaggaccaccgcgctgttttccaggagtccataagatggctggaggatgaaaaagcgttgctggaaatgacagaagaagtggattacgatgtggactcatacgcaactcaacttgaggcaatcctggagcagaagatcgacattcttacagagctaagggacaaggtgaaatcgttcagggctgcactgcaggaggaggagcaggcctcaaagcagattaatccaaagcggccaagggctctttag

SEQ ID NO: 39133 - DNA, 2315 bp, Artificial Sequence
  derived and/or modified sequence
gctgctgctccagatgaggtgatggcaacggccaacttcggcaagatccagatcgggatttacgtggagatcaagcgcagcgatggccgaatacatcaagcaatggtaacatctttaaatgaagataatgaaagtgtaactgttgaatggatagaaaatggagatacaaaaggcaaagagattgacctggagagcatcttttcacttaaccctgaccttgttcctgatgaagaaattgaacccagtccagaaacacctccacctccagcatcctcagccaaagtaaacaaaattgtaaagaatcgacggactgtagcttctattaagaatgaccctccttcaagagataatagagtggttggttcagcacgtgcacggcccagtcaatttcctgaacagtcttcctctgcacaacagaatggtagtgtttcagatatatctccagttcaagctgcaaaaaaggaatttggacccccttcacgtagaaaatctaattgtgtgaaagaagtagaaaaactgcaagaaaaacgagagaaaaggagattgcaacagcaagaacttagagaaaaaagagcccaggacgttgatgctacaaacccaaattatgaaattatgtgtatgatcagagactttagaggaagtttggattatagaccattaacaacagcagatcctattgatgaacataggatatgtgtgtgtgtaagaaaacgaccactcaataaaaaagaaactcaaatgaaagatcttgatgtaatcacaattcctagtaaagatgttgtgatggtacatgaaccaaaacaaaaagtagatttaacaaggtacctagaaaaccaaacatttcgttttgattatgcctttgatgactcagctcctaatgaaatggtttacaggtttactgctagaccactagtggaaactatatttgaaaggggaatggctacatgctttgcttatgggcagactggaagtggaaaaactcatactatgggtggtgacttttcaggaaagaaccaagattgttctaaaggaatttatgcattagcagctcgagatgtctttttaatgctaaagaagccaaactataagaagctagaacttcaagtatatgcaaccttctttgaaatttatagtggaaaggtgtttgacttgctaaacaggaaaacaaaattaagagttctagaagatggaaaacagcaggttcaagtggtgggattacaggaacgggaggtcaaatgtgttgaagatgtactgaaactcattgacataggcaacagttgcagaacatccggtcaaacatctgcaaatgcacattcatctcggagccatgcagtgtttcagattattcttagaaggaaaggaaaactacatggcaaattttctctcattgatttggctggaaatgaaagaggagctgatacttccagtgcggacaggcaaactaggcttgaaggtgctgaaattaataaaagccttttagcactcaaggagtgcatcagagccttaggtagaaataaacctcatactcctttccgtgcaagtaaactcactcaggtgttaagagattctttcataggtgaaaactctcgtacctgcatgattgccacaatctctccaggaatggcatcctgtgaaaatactcttaatacattaagatatgcaaatagagtaaaggagtttggaattagtccatcagacattcccttctcacagggtagtggcagtcgccctgatctctctccttcttatgaatatgacgacttttctccttcagttaccagggtcaaagaattgactgtagatccaactgctgctggtgatgttcgtccaataatgcaccatccaccaaaccagattgatgacttagagacacagtggggtgtggggagttcccctcagagagatgatctaaaacttctttgtgaacaaaatgaagaagaagtctctccacagttgtttactttccacgaagctgtttcacaaatggtagaaatggaagaacaagttgtagaagatcacagggcagtgttccaggaatctattcggtggttagaagatgaaaaggccctcttagagatgactgaagaagtagattatgatgtcgattcatatgctacacaacttgaagctattcttgagcaaaaaatagacattttaactgaactgcgggataaagtgaaatctttccgtgcagctctacaagaggaggaacaagccagcaagcaaatcaacccgaagagaccccgtgccctttaaaccggcatttgctgctaaaggatacccagaaccctcactactgtaacatacaacggttc

SEQ ID NO: 39134 - DNA, 2235 bp, Artificial Sequence
  derived and/or modified sequence
atggctaccgccaatttcggaaaaatccaaatcggtatttacgttgaaatcaagcggtctgatggcaggattcatcaggcgatggtgactagtctaaacgaggataatgagtctgtgaccgttgaatggatcgagaatggggacacaaaaggaaaggaaattgatttagagagcatattctccctgaaccccgacctggtgccagacgaggagatagagccaagcccagagaccccccctccacctgcgagtagcgcaaaagtcaacaaaatcgtcaaaaatagaaggaccgtggcctctatcaagaatgacccaccaagtcgcgataatcgcgtggtgggtagcgccagagcaaggccctcccagtttccagagcagtccagctccgcacagcagaatggtagtgtctccgatatctctcccgtgcaagctgccaaaaaagaattcggccctccttctaggcgcaagtcaaattgtgttaaagaggttgaaaaactgcaggagaagcgagaaaagcggaggttgcagcagcaagaactgcgggaaaaacgggctcaggatgtggacgctacaaacccaaattacgaaattatgtgtatgatccgggactttagagggtcgctggactacaggcctctgacgacggccgacccaatcgacgagcaccgtatttgcgtatgcgtgcgcaaacgccctctgaacaaaaaagagactcaaatgaaagatctggacgtgataacaataccaagcaaggacgtggttatggtccacgagccgaaacagaaggtggacctcactcgttatctggaaaaccaaacattccgtttcgattatgcgttcgatgacagtgcgccaaatgagatggtatataggttcaccgctcgacctctggtggaaactatttttgaacgcggaatggccacctgttttgcctatggacagacagggtccggcaaaactcataccatggggggtgactttagtgggaaaaaccaggactgcagtaaagggatttacgctctggcagccagagacgtttttctgatgcttaaaaaaccgaactacaaaaagcttgaactacaggtgtatgcaacatttttcgaaatctatagcgggaaagtgttcgatttgttgaatagaaagaccaagctgcgggttctcgaagatggaaaacagcaggtgcaagtggttgggctccaggagcgagaggtgaagtgcgttgaagacgtgttgaaattaattgacattggaaactcctgccgaactagtggtcagacgagcgcaaacgcccactcttcccgatcccacgcggtcttccagatcatattgaggcggaaaggtaaacttcatggtaagttctcccttatagaccttgctggaaacgaacgaggcgctgatacaagcagcgccgatcgtcagaccagactcgagggggcagagataaataagtcactcttagcactaaaagagtgcatacgcgcactggggagaaataaaccccataccccgtttcgggcttccaaacttactcaggttctcagggactcctttataggggaaaattcaaggacatgcatgattgccaccatctctcctggaatggcctcctgcgaaaataccctcaatactctgagatacgccaaccgcgtgaaggaattcggcatctccccgagcgacattccgttcagtcagggatctgggtcaagacctgatctgtctccctcatacgagtacgatgactttagcccctcagtcactcgggtgaaggagctgactgtggatccaacagccgctggcgatgttaggccaattatgcatcatccccctaatcagatcgacgacctggaaacacagtggggcgtgggtagctcccctcaacgagatgatctcaagctcctgtgcgaacaaaatgaagaggaagtgtcaccgcagctgtttacattccatgaggctgtgtctcagatggtggagatggaggagcaggtggttgaagatcatagggccgtgtttcaggagtctattcgctggctagaggatgaaaaggccttactcgaaatgaccgaggaagtagactacgatgtcgactcgtatgctacacagctggaggctatcctcgagcagaagatcgatattctcaccgaactccgagacaaggtcaagtcctttagagctgcccttcaggaagaagagcaggcaagcaaacagattaatccgaagagaccccgtgccctgtag

SEQ ID NO: 39135 - protein, 659 aa, Artificial Sequence
  derived and/or modified sequence
MLKEERIKELEKRLSEKEEEIQELKRKLHKCQSVLPVPSTHIGPRTTRAQGISAEPQTYRSFHDLRQAFRKFTKSERSKDLIKEAILDNDFMKNLELSQIQEIVDCMYPVEYGKDSCIIKEGDVGSLVYVMEDGKVEVTKEGVKLCTMGPGKVFGELAILYNCTRTATVKTLVNVKLWAIDRQCFQTIMMRTGLIKHTEYMEFLKSVPTFQSLPEEILSKLADVLEETHYENGEYIIRQGARGDTFFIISKGTVNVTREDSPSEDPVFLRTLGKGDWFGEKALQGEDVRTANVIAAEAVTCLVIDRDSFKHLIGGLDDVSNKAYEDAEAKAKYEAEAAFFANLKLSDFNIIDTLGVGGFGRVELVQLKSEESKTFAMKILKKRHIVDTRQQEHIRSEKQIMQGAHSDFIVRLYRTFKDSKYLYMLMEACLGGELWTILRDRGSFEDSTTRFYTACVVEAFAYLHSKGIIYRDLKPENLILDHRGYAKLVDFGFAKKIGFGKKTWTFCGTPEYVAPEIILNKGHDISADYWSLGILMYELLTGSPPFSGPDPMKTYNIILRGIDMIEFPKKIAKNAANLIKKLCRDNPSERLGNLKNGVKDIQKHKWFEGFNWEGLRKGTLTPPIIPSVASPTDTSNFDSFPEDNDEPPPDDNSGWDIDF

SEQ ID NO: 39136 - protein, 671 aa, Artificial Sequence
  derived and/or modified sequence
MSELEEDFAKILMLKEERIKELEKRLSEKEEEIQELKRKLHKCQSVLPVPSTHIGPRTTRAQGISAEPQTYRSFHDLRQAFRKFTKSERSKDLIKEAILDNDFMKNLELSQIQEIVDCMYPVEYGKDSCIIKEGDVGSLVYVMEDGKVEVTKEGVKLCTMGPGKVFGELAILYNCTRTATVKTLVNVKLWAIDRQCFQTIMMRTGLIKHTEYMEFLKSVPTFQSLPEEILSKLADVLEETHYENGEYIIRQGARGDTFFIISKGTVNVTREDSPSEDPVFLRTLGKGDWFGEKALQGEDVRTANVIAAEAVTCLVIDRDSFKHLIGGLDDVSNKAYEDAEAKAKYEAEAAFFANLKLSDFNIIDTLGVGGFGRVELVQLKSEESKTFAMKILKKRHIVDTRQQEHIRSEKQIMQGAHSDFIVRLYRTFKDSKYLYMLMEACLGGELWTILRDRGSFEDSTTRFYTACVVEAFAYLHSKGIIYRDLKPENLILDHRGYAKLVDFGFAKKIGFGKKTWTFCGTPEYVAPEIILNKGHDISADYWSLGILMYELLTGSPPFSGPDPMKTYNIILRGIDMIEFPKKIAKNAANLIKKLCRDNPSERLGNLKNGVKDIQKHKWFEGFNWEGLRKGTLTPPIIPSVASPTDTSNFDSFPEDNDEPPPDDNSGWDIDF

SEQ ID NO: 39137 - DNA, 1980 bp, Artificial Sequence
  derived and/or modified sequence
atgttaaaggaagagagaatcaaagagcttgagaaaaggctgtctgaaaaggaggaggagatccaagagctgaagagaaaactacacaagtgccagagcgtactccccgtgccgtctacccacattggtcctcgcaccacccgggctcagggcatatctgcggaacctcaaacctacagaagcttccatgacctcaggcaggcgtttaggaagttcactaagtccgagcggtcgaaagaccttatcaaggaggccattctggataatgacttcatgaagaatctggagctgtcacagatccaggaaatcgttgactgtatgtatcctgtggagtacggcaaagacagctgcatcatcaaggaaggcgacgttggctcattagtgtacgtgatggaggatgggaaggtggaggttaccaaagagggagtcaagctctgcactatgggacccggcaaggtctttggcgagctggcaatcctgtacaactgtacacgcaccgcgacggtgaagactctggtcaatgtgaaattgtgggcaatagatcggcaatgctttcagaccatcatgatgcggacgggacttattaagcacaccgaatacatggagttcttaaagagcgtccctactttccaaagcctcccggaggaaattcttagtaagttggccgatgtactcgaggaaacccattacgagaatggggagtacatcattaggcagggagccagaggcgacactttctttattatttcaaaaggcacagttaatgtgaccagggaggattccccaagtgaagacccagtgtttctacgtaccctcgggaagggcgattggttcggcgagaaggccctccagggggaagacgtgcgcacagcaaatgtcatcgccgcagaagcggttacatgcctggtaatcgatcgggacagcttcaaacatctgatcggggggctcgacgacgttagtaacaaagcctacgaagacgccgaagccaaagctaaatatgaggccgaagccgccttcttcgccaatctcaaattgtccgacttcaacatcatcgatactctgggagtggggggcttcgggcgcgtggaactcgtccagctgaagagtgaagagtccaagacctttgcaatgaagatcctcaaaaaaagacatattgtcgacaccagacagcaagagcacatcagatccgaaaaacagataatgcaaggcgcacattcggatttcatcgtgagactgtacaggactttcaaggacagcaagtacctatacatgcttatggaagcgtgcctgggaggggagttatggaccatcctgagagacaggggatcatttgaggactcaactaccagattctatactgcatgcgtggtcgaggcatttgcgtatctccatagtaagggtatcatctaccgcgacttgaagccagagaatctcattttagatcatcgaggctatgctaagctggtcgactttggctttgccaagaagatagggtttgggaagaagacctggactttctgtgggaccccagaatatgtagctcccgaaataatactcaacaaaggccatgatatttccgccgattactggtctcttggtattttgatgtatgagctgctgaccggtagccctccattcagcgggccagacccgatgaagacctacaatataatcttaaggggaatcgatatgattgagtttcccaagaagatcgctaagaacgccgccaacctaataaagaagctttgccgagataatccgagtgaacggctgggcaacctaaaaaacggtgtgaaggacatacagaagcacaagtggtttgagggctttaactgggagggattacgcaaaggaaccttgaccccacccattattccaagtgtggcctctcccactgacacaagtaatttcgatagtttccccgaggataacgatgagcctccaccggacgacaattctggttgggacatcgacttttag

SEQ ID NO: 39138 - DNA, 2016 bp, Artificial Sequence
  derived and/or modified sequence
atgtcagagctagaagaagatttcgccaaaattttaatgttaaaggaagagagaattaaagaactggagaagcgtttgtcagaaaaagaggaggagatacaggagctgaaacgcaagcttcataagtgccaatccgtgctcccggtacccagcacgcacatcggacctcggaccactagagcccagggcattagtgccgagccccagacataccggtcattccacgatctgcggcaagcttttaggaagtttactaagtcagaaaggtccaaggacctcatcaaggaggccattcttgataatgattttatgaagaatctggagctgagccaaatacaggagattgtcgactgtatgtatcccgtggagtacggtaaagattcctgtattattaaagaaggcgatgtcgggtccctggtttacgtcatggaggacggaaaagtcgaggtcacaaaggagggagtgaagttgtgtactatgggaccaggcaaggtttttggcgagttagctattttgtacaattgcactaggaccgcaacagttaaaaccctggtgaacgtcaagctatgggcaattgacagacagtgttttcagacaattatgatgcgtacaggtttgatcaagcacaccgaatacatggagttcctgaagtccgtgcccacgttccagagccttccagaagaaattctttcgaagctggcagatgtgttagaggaaacccactacgagaatggcgagtatattatccgccagggtgcacgtggagacacattcttcataattagtaagggaaccgttaatgtgactagggaagattcccccagtgaggatccagtgtttctacgtactctgggcaagggggactggttcggcgagaaagccctgcagggggaggacgtgcggacggcaaacgtcattgcagccgaagccgttacctgcctagtcattgatagggattccttcaagcatttgatcggtggcctcgatgatgtctccaataaggcatatgaggacgccgaagctaaggcaaaatacgaggccgaagctgcctttttcgccaatttgaaactctcagactttaatatcattgataccctgggcgtgggaggtttcggccgagtggagctcgtgcaactgaaatcagaagagtcaaaaaccttcgccatgaagattctgaagaaacggcacattgttgatacgcggcagcaagagcatattaggagcgagaaacagatcatgcaaggagcacatagcgacttcatcgtgaggctttataggacgttcaaagattccaaatacctctacatgcttatggaggcttgtcttggaggagagctgtggacgatcttgcgtgataggggatccttcgaggacagtacaactagattttacacggcatgcgtcgtggaagccttcgcatacctgcactccaagggaattatttatagggatttaaagcctgaaaacctgattttagatcaccgcggctacgccaaactagtcgacttcggatttgcaaaaaaaatcgggttcggtaagaagacctggaccttttgcggtaccccagaatacgtggccccagaaattatcttgaataagggccatgacatctctgcagattattggagtctaggaatactaatgtatgagctgctgacggggtctcctcccttcagtggccccgatcccatgaagacttacaacatcattctgagaggcatagatatgatcgagttcccaaagaaaattgccaagaacgcagctaacctgataaaaaagttatgccgcgacaaccctagtgagcggctgggcaatctcaaaaacggcgtgaaggacatacagaagcacaagtggttcgagggcttcaattgggagggactcagaaaaggcaccctgacaccacccattattccgagcgtggcctcacccacagacacaagtaacttcgactccttccccgaggacaacgatgaaccgcccccagacgacaactccggttgggacattgatttttag

SEQ ID NO: 39139 - DNA, 1980 bp, Artificial Sequence
  derived and/or modified sequence
atgctgaaggaggagcgcatcaaggagctggagaagaggctgtctgagaaggaggaggagatccaggagctgaagaggaagctgcacaagtgccagagcgtgctgcctgtgcccagcacccacatcggccccaggaccacccgggcccagggcatctctgctgagccccagacctaccgctccttccatgacctgcggcaggccttcaggaagttcaccaagtctgagaggagcaaggacctgatcaaggaggccatcctggacaatgacttcatgaagaacctggagctgagccagatccaggagatcgtggactgcatgtaccctgtggagtatggcaaggacagctgcatcatcaaggagggagatgtgggcagcctggtgtatgtgatggaggatggcaaggtggaggtgaccaaggagggcgtgaagctgtgcaccatgggccctgggaaggtgtttggagagctggccatcctgtacaactgcaccaggacagccaccgtgaagaccctggtgaatgtgaagctgtgggccatcgaccggcagtgcttccagaccatcatgatgaggacaggcctcatcaagcacacagagtacatggagttcctgaagtctgtgcccaccttccagagcctgcctgaggagatcctgagcaagctggctgatgtgctggaggagacccactatgaaaatggagagtacatcatccggcagggcgcccggggggacaccttcttcatcatcagcaaaggaacagtgaatgtgacccgggaggacagccccagcgaggaccccgtcttcctgcggaccctgggcaagggggactggtttggagagaaggccctgcagggagaagatgtgaggacagccaacgtgattgctgctgaggccgtgacctgcctggtgattgaccgggacagcttcaagcacctgattggaggcctggatgatgtgagcaacaaggcctatgaagatgctgaggccaaggccaagtatgaagctgaggccgccttctttgccaacctgaagctgagtgacttcaacatcatcgacaccctgggcgtgggcggcttcggccgggtggagctggtgcagctgaagtctgaggagagcaagacctttgccatgaagatcctgaagaagaggcacatcgtggacacccggcagcaggagcacatccgctctgagaagcagatcatgcagggcgcccacagcgacttcatcgtgcggctgtaccgcaccttcaaggacagcaagtacctgtacatgctgatggaggcctgcctgggcggggagctgtggaccatcctgcgggaccggggcagctttgaggacagcaccacccgcttctacacagcctgtgtggtggaggcctttgcctacctgcacagcaagggcatcatctacagagacctgaagccagagaacctgatcctggaccaccggggctacgccaagctggtggactttggatttgccaagaagattggatttgggaagaagacctggaccttctgtggcaccccagaatatgtggcccctgagatcatcctgaacaagggccatgacatctctgctgactactggagcctgggcatcctgatgtatgagctgctgaccggcagcccccccttcagcggccctgaccccatgaagacctacaacatcatcctgcggggcatcgacatgattgagttccccaagaagatcgccaagaatgctgccaacctgatcaagaagctgtgccgggacaaccccagcgagcggctgggcaacctgaagaatggagtgaaggacatccagaagcacaagtggtttgagggcttcaactgggagggcctgaggaagggcaccctgaccccacccatcatccccagcgtggccagccccacagacaccagcaactttgacagcttccctgaggacaatgatgagcccccaccagatgacaacagcggctgggacatcgacttctag

SEQ ID NO: 39140 - DNA, 2016 bp, Artificial Sequence
  derived and/or modified sequence
atgtctgagctggaggaggactttgccaagatcctgatgctgaaggaggagcgcatcaaggagctggagaagaggctgtctgagaaggaggaggagatccaggagctgaagaggaagctgcacaagtgccagagcgtgctgcctgtgcccagcacccacatcggccccaggaccacccgggcccagggcatctctgctgagccccagacctaccgctccttccatgacctgcggcaggccttcaggaagttcaccaagtctgagaggagcaaggacctgatcaaggaggccatcctggacaatgacttcatgaagaacctggagctgagccagatccaggagatcgtggactgcatgtaccctgtggagtatggcaaggacagctgcatcatcaaggagggagatgtgggcagcctggtgtatgtgatggaggatggcaaggtggaggtgaccaaggagggcgtgaagctgtgcaccatgggccctgggaaggtgtttggagagctggccatcctgtacaactgcaccaggacagccaccgtgaagaccctggtgaatgtgaagctgtgggccatcgaccggcagtgcttccagaccatcatgatgaggacaggcctcatcaagcacacagagtacatggagttcctgaagtctgtgcccaccttccagagcctgcctgaggagatcctgagcaagctggctgatgtgctggaggagacccactatgaaaatggagagtacatcatccggcagggcgcccggggggacaccttcttcatcatcagcaaaggaacagtgaatgtgacccgggaggacagccccagcgaggaccccgtcttcctgcggaccctgggcaagggggactggtttggagagaaggccctgcagggagaagatgtgaggacagccaacgtgattgctgctgaggccgtgacctgcctggtgattgaccgggacagcttcaagcacctgattggaggcctggatgatgtgagcaacaaggcctatgaagatgctgaggccaaggccaagtatgaagctgaggccgccttctttgccaacctgaagctgagtgacttcaacatcatcgacaccctgggcgtgggcggcttcggccgggtggagctggtgcagctgaagtctgaggagagcaagacctttgccatgaagatcctgaagaagaggcacatcgtggacacccggcagcaggagcacatccgctctgagaagcagatcatgcagggcgcccacagcgacttcatcgtgcggctgtaccgcaccttcaaggacagcaagtacctgtacatgctgatggaggcctgcctgggcggggagctgtggaccatcctgcgggaccggggcagctttgaggacagcaccacccgcttctacacagcctgtgtggtggaggcctttgcctacctgcacagcaagggcatcatctacagagacctgaagccagagaacctgatcctggaccaccggggctacgccaagctggtggactttggatttgccaagaagattggatttgggaagaagacctggaccttctgtggcaccccagaatatgtggcccctgagatcatcctgaacaagggccatgacatctctgctgactactggagcctgggcatcctgatgtatgagctgctgaccggcagcccccccttcagcggccctgaccccatgaagacctacaacatcatcctgcggggcatcgacatgattgagttccccaagaagatcgccaagaatgctgccaacctgatcaagaagctgtgccgggacaaccccagcgagcggctgggcaacctgaagaatggagtgaaggacatccagaagcacaagtggtttgagggcttcaactgggagggcctgaggaagggcaccctgaccccacccatcatccccagcgtggccagccccacagacaccagcaactttgacagcttccctgaggacaatgatgagcccccaccagatgacaacagcggctgggacatcgacttctag

SEQ ID NO: 39141 - DNA, 1980 bp, Artificial Sequence
  derived and/or modified sequence
atgctgaaggaggagcggatcaaggagctggagaagcggctgagcgaaaaggaagaggaaatacaggagctgaagcgaaaactgcacaaatgccagagcgtcctcccagtaccctcaactcacatagggccccggaccacaagggcccagggaatctctgccgaaccccagacatacagaagtttccacgacctgcggcaggctttccggaagttcaccaaaagcgaaagaagcaaagatctgatcaaggaggccatcctggacaacgatttcatgaaaaacctggagctgtctcaaattcaagaaattgttgactgcatgtatcctgttgagtacggtaaggattcttgtatcataaaagagggcgatgttggttcgcttgtgtacgtaatggaagacggcaaagtggaagtaaccaaggagggtgtgaaactctgcacaatgggccctggtaaggtgtttggagaacttgctattctgtacaattgcactcgcaccgccacagtaaaaactttggtgaatgtgaaactgtgggccatcgatcgtcagtgttttcaaacaatcatgatgcgcaccgggctgatcaaacacacagaatacatggagttcttgaagagtgtacctaccttccagagcctaccagaagagatcctaagtaagcttgcagatgtgctggaggagactcattatgagaacggcgagtacattatccgccagggtgcaagaggtgacacctttttcattatttccaagggcactgtaaatgtgacccgggaggattctccaagcgaggatcccgtcttcttgaggacgcttggcaagggagactggtttggcgaaaaagccctgcagggggaagatgtcaggactgcgaacgtgatcgccgcagaagctgtgacttgcctggtgattgatcgggatagcttcaagcatttgattggggggctcgatgacgtgagtaataaagcatacgaggatgcagaagctaaggcaaaatacgaagctgaagccgcattttttgctaacctgaaactgtccgattttaatatcatcgataccctaggtgtaggcggattcggacgtgtggagctggtgcagctgaaatctgaagaatcgaagacatttgctatgaaaatactcaaaaaaagacatattgtagacacccggcagcaggaacacatcagatctgagaagcagattatgcagggagcgcatagcgatttcatcgtgaggctgtacaggacgtttaaagactccaaatatctttacatgctcatggaagcatgtctcgggggtgaactgtggacaatcctaagagacagaggctctttcgaggattcgactacccgcttctatacagcgtgcgttgtcgaggctttcgcttatctgcatagcaagggcatcatttatcgagatttgaagcccgagaatttgatcctggatcaccgagggtacgctaaactggtggactttggatttgctaagaaaattggctttggcaagaaaacatggactttctgtgggaccccagaatacgtagccccggagatcatcctgaacaaggggcacgacatatcagccgactattggagcctgggcattctgatgtacgaactgctgacaggctcaccaccgttttctgggcctgaccctatgaagacatacaacatcatcctgaggggtattgacatgatcgagttcccaaagaaaatagccaagaacgccgctaatttgattaagaaactgtgtcgggacaatccctccgaaagactcgggaatctgaagaatggtgtgaaggatatccagaaacacaaatggtttgagggtttcaattgggaaggtctcaggaagggaacattaacaccacccattatcccctccgtggcgagtcctacggacacttccaattttgacagttttccagaggataatgacgagccaccccctgacgacaactctggctgggacatcgacttttag

SEQ ID NO: 39142 - DNA, 2016 bp, Artificial Sequence
  derived and/or modified sequence
atgagcgagctggaggaggacttcgccaagatcctgatgctgaaggaggaaagaattaaggagctggaaaaacgactaagcgagaaagaggaagaaatccaagagctcaaaagaaaactccacaaatgccagagcgtcctgccagttccctctacgcatatcggaccgagaacgaccagagctcaggggatttctgccgagccacagacatacaggagctttcatgacctgcgacaggcttttcggaagtttactaaaagcgaaaggtcgaaggacctaatcaaggaggctatactggacaacgactttatgaagaaccttgaattaagtcagatccaggaaattgtcgattgcatgtatcccgtggagtacgggaaagactcctgcattattaaggagggagacgtcgggagcctcgtttacgtgatggaggatgggaaagttgaagtcactaaggagggcgtcaaactatgtaccatgggccctggaaaggtattcggggagctggccatattgtataactgcacgagaacagcgacagtaaagacgctggtcaacgtcaaactgtgggccatcgatcggcagtgttttcaaactatcatgatgcgcactggcctcatcaaacacactgaatatatggagtttctgaagagtgtgccgacgtttcagagcctgcctgaagaaatcctctccaagctcgctgacgtactcgaggagacacactacgagaacggtgagtatattattcgacagggagctcggggggacactttcttcatcattagcaaaggaaccgtgaatgtcactagagaggactcccccagtgaggatcctgtgttcctccgaaccctgggcaaaggagattggtttggagagaaagcgctgcaaggcgaagatgtcagaaccgccaatgtgatcgctgcggaggccgttacttgtctggtgatagaccgcgactcattcaaacacctgatcggcggcctggatgacgtgtccaataaggcctatgaggacgcagaagccaaagcaaaatatgaagctgaagctgctttcttcgcaaatctaaaactaagtgattttaacattatcgatacgttgggcgtcgggggctttgggagagtggagctggtgcaacttaagtctgaagagagtaagacctttgcaatgaagatcctcaaaaaacgacacatagtggataccagacagcaggagcacatcaggagcgaaaagcaaataatgcagggagcccacagcgatttcatcgtgcgtctgtaccggactttcaaagatagtaaatacttgtatatgctcatggaagcgtgtctcggcggcgagctgtggaccatcctgcgggaccgcggcagtttcgaggactccacaacccgattttacacagcctgcgtggtggaggcttttgcctacttacacagtaagggcatcatatatagagatctgaagccagaaaacctaattttagaccaccgcggctacgccaaactggtcgactttggtttcgccaaaaaaattggctttggaaaaaagacttggaccttctgcgggacgccagaatacgtggcgcccgagatcatcctgaacaagggtcatgacatttcagccgattactggtcattaggtatactgatgtatgagctgctgactggatctcctccattctccggccccgaccctatgaaaacatacaatattatactgcgaggcattgatatgatagaattcccgaaaaagatcgcaaaaaacgccgctaacctgattaagaagctgtgccgtgataatccatctgaaagactgggaaacttgaaaaatggcgtcaaagatattcagaaacataaatggttcgagggcttcaactgggagggtctgcgtaaaggaacattgacgccccccatcatcccctctgtggcttcaccaaccgacactagcaactttgactctttcccggaggataatgacgaacctccccccgatgataacagcggatgggatatcgatttttag

SEQ ID NO: 39143 - DNA, 1980 bp, Artificial Sequence
  derived and/or modified sequence
atgctgaaggaggaacgaataaaagagctagagaaacgactgtccgagaaagaagaagaaatccaggaactcaagagaaagcttcataagtgtcagtcagtgctgcccgtccccagtacacacataggacccaggacaactagagcccagggcatatccgcagaaccacaaacgtaccgctctttccatgacctccggcaggcctttcggaagtttaccaagagcgagcgcagtaaggaccttatcaaagaggcaatcctggacaatgacttcatgaaaaatcttgaactgtcccagattcaggagatcgtcgattgtatgtatcctgttgaatacgggaaggactcttgcattattaaagaaggagatgtcggttctttagtatacgtgatggaagacggtaaggtggaggtcacaaaagaaggcgtgaagctgtgtactatgggacctggtaaggtgttcggagagctcgccatcttgtataattgcactcggacagccaccgtaaaaaccctggtgaacgttaagctctgggcaatcgaccggcagtgtttccaaacgataatgatgcgaactggtttaataaagcataccgagtacatggaattcttaaaatccgtgcctacgtttcagagtctccctgaggagatcttgtccaaactggcggacgtgctggaggagacgcattacgaaaacggggagtacataattaggcaaggggctaggggcgatactttttttattatttctaaaggaaccgtcaacgtgactcgggaagattcaccaagtgaggaccccgtcttcctgcgtactctgggaaagggtgattggtttggagagaaggctttacagggcgaggatgtgcgaacagccaacgtgattgctgccgaggcagtaacctgtcttgtgatagatcgggatagcttcaaacatctgattgggggtctagacgatgtttctaataaagcatatgaggatgccgaagctaaggccaaatatgaagcagaggcagccttctttgctaatcttaaattatccgatttcaatatcattgacacgctcggtgtggggggatttggtagggtggagctggtgcaactcaaatctgaagagagcaagacttttgccatgaaaatcctcaaaaagcgtcatattgtcgacacccggcagcaggaacacatccggagcgagaagcaaattatgcagggcgctcattccgacttcatcgtgcgtctgtatcgaacctttaaggattccaagtacctgtatatgctcatggaggcatgtctcggaggtgagttgtggactatcctaagagatagaggttcttttgaagacagtacaactcggttttacacagcatgtgttgtagaagccttcgcctatcttcacagtaagggtattatctatcgcgatctgaagcccgaaaatctgatccttgatcaccgagggtacgcgaagctggtcgactttgggttcgctaagaaaatcggttttgggaagaaaacatggacattctgcggaacgccagaatacgttgccccagagatcatccttaataagggacatgatatctccgccgattattggagcttgggtattcttatgtatgagctactgactggctctccgccattcagcgggccagatcctatgaagacctacaacattatattgcgcggtattgatatgatcgagttccctaaaaaaattgctaaaaatgcagcaaacctgatcaagaagctttgtagagacaacccctcagaacggttgggcaatctaaagaatggtgttaaagacatccagaagcacaaatggttcgagggattcaattgggaagggctgcggaagggcactcttacccctccaatcatcccctccgtggccagccctactgatacctccaatttcgatagcttcccagaggataacgacgaaccaccccctgatgacaactcaggctgggatattgacttttag

SEQ ID NO: 39144 - DNA, 2016 bp, Artificial Sequence
  derived and/or modified sequence
atgtcagagttggaggaagattttgccaaaatcttaatgcttaaagaagagagaataaaagaactggagaaacgcctttccgagaaggaagaagaaatccaggaactgaagcggaagttacacaagtgtcaatctgttctacccgtcccctctacccacattgggcctcgaactacacgggctcagggcatttcagcagagcctcagacctatcgatcatttcacgatctacgtcaggcattcaggaagtttacaaagagcgagagatctaaagatctgattaaagaagccatcctcgacaacgacttcatgaagaatctagagctgtctcagattcaggaaattgtggactgcatgtacccagtggagtacgggaaggattcatgcattatcaaagaaggagacgtaggctcgcttgtgtatgttatggaagacggcaaggtggaggtgaccaaagaaggcgtgaagttgtgcacaatgggacctggcaaggtgtttggggaattggccatcctctataactgtaccaggaccgcgacagtaaaaacactggtgaacgtgaaactgtgggctattgaccggcagtgctttcagaccattatgatgcgcaccggcctgattaaacacactgagtacatggaatttctgaaatccgtacctaccttccagtccttgccagaggaaattttaagtaaactagctgacgtcctagaggagacccactatgagaacggggaatacattattcggcagggcgctcgtggcgacaccttctttatcatttctaaaggaactgtgaacgtgacgcgtgaagactccccaagtgaggatcctgtgtttctcagaacactggggaaaggggattggttcggcgagaaggccctccagggcgaggacgtcaggaccgccaatgtaatcgctgcagaggcggtcacttgtctggttatcgaccgggactcttttaaacacctgataggaggacttgacgatgtgtcaaataaggcttacgaagacgctgaagctaaggcaaaatatgaggcagaggcagcgttctttgctaatctgaagctgagtgacttcaatattatcgacacgctcggcgttgggggttttggtagagtggagctggtgcagctgaagtctgaagaaagcaagacttttgctatgaagatcctgaagaaaaggcacatcgtggatacgaggcagcaagagcatatcaggagcgaaaagcagattatgcagggggctcactcagactttatcgtccggctctataggacctttaaagactcaaaatacctgtatatgctcatggaagcttgcctggggggagagttgtggaccatcttgcgggacaggggatcctttgaagatagcaccacccggttctacaccgcctgcgtggtggaggcatttgcttatctccactcaaaaggcattatatatagagacttgaaacctgaaaacctgatcttggaccatagagggtacgccaaattggtggacttcggcttcgcaaaaaagattggtttcggaaaaaagacatggaccttctgcggaacacccgagtacgtggcaccagaaatcatcttgaacaagggacacgatattagcgctgactattggtctctaggcattcttatgtacgagctccttactggctctcctccgttttctggtcctgatccaatgaaaacatacaacatcatcctgcgcggaatcgatatgatcgagttcccgaagaagatcgccaagaatgccgcaaacctcatcaaaaagctttgtagagacaacccttccgagcggcttggtaaccttaaaaatggcgtgaaagacattcagaaacacaagtggttcgaagggtttaattgggagggactaagaaaaggcactctgacccccccaattattccgagcgtcgcgtctcctaccgacacatccaatttcgactcctttccagaggataacgacgagccccctcccgatgataactccgggtgggacatcgatttttag

SEQ ID NO: 39145 - DNA, 5873 bp, Artificial Sequence
  derived and/or modified sequence
ttcataggaggcacacataaataatgttggtttaattaattaaattaacaaaaggctgcactacttggtaaagcaggattttacacattaatttgagaagatctggaggcaagtttttattctgacccactatgaaaatggagaatatattatcaggcaaggtgcaagaggggacaccttctttatcatcagcaaaggaacggtaaatgtcactcgtgaagactcaccgagtgaagacccagtctttcttagaactttaggaaaaggagactggtttggagagaaagccttgcagggggaagatgtgagaacagcaaacgtaattgctgcagaagctgtaacctgccttgtgattgacagagactcttttaaacatttgattggagggctggatgatgtttctaataaagcatatgaagatgcagaagctaaagcaaaatatgaagctgaagcggctttcttcgccaacctgaagctgtctgatttcaacatcattgatacccttggagttggaggtttcggacgagtagaactggtccagttgaaaagtgaagaatccaaaacgtttgcaatgaagattctcaagaaacgtcacattgtggacacaagacagcaggagcacatccgctcagagaagcagatcatgcagggggctcattccgatttcatagtgagactgtacagaacatttaaggacagcaaatatttgtatatgttgatggaagcttgtctaggtggagagctctggaccattctcagggatagaggttcgtttgaagattctacaaccagattttacacagcatgtgtggtagaagcttttgcctatctgcattccaaaggaatcatttacagggacctcaagccagaaaatctcatcctagatcaccgaggttatgccaaactggttgattttggctttgcaaagaaaataggatttggaaagaaaacatggactttttgtgggactccagagtatgtagccccagagatcatcctgaacaaaggccatgacatttcagccgactactggtcactgggaatcctaatgtatgaactcctgactggcagcccacctttctcaggcccagatcctatgaaaacctataacatcatattgagggggattgacatgatagaatttccaaagaagattgccaaaaatgctgctaatttaattaaaaaactatgcagggacaatccatcagaaagattagggaatttgaaaaatggagtaaaagacattcaaaagcacaaatggtttgagggctttaactgggaaggcttaagaaaaggtaccttgacacctcctataataccaagtgttgcatcacccacagacacaagtaattttgacagtttccctgaggacaacgatgaaccaccacctgatgacaactcaggatgggatatagacttctaatgtatttctcttacctgcttctgccttgctgaagacagctttttctgagacacagctgccagcaaacctgagggaaagagagaagattagtgctcggggtcaccatgatgcctttgatcgatgctgctccagtaactacagtggcattaggacttaccgcttagatgacaatagtgctctttacatgttttctgtttgaacctaaaatagcagttgacatggtggtcctgaagcaaagcctttcaccagtaaaagatgttttctattgttgcaatgaccttgctttgctctgattataatttgaaagactgtaggaaacacttcaatgtagtataagagtctgtaccttgctggaatattcaagaagatgaaagaataatatattgggtacaatagattactatggtacagaaactgggctattccctttcttcaagtgaaggctgtgggatctattactgcaggccggtgtatataccatacaaaagaggaccacacatctgttggtcacagagttcatgtcacaccagtgctagaagtttcatgattttatttcccagcagtgctgatgacaagactgaatgttaccttttctttctgacagattttaaaaattgatatgataaaagcacaactgctatagattctgctgagacctctcatagtaggtatatatgagttttcacagaagactgaaaaataatgcatgatatttgtttgttttttttgataaattggcatgacagagtggggaaaaaaagcaattcacaaaaccatttcatattttttaaaatattgtgcttaaagatggtcctggaagtaaatgactagcagccaattggttttacttaacataccctcaaactgaggcttaaagtattcccttttataaaaataaatgcttggggtagggtggagtggggagggattaaaacccatccaaaaaataaataaaaactatataggtgctatgtatatctttcatctgtaaatgtcagtgtctgaacagacaacacaaattcaaatcattatacgtgtagccagaaactcaagcattttcactaaagttattaaaccaaactcctgtccaatttcacttatacaacatagtcagtctagagttgagagacaaaggtaattataaacctatttgaactagcttcttgtcttaggcctgaaccaaaaaacaacaaacaaacaaaaaacaagaatgaaaaacagaaataaaagaagtagaaaagacaaagaaagaaagcccaaagtcaaagttgttaatatttacaggtttaccagatctggaacattacttatttgaggtcagagaacaaaacaagaacctggccaggtgttgattaccttttagtgaataagctgagtccatatacttgtctaactaagaaagcagtacagaggaaaacaggaacctgatttttttaaaataaattttaaataaaatagaattactacaattctgcaatttcatactacctaaaaaagactagatttgaaaatgtcaagctgatttactttattcacatggagaaaagaatccacaaattaaactgagtccttcactggcatgccagttgactattattagctgtcataagtaactcagccatttggaagcatttcctggacaaaattacattatacctgtgaagaaaaatatagaagctttcaagctgtcattctgttttggccctgtgtgaatttggtatattaaattgacgcttgctttttttttcagtagagttttctttttaatcaatcaaacgcctacatttctggaagaaaaagtccaattagatcattacaccttaactaagaaggcaaatcttataaattttgcttgaattgttcttactcaaaactaccttagaatatggtatcttatgaaaatataatattcttaaaattttggaggataaaatgaaaagggtataaacttcaattagaactttaatcctaaaatattgttattcttgtatttttggagttttccgtcccttacaatttctccaaattggtctattccccaagatatccactgttttctacagattttagaatataaaattaaacatatcaacctaaaatctagctatgaatgttatttcaagagttttatatttttaattggctttttaaaaatatgtaattccaatattatagtgaatgttcagtaacttttgttgaaagataatgtggtttaggcttgctaaagaaaggcttgctagaatactaaatttaccttgttatttggaaagagaatctgctcctataacgttttaaaaatccccaaagtcccagagattagcacttgctatggattttggaactatggttcaagtctaagacaaccaatatgaataagttcaatggagaaggaagaagtagcattcagcacaagaaactgtagattgtttctcccacttgttactgcatctttgttcatttcacccatagcattgcatttgatgtctgaagtaattaccacaaaataaaggtaaactacatcttccaagatgtaccaacagaaaacattcgtctaattttgtcaacattgaatttttaggatttaaatcttgtcttaatgaagactctagggctaaaattcatggtcagttccataaaatgcatctcactttatttctgaatttttcacaacccctctattttcttacattaaagaacatctggataagttagaatagtgccaacttgtttgatttgttatatgattttcttgttaatgtgttgagtatgggaaataagggctttctgtgtgtcttgactcacaggaaaactgaaactgccaagggaagcaacattaaaacaactgggatagattgaatacatttgaaaaaataatttctggaaaaacgctatacatgctttttatgtttatatcttctttcttattaagacatgaatcagatccatgtggcattcaaaacaaatttattttggttatattctttacaagtcataatttttacctaaaattgtggaatatgcatgtgaattacacatgtgtagtaataaactcaactattgaatttttcctgtttcatttctaaatgactgaactgatggtaaacaaatttaatgaagtcagctaccatgttgaaaataaggatattagaactgatttcatacaatagaggtgatctgtgcattatccataacaacgttttctttcactataggaccacagacaaatatttatgtaaataggtatttttgtgtgatattttgtggtacatataactttttttagtgtttcacagcattattatttcattttatttgtattgaataatgtttttaggtccaagtagacttgaattaatgtcataattgtcagtattattgaaaattatgtcaactgtactgttattcatctgtcccatagtttagaacatgacctggctatctggcattgttgcaagtgccttaaattcatggcatcctattaaaaaaacaaatttggtgttatgctgcatgacaaagacaaacacacctcaaaatgttgtcctttcttagcttgctgcgttttacagttctttctgctaacaatttataagcctttattatataatattgatgaattacagaaatgatgaagttgttctcttatttctgttaaatgtaccagagctgtgtatctgttaatgagatacagcgtcatttctgtgaaatgtataaatgtatgtgcaggtcaaattaatatatgacattctatcagtctgtatacaggtattcctgttttgctaagctgtgcagattctgtaaaaataaattagtgcagtcaagttctaacatatctcattttatagactccattgacaatggtccaaccgaaaagaaaaattggaaatgactgctaaccagacctcgttatgaaaccaatgatgaaaaagtcacttggtgcacctctcaacaaaacaggatgctttttccgagttcttgtatatgcaaatcatttacgaggcaagttttcaacagacctagaaagcaaaacattgaaagtgtgttgttagccctcctctctgcccctgaatcaacagacagagctctgggaccttggcaatgactcagaggttggggctttctgagtaaagggacatttctttaagcatcatctatcaaatttatttcaatgtatgatgtttttacaactggtcagttcttttgtattcttacagctatggttatttgattgtcctcttacaatttgttctacatgaaagagttctttgttagtcagaatgcaacaaactgtcatcaaatggtcattgaccacttgcactcttttgatgtagattaaaaactttttcataaatttacctgctttgatttgctctgtatttttcctgcagctgtaattgctgagtgcctgttgtatactttatagagttgaaataaaaaaataattacttttgaa

SEQ ID NO: 39146 - DNA, 6487 bp, Artificial Sequence
  derived and/or modified sequence
gcggaggggctcagtgaaaaaatgagcgagctagaggaagactttgccaagattctcatgctcaaggaggagaggatcaaagagctggagaagcggctgtcagagaaggaggaagaaattcaggagctgaagaggaaactccacaaatgccagtcggtgctcccagtgccctcgacccacatcggcccccggaccacccgggcgcagggcatctcggccgagccgcagacgtacaggtccttccacgacctccgacaggcattccggaagttcaccaagtccgaaaggtccaaggatcttataaaggaagctatccttgacaatgactttatgaagaacttggagctgtcgcagatccaggagattgtggattgtatgtacccggtggagtatggcaaggacagttgcatcatcaaagaaggagacgtggggtcactggtgtatgtcatggaagatggtaaggttgaagttacaaaagaaggtgtgaagttgtgtaccatgggtccaggaaaagtgtttggggaattggctattctttacaactgtacccggacagcgaccgtcaagactcttgtaaatgtaaaactctgggccattgatcgacaatgttttcaaacaataatgatgaggacaggactcatcaagcataccgagtatatggaatttttaaaaagcgttccaacattccagagccttcctgaagagatcctcagcaagcttgctgatgtccttgaagagacccactatgaaaatggagaatatattatcaggcaaggtgcaagaggggacaccttctttatcatcagcaaaggaacggtaaatgtcactcgtgaagactcaccgagtgaagacccagtctttcttagaactttaggaaaaggagactggtttggagagaaagccttgcagggggaagatgtgagaacagcaaacgtaattgctgcagaagctgtaacctgccttgtgattgacagagactcttttaaacatttgattggagggctggatgatgtttctaataaagcatatgaagatgcagaagctaaagcaaaatatgaagctgaagcggctttcttcgccaacctgaagctgtctgatttcaacatcattgatacccttggagttggaggtttcggacgagtagaactggtccagttgaaaagtgaagaatccaaaacgtttgcaatgaagattctcaagaaacgtcacattgtggacacaagacagcaggagcacatccgctcagagaagcagatcatgcagggggctcattccgatttcatagtgagactgtacagaacatttaaggacagcaaatatttgtatatgttgatggaagcttgtctaggtggagagctctggaccattctcagggatagaggttcgtttgaagattctacaaccagattttacacagcatgtgtggtagaagcttttgcctatctgcattccaaaggaatcatttacagggacctcaagccagaaaatctcatcctagatcaccgaggttatgccaaactggttgattttggctttgcaaagaaaataggatttggaaagaaaacatggactttttgtgggactccagagtatgtagccccagagatcatcctgaacaaaggccatgacatttcagccgactactggtcactgggaatcctaatgtatgaactcctgactggcagcccacctttctcaggcccagatcctatgaaaacctataacatcatattgagggggattgacatgatagaatttccaaagaagattgccaaaaatgctgctaatttaattaaaaaactatgcagggacaatccatcagaaagattagggaatttgaaaaatggagtaaaagacattcaaaagcacaaatggtttgagggctttaactgggaaggcttaagaaaaggtaccttgacacctcctataataccaagtgttgcatcacccacagacacaagtaattttgacagtttccctgaggacaacgatgaaccaccacctgatgacaactcaggatgggatatagacttctaatgtatttctcttacctgcttctgccttgctgaagacagctttttctgagacacagctgccagcaaacctgagggaaagagagaagattagtgctcggggtcaccatgatgcctttgatcgatgctgctccagtaactacagtggcattaggacttaccgcttagatgacaatagtgctctttacatgttttctgtttgaacctaaaatagcagttgacatggtggtcctgaagcaaagcctttcaccagtaaaagatgttttctattgttgcaatgaccttgctttgctctgattataatttgaaagactgtaggaaacacttcaatgtagtataagagtctgtaccttgctggaatattcaagaagatgaaagaataatatattgggtacaatagattactatggtacagaaactgggctattccctttcttcaagtgaaggctgtgggatctattactgcaggccggtgtatataccatacaaaagaggaccacacatctgttggtcacagagttcatgtcacaccagtgctagaagtttcatgattttatttcccagcagtgctgatgacaagactgaatgttaccttttctttctgacagattttaaaaattgatatgataaaagcacaactgctatagattctgctgagacctctcatagtaggtatatatgagttttcacagaagactgaaaaataatgcatgatatttgtttgttttttttgataaattggcatgacagagtggggaaaaaaagcaattcacaaaaccatttcatattttttaaaatattgtgcttaaagatggtcctggaagtaaatgactagcagccaattggttttacttaacataccctcaaactgaggcttaaagtattcccttttataaaaataaatgcttggggtagggtggagtggggagggattaaaacccatccaaaaaataaataaaaactatataggtgctatgtatatctttcatctgtaaatgtcagtgtctgaacagacaacacaaattcaaatcattatacgtgtagccagaaactcaagcattttcactaaagttattaaaccaaactcctgtccaatttcacttatacaacatagtcagtctagagttgagagacaaaggtaattataaacctatttgaactagcttcttgtcttaggcctgaaccaaaaaacaacaaacaaacaaaaaacaagaatgaaaaacagaaataaaagaagtagaaaagacaaagaaagaaagcccaaagtcaaagttgttaatatttacaggtttaccagatctggaacattacttatttgaggtcagagaacaaaacaagaacctggccaggtgttgattaccttttagtgaataagctgagtccatatacttgtctaactaagaaagcagtacagaggaaaacaggaacctgatttttttaaaataaattttaaataaaatagaattactacaattctgcaatttcatactacctaaaaaagactagatttgaaaatgtcaagctgatttactttattcacatggagaaaagaatccacaaattaaactgagtccttcactggcatgccagttgactattattagctgtcataagtaactcagccatttggaagcatttcctggacaaaattacattatacctgtgaagaaaaatatagaagctttcaagctgtcattctgttttggccctgtgtgaatttggtatattaaattgacgcttgctttttttttcagtagagttttctttttaatcaatcaaacgcctacatttctggaagaaaaagtccaattagatcattacaccttaactaagaaggcaaatcttataaattttgcttgaattgttcttactcaaaactaccttagaatatggtatcttatgaaaatataatattcttaaaattttggaggataaaatgaaaagggtataaacttcaattagaactttaatcctaaaatattgttattcttgtatttttggagttttccgtcccttacaatttctccaaattggtctattccccaagatatccactgttttctacagattttagaatataaaattaaacatatcaacctaaaatctagctatgaatgttatttcaagagttttatatttttaattggctttttaaaaatatgtaattccaatattatagtgaatgttcagtaacttttgttgaaagataatgtggtttaggcttgctaaagaaaggcttgctagaatactaaatttaccttgttatttggaaagagaatctgctcctataacgttttaaaaatccccaaagtcccagagattagcacttgctatggattttggaactatggttcaagtctaagacaaccaatatgaataagttcaatggagaaggaagaagtagcattcagcacaagaaactgtagattgtttctcccacttgttactgcatctttgttcatttcacccatagcattgcatttgatgtctgaagtaattaccacaaaataaaggtaaactacatcttccaagatgtaccaacagaaaacattcgtctaattttgtcaacattgaatttttaggatttaaatcttgtcttaatgaagactctagggctaaaattcatggtcagttccataaaatgcatctcactttatttctgaatttttcacaacccctctattttcttacattaaagaacatctggataagttagaatagtgccaacttgtttgatttgttatatgattttcttgttaatgtgttgagtatgggaaataagggctttctgtgtgtcttgactcacaggaaaactgaaactgccaagggaagcaacattaaaacaactgggatagattgaatacatttgaaaaaataatttctggaaaaacgctatacatgctttttatgtttatatcttctttcttattaagacatgaatcagatccatgtggcattcaaaacaaatttattttggttatattctttacaagtcataatttttacctaaaattgtggaatatgcatgtgaattacacatgtgtagtaataaactcaactattgaatttttcctgtttcatttctaaatgactgaactgatggtaaacaaatttaatgaagtcagctaccatgttgaaaataaggatattagaactgatttcatacaatagaggtgatctgtgcattatccataacaacgttttctttcactataggaccacagacaaatatttatgtaaataggtatttttgtgtgatattttgtggtacatataactttttttagtgtttcacagcattattatttcattttatttgtattgaataatgtttttaggtccaagtagacttgaattaatgtcataattgtcagtattattgaaaattatgtcaactgtactgttattcatctgtcccatagtttagaacatgacctggctatctggcattgttgcaagtgccttaaattcatggcatcctattaaaaaaacaaatttggtgttatgctgcatgacaaagacaaacacacctcaaaatgttgtcctttcttagcttgctgcgttttacagttctttctgctaacaatttataagcctttattatataatattgatgaattacagaaatgatgaagttgttctcttatttctgttaaatgtaccagagctgtgtatctgttaatgagatacagcgtcatttctgtgaaatgtataaatgtatgtgcaggtcaaattaatatatgacattctatcagtctgtatacaggtattcctgttttgctaagctgtgcagattctgtaaaaataaattagtgcagtcaagttctaacatatctcattttatagactccattgacaatggtccaaccgaaaagaaaaattggaaatgactgctaaccagacctcgttatgaaaccaatgatgaaaaagtcacttggtgcacctctcaacaaaacaggatgctttttccgagttcttgtatatgcaaatcatttacgaggcaagttttcaacagacctagaaagcaaaacattgaaagtgtgttgttagccctcctctctgcccctgaatcaacagacagagctctgggaccttggcaatgactcagaggttggggctttctgagtaaagggacatttctttaagcatcatctatcaaatttatttcaatgtatgatgtttttacaactggtcagttcttttgtattcttacagctatggttatttgattgtcctcttacaatttgttctacatgaaagagttctttgttagtcagaatgcaacaaactgtcatcaaatggtcattgaccacttgcactcttttgatgtagattaaaaactttttcataaatttacctgctttgatttgctctgtatttttcctgcagctgtaattgctgagtgcctgttgtatactttatagagttgaaataaaaaaataattacttttgaa

SEQ ID NO: 39147 - DNA, 3824 bp, Artificial Sequence
  derived and/or modified sequence
attcagcagaagcggatcgaagcaggaggctccccgcgccgcattaggggcgcactccgccgcgctcgagtacttagcgcccattcactcgctcacccgcgctctccgctgccggctgccgtcccagccgccgccgccgccgccgccgccgccgccgcccgagaaaaagtttcgcggaggggctcagtgaaaaaatgagcgagctagaggaagactttgccaagattctcatgctcaaggaggagaggatcaaagagctggagaagcggctgtcagagaaggaggaagaaattcaggagctgaagaggaaactccacaaatgccagtcggtgctcccagtgccctcgacccacatcggcccccggaccacccgggcgcagggcatctcggccgagccgcagacgtacaggtccttccacgacctccgacaggcattccggaagttcaccaagtccgaaaggtccaaggatcttataaaggaagctatccttgacaatgactttatgaagaacttggagctgtcgcagatccaggagattgtggattgtatgtacccggtggagtatggcaaggacagttgcatcatcaaagaaggagacgtggggtcactggtgtatgtcatggaagatggtaaggttgaagttacaaaagaaggtgtgaagttgtgtaccatgggtccaggaaaagtgtttggggaattggctattctttacaactgtacccggacagcgaccgtcaagactcttgtaaatgtaaaactctgggccattgatcgacaatgttttcaaacaataatgatgaggacaggactcatcaagcataccgagtatatggaatttttaaaaagcgttccaacattccagagccttcctgaagagatcctcagcaagcttgctgatgtccttgaagagacccactatgaaaatggagaatatattatcaggcaaggtgcaagaggggacaccttctttatcatcagcaaaggaacggtaaatgtcactcgtgaagactcaccgagtgaagacccagtctttcttagaactttaggaaaaggagactggtttggagagaaagccttgcagggggaagatgtgagaacagcaaacgtaattgctgcagaagctgtaacctgccttgtgattgacagagactcttttaaacatttgattggagggctggatgatgtttctaataaagcatatgaagatgcagaagctaaagcaaaatatgaagctgaagcggctttcttcgccaacctgaagctgtctgatttcaacatcattgatacccttggagttggaggtttcggacgagtagaactggtccagttgaaaagtgaagaatccaaaacgtttgcaatgaagattctcaagaaacgtcacattgtggacacaagacagcaggagcacatccgctcagagaagcagatcatgcagggggctcattccgatttcatagtgagactgtacagaacatttaaggacagcaaatatttgtatatgttgatggaagcttgtctaggtggagagctctggaccattctcagggatagaggttcgtttgaagattctacaaccagattttacacagcatgtgtggtagaagcttttgcctatctgcattccaaaggaatcatttacagggacctcaagccagaaaatctcatcctagatcaccgaggttatgccaaactggttgattttggctttgcaaagaaaataggatttggaaagaaaacatggactttttgtgggactccagagtatgtagccccagagatcatcctgaacaaaggccatgacatttcagccgactactggtcactgggaatcctaatgtatgaactcctgactggcagcccacctttctcaggcccagatcctatgaaaacctataacatcatattgagggggattgacatgatagaatttccaaagaagattgccaaaaatgctgctaatttaattaaaaaactatgcagggacaatccatcagaaagattagggaatttgaaaaatggagtaaaagacattcaaaagcacaaatggtttgagggctttaactgggaaggcttaagaaaaggtaccttgacacctcctataataccaagtgttgcatcacccacagacacaagtaattttgacagtttccctgaggacaacgatgaaccaccacctgatgacaactcaggatgggatatagacttctaatgtatttctcttacctgcttctgccttgctgaagacagctttttctgagacacagctgccagcaaacctgagggaaagagagaagattagtgctcggggtcaccatgatgcctttgatcgatgctgctccagtaactacagtggcattaggacttaccgcttagatgacaatagtgctctttacatgttttctgtttgaacctaaaatagcagttgacatggtggtcctgaagcaaagcctttcaccagtaaaagatgttttctattgttgcaatgaccttgctttgctctgattataatttgaaagactgtaggaaacacttcaatgtagtataagagtctgtaccttgctggaatattcaagaagatgaaagaataatatattgggtacaatagattactatggtacagaaactgggctattccctttcttcaagtgaaggctgtgggatctattactgcaggccggtgtatataccatacaaaagaggaccacacatctgttggtcacagagttcatgtcacaccagtgctagaagtttcatgattttatttcccagcagtgctgatgacaagactgaatgttaccttttctttctgacagattttaaaaattgatatgataaaagcacaactgctatagattctgctgagacctctcatagtaggtatatatgagttttcacagaagactgaaaaataatgcatgatatttgtttgttttttttgataaattggcatgacagagtggggaaaaaaagcaattcacaaaaccatttcatattttttaaaatattgtgcttaaagatggtcctggaagtaaatgactagcagccaattggttttacttaacataccctcaaactgaggcttaaagtattcccttttataaaaataaatgcttggggtagggtggagtggggagggattaaaacccatccaaaaaataaataaaaactatataggtgctatgtatatctttcatctgtaaatgtcagtgtctgaacagacaacacaaattcaaatcattatacgtgtagccagaaactcaagcattttcactaaagttattaaaccaaactcctgtccaatttcacttatacaacatagtcagtctagagttgagagacaaaggtaattataaacctatttgaactagcttcttgtcttaggcctgaaccaaaaaacaacaaacaaacaaaaaacaagaatgaaaaacagaaataaaagaagtagaaaagacaaagaaagaaagcccaaagtcaaagttgttaatatttacaggtttaccagatctggaacattacttatttgaggtcagagaacaaaacaagaacctggccaggtgttgattaccttttagtgaataagctgagtccatatacttgtctaactaagaaagcagtacagaggaaaacaggaacctgatttttttaaaataaattttaaataaaatagaattactacaattctgcaatttcatactacctaaaaaagactagatttgaaaatgtcaagctgatttactttattcacatggagaaaagaatccacaaattaaactgagtccttcactggcatgccagttgactattattagctgtcataagtaac

SEQ ID NO: 39148 - DNA, 1980 bp, Artificial Sequence
  derived and/or modified sequence
atgctgaaggaggagagaatcaaggagctggagaagagactgagcgagaaggaggaggagatccaggagctgaagagaaagctgcacaagtgccagagcgtgctgcccgtgcccagcacccacatcggccccagaaccaccagagcccagggcatcagcgccgagccccagacctacagaagcttccacgacctgagacaggccttcagaaagttcaccaagagcgagagaagcaaggacctgatcaaggaggccatcctggacaacgacttcatgaagaacctggagctgagccagatccaggagatcgtggactgcatgtaccccgtggagtacggcaaggacagctgcatcatcaaggagggcgacgtgggcagcctggtgtacgtgatggaggacggcaaggtggaggtgaccaaggagggcgtgaagctgtgcaccatgggccccggcaaggtgttcggcgagctggccatcctgtacaactgcaccagaaccgccaccgtgaagaccctggtgaacgtgaagctgtgggccatcgacagacagtgcttccagaccatcatgatgagaaccggcctgatcaagcacaccgagtacatggagttcctgaagagcgtgcccaccttccagagcctgcccgaggagatcctgagcaagctggccgacgtgctggaggagacccactacgagaacggcgagtacatcatcagacagggcgccagaggcgacaccttcttcatcatcagcaagggcaccgtgaacgtgaccagagaggacagccccagcgaggaccccgtgttcctgagaaccctgggcaagggcgactggttcggcgagaaggccctgcagggcgaggacgtgagaaccgccaacgtgatcgccgccgaggccgtgacctgcctggtgatcgacagagacagcttcaagcacctgatcggcggcctggacgacgtgagcaacaaggcctacgaggacgccgaggccaaggccaagtacgaggccgaggccgccttcttcgccaacctgaagctgagcgacttcaacatcatcgacaccctgggcgtgggcggcttcggcagagtggagctggtgcagctgaagagcgaggagagcaagaccttcgccatgaagatcctgaagaagagacacatcgtggacaccagacagcaggagcacatcagaagcgagaagcagatcatgcagggcgcccacagcgacttcatcgtgagactgtacagaaccttcaaggacagcaagtacctgtacatgctgatggaggcctgcctgggcggcgagctgtggaccatcctgagagacagaggcagcttcgaggacagcaccaccagattctacaccgcctgcgtggtggaggccttcgcctacctgcacagcaagggcatcatctacagagacctgaagcccgagaacctgatcctggaccacagaggctacgccaagctggtggacttcggcttcgccaagaagatcggcttcggcaagaagacctggaccttctgcggcacccccgagtacgtggcccccgagatcatcctgaacaagggccacgacatcagcgccgactactggagcctgggcatcctgatgtacgagctgctgaccggcagcccccccttcagcggccccgaccccatgaagacctacaacatcatcctgagaggcatcgacatgatcgagttccccaagaagatcgccaagaacgccgccaacctgatcaagaagctgtgcagagacaaccccagcgagagactgggcaacctgaagaacggcgtgaaggacatccagaagcacaagtggttcgagggcttcaactgggagggcctgagaaagggcaccctgaccccccccatcatccccagcgtggccagccccaccgacaccagcaacttcgacagcttccccgaggacaacgacgagcccccccccgacgacaacagcggctgggacatcgacttctag

SEQ ID NO: 39149 - DNA, 2016 bp, Artificial Sequence
  derived and/or modified sequence
atgagcgagctggaggaggacttcgccaagatcctgatgctgaaggaggagagaatcaaggagctggagaagagactgagcgagaaggaggaggagatccaggagctgaagagaaagctgcacaagtgccagagcgtgctgcccgtgcccagcacccacatcggccccagaaccaccagagcccagggcatcagcgccgagccccagacctacagaagcttccacgacctgagacaggccttcagaaagttcaccaagagcgagagaagcaaggacctgatcaaggaggccatcctggacaacgacttcatgaagaacctggagctgagccagatccaggagatcgtggactgcatgtaccccgtggagtacggcaaggacagctgcatcatcaaggagggcgacgtgggcagcctggtgtacgtgatggaggacggcaaggtggaggtgaccaaggagggcgtgaagctgtgcaccatgggccccggcaaggtgttcggcgagctggccatcctgtacaactgcaccagaaccgccaccgtgaagaccctggtgaacgtgaagctgtgggccatcgacagacagtgcttccagaccatcatgatgagaaccggcctgatcaagcacaccgagtacatggagttcctgaagagcgtgcccaccttccagagcctgcccgaggagatcctgagcaagctggccgacgtgctggaggagacccactacgagaacggcgagtacatcatcagacagggcgccagaggcgacaccttcttcatcatcagcaagggcaccgtgaacgtgaccagagaggacagccccagcgaggaccccgtgttcctgagaaccctgggcaagggcgactggttcggcgagaaggccctgcagggcgaggacgtgagaaccgccaacgtgatcgccgccgaggccgtgacctgcctggtgatcgacagagacagcttcaagcacctgatcggcggcctggacgacgtgagcaacaaggcctacgaggacgccgaggccaaggccaagtacgaggccgaggccgccttcttcgccaacctgaagctgagcgacttcaacatcatcgacaccctgggcgtgggcggcttcggcagagtggagctggtgcagctgaagagcgaggagagcaagaccttcgccatgaagatcctgaagaagagacacatcgtggacaccagacagcaggagcacatcagaagcgagaagcagatcatgcagggcgcccacagcgacttcatcgtgagactgtacagaaccttcaaggacagcaagtacctgtacatgctgatggaggcctgcctgggcggcgagctgtggaccatcctgagagacagaggcagcttcgaggacagcaccaccagattctacaccgcctgcgtggtggaggccttcgcctacctgcacagcaagggcatcatctacagagacctgaagcccgagaacctgatcctggaccacagaggctacgccaagctggtggacttcggcttcgccaagaagatcggcttcggcaagaagacctggaccttctgcggcacccccgagtacgtggcccccgagatcatcctgaacaagggccacgacatcagcgccgactactggagcctgggcatcctgatgtacgagctgctgaccggcagcccccccttcagcggccccgaccccatgaagacctacaacatcatcctgagaggcatcgacatgatcgagttccccaagaagatcgccaagaacgccgccaacctgatcaagaagctgtgcagagacaaccccagcgagagactgggcaacctgaagaacggcgtgaaggacatccagaagcacaagtggttcgagggcttcaactgggagggcctgagaaagggcaccctgaccccccccatcatccccagcgtggccagccccaccgacaccagcaacttcgacagcttccccgaggacaacgacgagcccccccccgacgacaacagcggctgggacatcgacttctag

SEQ ID NO: 39150 - protein, 373 aa, Artificial Sequence
  derived and/or modified sequence
GDGQNLFTKDVTVIEGEVATISCQVNKSDDSVIQLLNPNRQTIYFRDFRPLKDSRFQLLNFSSSELKVSLTNVSISDEGRYFCQLYTDPPQESYTTITVLVPPRNLMIDIQKDTAVEGEEIEVNCTAMASKPATTIRWFKGNTELKGKSEVEEWSDMYTVTSQLMLKVHKEDDGVPVICQVEHPAVTGNLQTQRYLEVQYKPQVHIQMTYPLQGLTREGDALELTCEAIGKPQPVMVTWVRVDDEMPQHAVLSGPNLFINNLNKTDNGTYRCEASNIVGKAHSDYMLYVYDSRAGEEGSIRAVDHAVIGGVVAVVVFAMLCLLIILGRYFARHKGTYFTHEAKGADDAADADTAIINAEGGQNNSEEKKEYFI

SEQ ID NO: 39151 - protein, 414 aa, Artificial Sequence
  derived and/or modified sequence
MASVVLPSGSQCAAAAAAAAPPGLRLRLLLLLFSAAALIPTGDGQNLFTKDVTVIEGEVATISCQVNKSDDSVIQLLNPNRQTIYFRDFRPLKDSRFQLLNFSSSELKVSLTNVSISDEGRYFCQLYTDPPQESYTTITVLVPPRNLMIDIQKDTAVEGEEIEVNCTAMASKPATTIRWFKGNTELKGKSEVEEWSDMYTVTSQLMLKVHKEDDGVPVICQVEHPAVTGNLQTQRYLEVQYKPQVHIQMTYPLQGLTREGDALELTCEAIGKPQPVMVTWVRVDDEMPQHAVLSGPNLFINNLNKTDNGTYRCEASNIVGKAHSDYMLYVYDSRAGEEGSIRAVDHAVIGGVVAVVVFAMLCLLIILGRYFARHKGTYFTHEAKGADDAADADTAIINAEGGQNNSEEKKEYFI

SEQ ID NO: 39152 - DNA, 1245 bp, Artificial Sequence
  derived and/or modified sequence
atggccagcgtggtgctgcccagcggcagccagtgcgccgccgccgccgccgccgccgccccccccggcctgagactgagactgctgctgctgctgttcagcgccgccgccctgatccccaccggcgacggccagaacctgttcaccaaggacgtgaccgtgatcgagggcgaggtggccaccatcagctgccaggtgaacaagagcgacgacagcgtgatccagctgctgaaccccaacagacagaccatctacttcagagacttcagacccctgaaggacagcagattccagctgctgaacttcagcagcagcgagctgaaggtgagcctgaccaacgtgagcatcagcgacgagggcagatacttctgccagctgtacaccgaccccccccaggagagctacaccaccatcaccgtgctggtgccccccagaaacctgatgatcgacatccagaaggacaccgccgtggagggcgaggagatcgaggtgaactgcaccgccatggccagcaagcccgccaccaccatcagatggttcaagggcaacaccgagctgaagggcaagagcgaggtggaggagtggagcgacatgtacaccgtgaccagccagctgatgctgaaggtgcacaaggaggacgacggcgtgcccgtgatctgccaggtggagcaccccgccgtgaccggcaacctgcagacccagagatacctggaggtgcagtacaagccccaggtgcacatccagatgacctaccccctgcagggcctgaccagagagggcgacgccctggagctgacctgcgaggccatcggcaagccccagcccgtgatggtgacctgggtgagagtggacgacgagatgccccagcacgccgtgctgagcggccccaacctgttcatcaacaacctgaacaagaccgacaacggcacctacagatgcgaggccagcaacatcgtgggcaaggcccacagcgactacatgctgtacgtgtacgacagcagagccggcgaggagggcagcatcagagccgtggaccacgccgtgatcggcggcgtggtggccgtggtggtgttcgccatgctgtgcctgctgatcatcctgggcagatacttcgccagacacaagggcacctacttcacccacgaggccaagggcgccgacgacgccgccgacgccgacaccgccatcatcaacgccgagggcggccagaacaacagcgaggagaagaaggagtacttcatctag

SEQ ID NO: 39153 - DNA, 1122 bp, Artificial Sequence
  derived and/or modified sequence
ggtgatggacagaatctcttcaccaaggatgtgacagtgatcgagggcgaggtggctactatatcctgtcaagtcaacaagagcgatgacagcgtgatccaattactgaaccccaaccgtcagacaatctattttcgggattttcggcctttgaaggactccaggtttcaactactcaatttttcttcatcagaactgaaagtgagtctcacaaatgtgtccattagcgacgaggggcgctatttttgccagctatataccgatccaccacaggagtcttatacgaccattaccgttctagtgccgcccaggaacctcatgatcgatattcagaaagacacagccgttgagggagaagagatagaggtgaactgtaccgccatggcctctaagccggccacgacaatcaggtggtttaagggtaacaccgaactgaaaggcaagagcgaagttgaagagtggtcagacatgtacacagtgacctctcagcttatgctgaaggtgcataaggaggacgatggtgtaccagtgatttgccaggttgaacacccagcagtcacgggcaacctgcagactcagaggtacctcgaagtgcagtacaaaccccaggtccatatccaaatgacataccctctgcagggattaactcgtgaaggcgatgcactggagctaacatgcgaggccattggaaaaccccagccggtaatggtgacttgggtgagagtagacgacgagatgccacagcatgcagtcctgagtggtcctaatctgttcatcaacaacctcaataaaacggataatggaacgtacagatgcgaggctagcaacatcgttggaaaagcacatagtgattatatgctatatgtctacgatagccgggccggcgaggaaggctcaatccgggccgtagaccacgcggtgataggcggcgtagtggctgtggtagtgtttgccatgctctgcctcctcatcattcttggccggtacttcgcaagacataagggcacatattttacccacgaagctaagggagccgatgatgccgcagatgcagacacagctataatcaatgcggaaggcgggcagaacaacagcgaggaaaagaaagagtattttatttag

SEQ ID NO: 39154 - DNA, 1245 bp, Artificial Sequence
  derived and/or modified sequence
atggcttctgtggttcttccaagcgggagccagtgtgccgccgctgccgctgcggctgcaccccccggccttcgtttaagactgcttctgctgcttttcagtgccgccgctcttattcccactggggacgggcaaaacctgttcacaaaggatgtgaccgtgattgaaggcgaggtagctaccatcagctgccaggttaataagtctgatgattcagtaattcagttgctgaaccccaatcgccaaaccatctattttcgagactttagacccttaaaggattcacgcttccaactgctaaactttagcagcagcgagcttaaggtcagccttactaatgtaagcatttcagatgagggacgatatttttgtcaactgtacacagatccgccacaggagtcctacacgactataaccgtccttgttccccctaggaacttgatgatcgacatccagaaggacacagcagtagaaggggaggagatcgaagtcaactgcacagcaatggcttcgaaacctgcaaccacaatcagatggttcaaaggaaacaccgaactgaaaggcaagagtgaggtcgaagagtggtctgatatgtatactgtaacgagccagctgatgctgaaagtccacaaggaagatgatggcgtgcccgtcatatgccaagtggagcatcccgcagtgaccggcaatctgcagacgcagcggtatttggaggtgcagtacaagcctcaggttcacattcagatgacttatccgctgcagggcctgacccgagagggtgacgctctggagctgacgtgtgaggcaatcggcaagccccaacctgttatggtgacttgggtgcgggtagacgatgaaatgccacagcacgcagttctctcaggtcctaacttgtttatcaataacctcaataagaccgacaacggtacatataggtgtgaagcaagcaatatagtgggcaaggcccacagcgattacatgctctacgtatacgacagtagagccggggaagagggcagtatcagggccgtcgaccacgccgttataggcggagtcgtggccgttgtagtattcgccatgctctgcttactcataatcttgggacgctacttcgccagacataaagggacatactttactcacgaagcaaaaggagctgacgacgcagccgatgccgataccgccatcatcaatgctgagggtggacagaataattcagaggaaaaaaaagaatatttcatttag

SEQ ID NO: 39155 - DNA, 1122 bp, Artificial Sequence
  derived and/or modified sequence
ggggatggccagaacctcttcaccaaggatgtgaccgtcatcgagggggaggtggccaccatcagctgccaggtgaacaagagtgatgattctgtcatccagctgctgaaccccaaccggcagaccatctacttccgggacttccggcccctgaaggacagccgcttccagctgctgaacttcagcagcagcgagctgaaggtgtccctgaccaacgtgtccatcagtgatgagggccgctacttctgccagctgtacacagatcctccccaggagagctacaccaccatcaccgtgctggtgccccccaggaacctgatgattgacatccagaaggacacagctgtggagggggaggagattgaggtgaactgcacagccatggccagcaagccagccaccaccatccgctggttcaagggcaacacagagctgaagggcaagtctgaggtggaggagtggagcgacatgtacacagtgaccagccagctgatgctgaaggtgcacaaggaggatgatggagtgcctgtgatctgccaggtggagcaccctgctgtgactggaaacctgcagacccagcgctacctggaggtgcagtacaagccccaggtgcacatccagatgacctaccccctgcagggcctgacccgggagggagatgccctggagctgacctgtgaggccatcggcaagccccagcctgtgatggtgacctgggtgcgggtggatgatgagatgccccagcacgctgtgctgagcggccccaacctcttcatcaacaacctgaacaagacagacaatggcacctaccgctgtgaggccagcaacatcgtgggcaaggcccacagcgactacatgctgtatgtgtatgacagccgggccggggaggagggcagcatccgggctgtggaccacgccgtcatcggcggcgtggtggccgtggtggtgtttgccatgctgtgcctgctgatcatcctgggccgctactttgcccggcacaagggcacctacttcacccatgaggccaagggagcagatgatgctgctgatgctgacacagccatcatcaatgctgagggcggccagaacaacagcgaggagaagaaggagtacttcatctag

SEQ ID NO: 39156 - DNA, 1245 bp, Artificial Sequence
  derived and/or modified sequence
atggcctctgtggtgctgcccagcggcagccagtgtgccgctgctgctgctgctgctgcccctcctggcctgcggctgcggctgctgctgctgctcttctctgctgctgccctgatccccactggagatggccagaacctcttcaccaaggatgtgacagtgattgaaggagaggtggccaccatcagctgccaggtgaacaagagtgatgacagcgtcatccagctgctgaaccccaaccggcagaccatctacttccgggacttccggcccctgaaggacagccgcttccagctgctgaacttcagcagcagcgagctgaaggtgtccctgaccaacgtgtccatcagtgatgagggccgctacttctgccagctgtacacagaccccccccaggagagctacaccaccatcaccgtgctggtgcccccaagaaacctgatgattgacatccagaaggacacagctgtggagggggaggagattgaggtgaactgcacagccatggccagcaagccagccaccaccatccgctggttcaagggcaacacagagctgaagggcaagtctgaggtggaggagtggagcgacatgtacacagtgaccagccagctgatgctgaaggtgcacaaggaggatgatggagtgcctgtgatctgccaggtggagcaccctgctgtgacaggcaacctgcagacccagcgctacctggaggtgcagtacaagccccaggtgcacatccagatgacctaccccctgcagggcctgacccgggagggagatgccctggagctgacctgtgaggccatcggcaagccccagcctgtgatggtgacctgggtgcgggtggatgatgagatgccccagcacgctgtgctgagcggccccaacctcttcatcaacaacctgaacaagacagacaatggcacctaccgctgtgaggccagcaacatcgtgggcaaggcccacagcgactacatgctgtatgtgtatgacagcagagctggggaggagggcagcatccgggctgtggaccatgctgtgattggaggagtggtggccgtggtggtgtttgccatgctgtgcctgctgatcatcctgggccgctactttgcccggcacaagggcacctacttcacccatgaggccaagggagcagatgatgctgctgatgctgacacagccatcatcaatgctgagggcggccagaacaacagcgaggagaagaaggagtacttcatctag

SEQ ID NO: 39157 - DNA, 1122 bp, Artificial Sequence
  derived and/or modified sequence
ggcgacggccagaacctgttcaccaaggacgtgaccgtgatcgagggagaggtcgccaccatcagctgccaggtcaacaagagcgacgactccgtgattcagcttctgaaccccaatcgtcagacaatctatttcagagacttccgacccctcaaagactcacgcttccaattgctgaacttctctagctctgaacttaaagtgagccttaccaatgtgtccattagtgatgaggggaggtacttctgccagctgtatacagatccgccccaagaatcttacactactatcacagttttagtccccccgagaaatctaatgattgacatacagaaggataccgcagtcgaaggagaagaaatcgaggtcaattgcaccgcaatggcgagcaagccagctaccacaatcaggtggtttaagggtaatacagagctgaaaggtaaaagcgaagtagaggagtggtcagatatgtacacagtaactagccaactgatgctgaaggttcacaaggaggatgatggcgtgcccgttatctgccaggtggaacatccagcggttaccggcaacctccagactcagaggtatctcgaagtacaatacaaaccacaagttcacattcagatgacctatcctctgcagggccttactagagagggtgacgcactcgagctaacatgcgaggccatcggcaaaccacagcctgtgatggtgacctgggttcgagtggacgacgagatgcctcagcacgcagtgctgtcagggccgaacttgttcatcaataacctcaataaaactgataacggtacctaccgatgtgaagcatctaatattgtagggaaagctcacagcgattacatgctgtacgtgtatgattcgcgagcaggagaggaaggttccattcgcgccgtcgatcatgcggtgataggcggggtggttgctgtcgtggtttttgctatgctgtgcttgttgatcatcctcggccgttactttgcaagacataaaggcacctacttcactcatgaggccaaaggagctgacgatgccgccgatgccgataccgctattattaacgccgaaggaggacagaacaactcagaagagaagaaggagtactttatctag

SEQ ID NO: 39158 - DNA, 1245 bp, Artificial Sequence
  derived and/or modified sequence
atggccagcgtggtgctgcccagcggcagccagtgcgccgccgccgcagccgcagctgcacctccagggctacggctaagactcctcttactgctgttttccgccgctgcactgattcccaccggagacggccaaaatctgttcacaaaggacgtgacagtcatcgaaggtgaagtggccactatcagttgtcaggtgaacaagagcgacgattccgttattcagcttctgaatccaaacaggcagacaatttacttccgagattttcgtccccttaaggacagtcgcttccagttactgaatttcagctcctccgagctcaaggtgagcttgacgaacgtgtctatctctgacgaggggaggtacttttgtcagttgtacaccgatccgcctcaagaaagctacacaaccatcaccgtactcgtccctccccggaatttgatgattgatatccaaaaagataccgccgtcgagggcgaagagattgaggtgaattgcacagcaatggcgagtaaacccgccactaccattcggtggttcaaaggaaacacagagctgaagggcaagtcagaggtggaagagtggtctgatatgtatacagtcacgagccaactgatgctgaaagtccataaagaggacgacggcgtcccagtgatctgtcaggtggaacaccccgctgtgactggcaatttacagacccagcgatacctcgaggttcagtacaagcctcaagtgcacattcagatgacctaccctctgcaggggctgacccgggagggagatgccctggagctgacctgtgaagctattgggaaaccccaacccgtgatggttacctgggtccgtgtcgatgacgagatgccccagcatgccgttctcagtggtcccaacttattcattaataatcttaataagactgacaatgggacgtaccggtgtgaggcctcaaacatcgtgggcaaggctcattctgactatatgctgtatgtgtacgactctcgcgcaggggaggaagggagcatcagggccgtggatcacgcggttatcggcggagtcgtggccgtggtagtatttgccatgctctgcctcttgatcatcctgggccggtactttgcccggcacaaaggtacttacttcacccacgaggccaaaggcgctgatgatgctgccgatgccgacacagcaatcattaacgccgagggcggccagaataactcagaagagaagaaggagtacttcatctag

SEQ ID NO: 39159 - DNA, 1122 bp, Artificial Sequence
  derived and/or modified sequence
ggcgatgggcagaatctgtttaccaaggatgtaactgtgatcgagggagaggtggcaaccatctcttgccaggtcaataagtcagatgacagtgtcattcagttgctgaaccctaatcggcagacgatttacttcagagattttcggccattgaaagacagccgattccaactgctgaacttctccagctcggaactcaaagtgtccctgaccaatgtatctatatctgacgaagggcgttatttctgtcagctttatacagaccctccacaggaatcttatacaactattaccgtgctggttcctcccaggaatcttatgatcgatatccaaaaggataccgcagtcgaaggggaggaaatcgaagtgaactgcacggccatggcaagcaaacctgctactactatcaggtggttcaagggtaataccgagctgaagggcaaatccgaggtggaggaatggagtgatatgtacacggtgactagtcaactcatgttaaaagttcataaggaagatgacggcgtccccgtcatctgtcaggtcgagcatccggctgtcacagggaatttgcagacccagcgctatcttgaggtgcaatacaaaccccaggtgcacatacaaatgacataccccctgcaaggacttactagagagggtgatgcgttagaactcacatgcgaggctattggaaaaccccagcctgttatggtgacatgggtcagagtcgacgatgagatgccacagcatgctgtgctgtccgggccaaacctctttatcaacaatcttaataaaactgacaacggaacgtatcgttgcgaagcatctaatatagttggaaaggcccacagcgactatatgctgtatgtgtacgactcccgggcaggagaagagggctccattcgggcagtcgaccacgcagtgatcggtggcgtagtagccgttgtcgtgttcgccatgctgtgcctgctgatcattctggggaggtatttcgccagacataaaggtacgtattttacccatgaggcgaagggcgctgatgacgccgctgacgcagatacagctatcatcaatgcagagggcggtcagaataactccgaggagaaaaaagagtattttatttag

SEQ ID NO: 39160 - DNA, 1245 bp, Artificial Sequence
  derived and/or modified sequence
atggcaagtgttgtattacccagcggaagccagtgtgcagcagcagccgctgccgctgccccacccggtctgcgcctacgtctgctactcctcctattctctgccgcagcccttatacctactggtgatggacagaacctgtttactaaggacgtgaccgtgatcgagggcgaggtggcaactatttcttgtcaggtcaacaaatctgacgactccgtgattcagctgcttaatcccaatcgccagaccatctatttcagggatttccggcctctcaaagacagcagattccagttactgaacttttcctccagcgaactgaaagtcagtttaacaaatgtctccatctccgacgaaggacgatatttttgtcagctgtacaccgatccccctcaggagtcgtataccaccatcactgttcttgttccaccgagaaacctgatgatagacatacagaaggatacagccgtggagggagaggagatagaagtgaactgtaccgcaatggcatcaaagcccgctactacgatccggtggtttaaagggaacacagagttaaaaggaaagagcgaagtcgaggagtggtcagatatgtacacggtgacatcccagcttatgctgaaggtgcataaagaggacgatggagtgccagtaatctgtcaggttgaacacccagccgtgacaggtaacctgcagacccagcgatacttggaggtccaatataagcctcaggtgcacatacagatgacctaccctctccagggtttgacacgggaaggggatgccttagagctgacgtgtgaagcaatcggtaagccccaaccagtgatggtgacatgggtgagagttgatgatgaaatgccacagcacgccgttttgtcaggcccaaacctgttcattaacaatctgaacaaaactgacaatggcacctaccgctgcgaggcatccaacatagtgggcaaggctcactccgattatatgctctacgtgtacgattcaagagcaggggaagaaggctccatcagggctgtagaccatgcggtgattggcggagtagtggcggtcgtcgtgttcgctatgctttgcctactaataattttgggcagatacttcgcgagacacaaaggcacctattttacccacgaagccaagggcgctgacgatgcagctgatgccgacaccgccatcattaatgccgaggggggtcagaacaattctgaggagaaaaaagagtacttcatttag

SEQ ID NO: 39161 - DNA, 2255 bp, Artificial Sequence
  derived and/or modified sequence
ggtgatgggcagaatctgtttacgaaagacgtgacagtgatcgagggagaggttgcgaccatcagttgccaagtcaataagagtgacgactctgtgattcagctactgaatcccaacaggcagaccatttatttcagggacttcaggcctttgaaggacagcaggtttcagttgctgaatttttctagcagtgaactcaaagtatcattgacaaacgtctcaatttctgatgaaggaagatacttttgccagctctataccgatcccccacaggaaagttacaccaccatcacagtcctggtcccaccacgtaatctgatgatcgatatccagaaagacactgcggtggaaggtgaggagattgaagtcaactgcactgctatggccagcaagccagccacgactatcaggtggttcaaagggaacacagagctaaaaggcaaatcggaggtggaagagtggtcagacatgtacactgtgaccagtcagctgatgctgaaggtgcacaaggaggacgatggggtcccagtgatctgccaggtggagcaccctgcggtcactggaaacctgcagacccagcggtatctagaagtacagtataagcctcaagtgcacattcagatgacttatcctctacaaggcttaacccgggaaggggacgcgcttgagttaacatgtgaagccatcgggaagccccagcctgtgatggtaacttgggtgagagtcgatgatgaaatgcctcaacacgccgtactgtctgggcccaacctgttcatcaataacctaaacaaaacagataatggtacataccgctgtgaagcttcaaacatagtggggaaagctcactcggattatatgctgtatgtatacgattcccgagcaggtgaagaaggctcgatcagggcagtggatcatgccgtgatcggtggcgtcgtggcggtggtggtgttcgccatgctgtgcttgctcatcattctggggcgctattttgccagacataaaggtacatacttcactcatgaagccaaaggagccgatgacgcagcagacgcagacacagctataatcaatgcagaaggaggacagaacaactccgaagaaaagaaagagtacttcatctagatcagcctttttgtttcaatgaggtgtccaactggccctatttagatgataaagagacagtgatattggaacttgcgagaaattcgtgtgtttttttatgaatgggtggaaaggtgtgagactgggaaggcttgggatttgctgtgtaaaaaaaaaaaaaatgttctttggaaagtacactctgctgtttgacacctcttttttcgtttgtttgtttgtttaatttttatttcttcctaccaagtcaaacttggatacttggatttagtttcagtagattgcagaaaattctgtgccttgttttttgtttgtttgttgcgttcctttcttttccccctttgtgcacatttatttcctccctctaccccaatttcggattttttccaaaatctcccattttggaatttgcctgctgggattccttagactcttttccttcccttttctgttctagttttttacttttgtttatttttatggtaactgctttctgttccaaattcagtttcataaaaggagaaccagcacagcttagatttcatagttcagaatttagtgtatccataatgcattcttctctgttgtcgtaaagatttgggtgaacaaacaatgaaaactctttgctgctgcccatgtttcaaatacttagagcagtgaagactagaaaattagactgtgattcagaaaatgttctgtttgctgtggaactacattactgtacagggttatctgcaagtgaggtgtgtcacaatgagattgaatttcactgtctttaattctgtatctgtagacggctcagtatagataccctacgctgtccagaaaggtttggggcagaaaggactcctcctttttccatgccctaaacagacctgacaggtgaggtctgttccttttatataagtggacaaattttgagttgccacaggaggggaagtagggaggggggaaatacagttctgctctggttgtttctgttccaaatgattccatccacctttcccaatcggccttacttctcactaatttgtaggaaaaagcaagttcgtctgttgtgcgaatgactgaatgggacagagttgatttttttttttttttcctttgtgcttagttaggaaggcagtaggatgtgg

SEQ ID NO: 39162 - DNA, 3551 bp, Artificial Sequence
  derived and/or modified sequence
ggttgggctcgcggcgctgtgattggtctgcccggactccgcctccagcgcatgtcattagcatctcattagctgtccgctcgggctccggaggcagccaacgccgccagtctgaggcaggtgcccgacatggcgagtgtagtgctgccgagcggatcccagtgtgcggcggcagcggcggcggcggcgcctcccgggctccggctccggcttctgctgttgctcttctccgccgcggcactgatccccacaggtgatgggcagaatctgtttacgaaagacgtgacagtgatcgagggagaggttgcgaccatcagttgccaagtcaataagagtgacgactctgtgattcagctactgaatcccaacaggcagaccatttatttcagggacttcaggcctttgaaggacagcaggtttcagttgctgaatttttctagcagtgaactcaaagtatcattgacaaacgtctcaatttctgatgaaggaagatacttttgccagctctataccgatcccccacaggaaagttacaccaccatcacagtcctggtcccaccacgtaatctgatgatcgatatccagaaagacactgcggtggaaggtgaggagattgaagtcaactgcactgctatggccagcaagccagccacgactatcaggtggttcaaagggaacacagagctaaaaggcaaatcggaggtggaagagtggtcagacatgtacactgtgaccagtcagctgatgctgaaggtgcacaaggaggacgatggggtcccagtgatctgccaggtggagcaccctgcggtcactggaaacctgcagacccagcggtatctagaagtacagtataagcctcaagtgcacattcagatgacttatcctctacaaggcttaacccgggaaggggacgcgcttgagttaacatgtgaagccatcgggaagccccagcctgtgatggtaacttgggtgagagtcgatgatgaaatgcctcaacacgccgtactgtctgggcccaacctgttcatcaataacctaaacaaaacagataatggtacataccgctgtgaagcttcaaacatagtggggaaagctcactcggattatatgctgtatgtatacgattcccgagcaggtgaagaaggctcgatcagggcagtggatcatgccgtgatcggtggcgtcgtggcggtggtggtgttcgccatgctgtgcttgctcatcattctggggcgctattttgccagacataaaggtacatacttcactcatgaagccaaaggagccgatgacgcagcagacgcagacacagctataatcaatgcagaaggaggacagaacaactccgaagaaaagaaagagtacttcatctagatcagcctttttgtttcaatgaggtgtccaactggccctatttagatgataaagagacagtgatattggaacttgcgagaaattcgtgtgtttttttatgaatgggtggaaaggtgtgagactgggaaggcttgggatttgctgtgtaaaaaaaaaaaaaatgttctttggaaagtacactctgctgtttgacacctcttttttcgtttgtttgtttgtttaatttttatttcttcctaccaagtcaaacttggatacttggatttagtttcagtagattgcagaaaattctgtgccttgttttttgtttgtttgttgcgttcctttcttttccccctttgtgcacatttatttcctccctctaccccaatttcggattttttccaaaatctcccattttggaatttgcctgctgggattccttagactcttttccttcccttttctgttctagttttttacttttgtttatttttatggtaactgctttctgttccaaattcagtttcataaaaggagaaccagcacagcttagatttcatagttcagaatttagtgtatccataatgcattcttctctgttgtcgtaaagatttgggtgaacaaacaatgaaaactctttgctgctgcccatgtttcaaatacttagagcagtgaagactagaaaattagactgtgattcagaaaatgttctgtttgctgtggaactacattactgtacagggttatctgcaagtgaggtgtgtcacaatgagattgaatttcactgtctttaattctgtatctgtagacggctcagtatagataccctacgctgtccagaaaggtttggggcagaaaggactcctcctttttccatgccctaaacagacctgacaggtgaggtctgttccttttatataagtggacaaattttgagttgccacaggaggggaagtagggaggggggaaatacagttctgctctggttgtttctgttccaaatgattccatccacctttcccaatcggccttacttctcactaatttgtaggaaaaagcaagttcgtctgttgtgcgaatgactgaatgggacagagttgatttttttttttttttcctttgtgcttagttaggaaggcagtaggatgtggcctgcatgtactgtatattacagatatttgtcatgctgggatttccaactcgaatctgtgtgaaactttcattccttcagatttggcttgacaaaggcaggaggtacaaaagaagggctggtattgttctcacactggtctgctgtcgctctcagttctcgataggtcagagcagaggtggaaaaacagcatgtacggattttcagttacttaatcaaaactcaaatgtgagtgtttttatctttttacctttcatacactagccttggcctctttcctcagccttaagaaccatctgccaaaaattactgatcctcgcatgatggcagccatagtgcatagctactaaaatcagtgaccttgaacatatcttagatggggagcctcgggaaaaggtagaggagtcacgttaccatttacatgttttaaagaaagaagtgtggggattttcactgaaacgtctaggaaatctagaagtagtcctgaaggacagaaactaaactcttaccatatgtttggtaagactccagactccagctaacagtccctatggaaagatggcatcaaaaaagatagatctatatatatatataaatatatattctattacattttcagtgagtaattttggattttgcaaggtgcatttttactattgttacattatgtggaaaacttatgctgatttatttaagggggaaaaagtgtcaactctttgttatttgaaaacatgtttatttttcttgtctttattttaacctttgatagaaccattgcaatatgggggccttttgggaacggactggtatgtaaaagaaaatccattatcgagcagcattttatttacccctcccctatccctaggcacttaaccaagacaaaaagccacaatgaacatccctttttcaatgaattttataatctgcagctctattccgagcccttagcacccattccgaccatagtataatcatatcaaagggtgagaatcatttagcatgttgttgaaaggttttttttcagttgttctttttagaaaaaaag

SEQ ID NO: 39163 - DNA, 1122 bp, Artificial Sequence
  derived and/or modified sequence
ggcgacggccagaacctgttcaccaaggacgtgaccgtgatcgagggcgaggtggccaccatcagctgccaggtgaacaagagcgacgacagcgtgatccagctgctgaaccccaacagacagaccatctacttcagagacttcagacccctgaaggacagcagattccagctgctgaacttcagcagcagcgagctgaaggtgagcctgaccaacgtgagcatcagcgacgagggcagatacttctgccagctgtacaccgaccccccccaggagagctacaccaccatcaccgtgctggtgccccccagaaacctgatgatcgacatccagaaggacaccgccgtggagggcgaggagatcgaggtgaactgcaccgccatggccagcaagcccgccaccaccatcagatggttcaagggcaacaccgagctgaagggcaagagcgaggtggaggagtggagcgacatgtacaccgtgaccagccagctgatgctgaaggtgcacaaggaggacgacggcgtgcccgtgatctgccaggtggagcaccccgccgtgaccggcaacctgcagacccagagatacctggaggtgcagtacaagccccaggtgcacatccagatgacctaccccctgcagggcctgaccagagagggcgacgccctggagctgacctgcgaggccatcggcaagccccagcccgtgatggtgacctgggtgagagtggacgacgagatgccccagcacgccgtgctgagcggccccaacctgttcatcaacaacctgaacaagaccgacaacggcacctacagatgcgaggccagcaacatcgtgggcaaggcccacagcgactacatgctgtacgtgtacgacagcagagccggcgaggagggcagcatcagagccgtggaccacgccgtgatcggcggcgtggtggccgtggtggtgttcgccatgctgtgcctgctgatcatcctgggcagatacttcgccagacacaagggcacctacttcacccacgaggccaagggcgccgacgacgccgccgacgccgacaccgccatcatcaacgccgagggcggccagaacaacagcgaggagaagaaggagtacttcatctag

SEQ ID NO: 39164 - protein, 276 aa, Artificial Sequence
  derived and/or modified sequence
MAGPAALSAAAAAALAAALLLLRREDPGPGAGPSMAETEALSKLREDFRMQNKSVFILGASGETGRVLLKEILEQGLFSKVTLIGRRKLTFDEEAYKNVNQEVVDFEKLDDYASAFQGHDVGFCCLGTTRGKAGAEGFVRVDRDYVLKSAELAKAGGCKHFNLLSSKGADKSSNFLYLQVKGEVEAKVEELKFDRYSVFRPGVLLCDRQESRPGEWLVRKFFGSLPDSWASGHSVPVVTVVRAMLNNVVRPRDKQMELLENKAIHDLGKAHGSLKP

SEQ ID NO: 39165 - protein, 242 aa, Artificial Sequence
  derived and/or modified sequence
MAETEALSKLREDFRMQNKSVFILGASGETGRVLLKEILEQGLFSKVTLIGRRKLTFDEEAYKNVNQEVVDFEKLDDYASAFQGHDVGFCCLGTTRGKAGAEGFVRVDRDYVLKSAELAKAGGCKHFNLLSSKGADKSSNFLYLQVKGEVEAKVEELKFDRYSVFRPGVLLCDRQESRPGEWLVRKFFGSLPDSWASGHSVPVVTVVRAMLNNVVRPRDKQMELLENKAIHDLGKAHGSLKP

SEQ ID NO: 39166 - DNA, 831 bp, Artificial Sequence
  derived and/or modified sequence
atggccggccccgccgccctgagcgccgccgccgccgccgccctggccgccgccctgctgctgctgagaagagaggaccccggccccggcgccggccccagcatggccgagaccgaggccctgagcaagctgagagaggacttcagaatgcagaacaagagcgtgttcatcctgggcgccagcggcgagaccggcagagtgctgctgaaggagatcctggagcagggcctgttcagcaaggtgaccctgatcggcagaagaaagctgaccttcgacgaggaggcctacaagaacgtgaaccaggaggtggtggacttcgagaagctggacgactacgccagcgccttccagggccacgacgtgggcttctgctgcctgggcaccaccagaggcaaggccggcgccgagggcttcgtgagagtggacagagactacgtgctgaagagcgccgagctggccaaggccggcggctgcaagcacttcaacctgctgagcagcaagggcgccgacaagagcagcaacttcctgtacctgcaggtgaagggcgaggtggaggccaaggtggaggagctgaagttcgacagatacagcgtgttcagacccggcgtgctgctgtgcgacagacaggagagcagacccggcgagtggctggtgagaaagttcttcggcagcctgcccgacagctgggccagcggccacagcgtgcccgtggtgaccgtggtgagagccatgctgaacaacgtggtgagacccagagacaagcagatggagctgctggagaacaaggccatccacgacctgggcaaggcccacggcagcctgaagccctag

SEQ ID NO: 39167 - DNA, 831 bp, Artificial Sequence
  derived and/or modified sequence
atggcaggtccagctgctctgtcagcggctgccgccgcggcactggccgccgccctcttactgctgagacgagaagatccaggtcccggagcggggccgtcaatggccgagaccgaagctctttcaaagcttagggaagactttcgtatgcagaataagagcgtctttatcctgggcgcaagcggcgagacgggacgcgtcctgctgaaggagatcctcgaacaaggcctgtttagtaaagtcacactgatcggacgaagaaagctaacattcgatgaagaggcctacaagaatgtgaaccaagaggtagtagattttgagaagctggacgactacgccagcgcctttcagggacatgacgtcggattttgctgtctcggaaccacacgaggcaaagctggagcggagggctttgtgcgggtcgaccgagattacgtgttgaaatcagccgagttggctaaggccggaggatgtaagcactttaatctcctgtccagcaagggggcagacaaaagtagtaattttctgtaccttcaggttaaaggggaagtggaggccaaggtagaagagctgaagtttgatagatactctgtcttcaggcctggagtgctgctctgcgatcggcaagagtcccgccctggtgaatggcttgtcaggaaattctttggcagcctacccgactcttgggcaagtggccatagtgttcctgttgtgactgtggtgcgcgctatgctcaataatgttgtgagaccgcgcgacaaacagatggagctcctcgaaaacaaggcaattcacgacctcggcaaagctcatggatcattgaagccgtag

SEQ ID NO: 39168 - DNA, 1477 bp, Artificial Sequence
  derived and/or modified sequence
aagccgggtaggcgctgtctccgtcgcctccaacccccccggtccgaccagggaaggtgggatgctctgatggccgggcctgcggcgctgagcgcggcggcggcggctgctctggcggccgccctgctcctgctgcgtcgtgaggacccggggccgggggctggccccagcatggccgaaacagaagccctgtcgaagcttcgggaagacttcaggatgcagaataaatccgtctttattttgggcgccagcggagaaaccggcagagtgctcttaaaggaaatcctggagcagggcctgttttccaaagtcacgctcattggccggaggaagctcaccttcgacgaggaagcttataaaaatgtgaatcaagaagtggtggactttgaaaagttggatgactacgcctctgcctttcaaggtcatgatgttggattctgttgcctgggtaccaccagagggaaagctggggcggagggatttgttcgtgttgaccgagattatgtgctgaagtctgcagagctggcaaaagctggagggtgcaaacatttcaacttgctatcctctaaaggagctgataaatcaagcaattttttatatctacaagttaagggagaagtagaagccaaggttgaagaattaaaatttgatcgttactctgtatttaggcctggagttctgttatgtgataggcaagaatctcgcccaggtgaatggctggttagaaagttctttggctccttaccagactcttgggccagtgggcattctgtgcctgtggtgaccgtggttagagcaatgctgaacaatgtggtgagaccaagagacaagcagatggaactgctggagaacaaggccatccatgacctggggaaagcgcatggctctctcaagccatgaccacattggagaaatggtttttattgtcaaccttaacacccatcaccaaatcggtaatttcagggtctaaaaaaagtcagcatgttttaactttgttgttttactatcctcaggcatccattccaatcaagaaatgatggtgctctgcatcagtggttcagagcctggttatacatatagatcactcagggagctttggaaaaataaagatttgtcagccctatctcaaacttgaatcaaaatttctggggtgtgggcacaataatctgtaattttctttgtttatacttcccctgatgccactggttccgatgccactggctggggggcctgctttgaaatgcttgtctgcagagtcacagcagccatgaaaaccttatgaccgtgcaaatgagctctgctctaaaattgttgacattcatgtctctgagttacaaaagtgctaattcactacatgtaattgtgtaagtaaacattgtgcctttactacttctttatgtaatagaagttatatacctaagcttatataatacatggggaggattaaataaaggaataaagatgaatggacaactcc

SEQ ID NO: 39169 - DNA, 967 bp, Artificial Sequence
  derived and/or modified sequence
gaggccacccggaagaccaagccgggtaggcgctgtctccgtcgcctccaacccccccggtccgaccagggaagcatggccgaaacagaagccctgtcgaagcttcgggaagacttcaggatgcagaataaatccgtctttattttgggcgccagcggagaaaccggcagagtgctcttaaaggaaatcctggagcagggcctgttttccaaagtcacgctcattggccggaggaagctcaccttcgacgaggaagcttataaaaatgtgaatcaagaagtggtggactttgaaaagttggatgactacgcctctgcctttcaaggtcatgatgttggattctgttgcctgggtaccaccagagggaaagctggggcggagggatttgttcgtgttgaccgagattatgtgctgaagtctgcagagctggcaaaagctggagggtgcaaacatttcaacttgctatcctctaaaggagctgataaatcaagcaattttttatatctacaagttaagggagaagtagaagccaaggttgaagaattaaaatttgatcgttactctgtatttaggcctggagttctgttatgtgataggcaagaatctcgcccaggtgaatggctggttagaaagttctttggctccttaccagactcttgggccagtgggcattctgtgcctgtggtgaccgtggttagagcaatgctgaacaatgtggtgagaccaagagacaagcagatggaactgctggagaacaaggccatccatgacctggggaaagcgcatggctctctcaagccatgaccacattggagaaatggtttttattgtcaaccttaacacccatcaccaaatcggtaatttcagggtctaaaaaaagtcagcatgttttaactttgttgttttactatcctcaggcatccattccaatcaagaaatgatggtgctctgcatcagtggttcagag

SEQ ID NO: 39170 - DNA, 1748 bp, Artificial Sequence
  derived and/or modified sequence
aggtgggatgctctgatggccgggcctgcggcgctgagcgcggcggcggcggctgctctggcggccgccctgctcctgctgcgtcgtgaggacccggggccgggggctggccccaggtaacccctccgcgtatgggaccgagctgggccaggtctcctggccgggccggggataccgtggggtatgcccagtgatgccagcagcttgtggcacctgggcgcaccctccagctcgggccccttccgatgggtctgctggctcaggtgcgggcgatggccggggagccgcgccccgcacgtgactcagcactttccccagagcccggactgcggagaacaatatcctcctccctaacagataaacagcccttgttcctcgggataaggactggcagtcccctgacaccctaagaccggcatctgtcgatgttatttccccagcatggccgaaacagaagccctgtcgaagcttcgggaagacttcaggatgcagaataaatccgtctttattttgggcgccagcggagaaaccggcagagtgctcttaaaggaaatcctggagcagggcctgttttccaaagtcacgctcattggccggaggaagctcaccttcgacgaggaagcttataaaaatgtgaatcaagaagtggtggactttgaaaagttggatgactacgcctctgcctttcaaggtcatgatgttggattctgttgcctgggtaccaccagagggaaagctggggcggagggatttgttcgtgttgaccgagattatgtgctgaagtctgcagagctggcaaaagctggagggtgcaaacatttcaacttgctatcctctaaaggagctgataaatcaagcaattttttatatctacaagttaagggagaagtagaagccaaggttgaagaattaaaatttgatcgttactctgtatttaggcctggagttctgttatgtgataggcaagaatctcgcccaggtgaatggctggttagaaagttctttggctccttaccagactcttgggccagtgggcattctgtgcctgtggtgaccgtggttagagcaatgctgaacaatgtggtgagaccaagagacaagcagatggaactgctggagaacaaggccatccatgacctggggaaagcgcatggctctctcaagccatgaccacattggagaaatggtttttattgtcaaccttaacacccatcaccaaatcggtaatttcagggtctaaaaaaagtcagcatgttttaactttgttgttttactatcctcaggcatccattccaatcaagaaatgatggtgctctgcatcagtggttcagagcctggttatacatatagatcactcagggagctttggaaaaataaagatttgtcagccctatctcaaacttgaatcaaaatttctggggtgtgggcacaataatctgtaattttctttgtttatacttcccctgatgccactggttccgatgccactggctggggggcctgctttgaaatgcttgtctgcagagtcacagcagccatgaaaaccttatgaccgtgcaaatgagctctgctctaaaattgttgacattcatgtctctgagttacaaaagtgctaattcactacatgtaattgtgtaagtaaacattgtgcctttactacttctttatgtaatagaagttatatacctaagcttatataatacatggggaggattaaataaaggaataaagatgaatggacaactcct

SEQ ID NO: 39171 - DNA, 831 bp, Artificial Sequence
  derived and/or modified sequence
atggccggccctgctgccctgtctgctgctgctgctgctgccctggccgccgccctgctgctgctgcggagagaagatcctggccctggagctggccccagcatggccgagacagaggccctgagcaagctgcgggaggacttcaggatgcagaacaagagcgtcttcatcctgggcgccagcggggagaccggccgggtgctgctgaaggagatcctggagcagggcctcttcagcaaggtgaccctcatcggccgcaggaagctgacctttgatgaggaggcctacaagaatgtgaaccaggaggtggtggactttgagaagctggatgattatgccagcgccttccagggccatgatgtgggcttctgctgcctgggcaccacccggggcaaggccggggctgagggctttgtgcgggtggaccgggactatgtgctgaagtctgctgagctggccaaggccggcggctgcaagcacttcaacctgctgagcagcaaaggagctgacaagagcagcaacttcctgtacctgcaggtgaagggggaggtggaggccaaggtggaggagctgaagtttgaccgctacagcgtcttccggcctggggtgctgctgtgtgaccggcaggagagcaggcctggagagtggctggtgaggaagttcttcggcagcctgcctgacagctgggccagcggccacagcgtgcctgtggtgacagtggtgcgggccatgctgaacaacgtggtgcggccccgggacaagcagatggagctgctggagaacaaggccatccatgacctgggcaaggcccacggcagcctgaagccctag

SEQ ID NO: 39172 - DNA, 831 bp, Artificial Sequence
  derived and/or modified sequence
atggccggccccgccgccctgagcgccgccgccgccgccgccctggccgccgctttgttgctgctgcggcgggaggaccccggacccggcgccggtcccagtatggccgaaaccgaggcgctgtcaaaactgagggaagattttaggatgcagaacaagtccgtgtttatcttgggcgccagcggagaaacaggcagggtcctcctgaaggagatcttagagcagggccttttctccaaagttacactgatcggtaggaggaagctgacttttgatgaagaggcatataagaacgtaaatcaagaagtcgttgatttcgagaagctcgatgactacgcatctgctttccagggacacgacgtcggcttttgctgtctggggaccactcgagggaaggcaggtgcagaagggtttgttagggtggatcgcgactatgtgctgaaatccgctgagttggccaaggccggcggttgtaagcactttaacctgctgtctagcaagggcgccgataaaagttccaatttcctgtacctccaggtgaaaggagaggttgaagccaaagttgaagagctgaaatttgaccgttactccgtgttccgcccaggcgtgcttctttgtgacagacaggaatccaggccaggagagtggctagtgcgaaaattctttgggtccctccccgattcctgggcatccggccatagtgtcccagtggtgacggttgttagagctatgttaaataatgtggtgaggcctcgtgacaagcagatggagcttctcgaaaacaaggccatccacgatctgggaaaggcacacggatctctcaagccttag

SEQ ID NO: 39173 - DNA, 831 bp, Artificial Sequence
  derived and/or modified sequence
atggccggacccgctgccttgtccgccgctgccgctgctgcgctcgcagccgctttacttttgctgcggagagaggatcctggccctggcgctggaccgtcaatggccgaaactgaagctctgtcgaaactgcgggaagacttcaggatgcagaataagtcagtgttcatccttggagcatccggtgaaactggacgcgttctgctgaaggagatcctggaacaaggccttttctcaaaagtcaccctgattggacgcagaaagttaactttcgacgaggaagcgtacaagaatgttaaccaagaggtagtcgactttgaaaagctggatgactacgctagtgccttccaaggacacgatgtaggcttttgctgccttgggacgaccaggggaaaagctggcgcagaggggttcgtgcgcgttgatagagattacgttctaaagagtgcagagctcgcaaaggccggtgggtgcaagcactttaacctgctgagctccaagggagctgataaatcgagtaattttctttaccttcaagttaaaggcgaggtggaggccaaggtggaggagctaaaatttgatcggtatagtgtctttcgcccaggcgttctgctatgtgaccgccaggaatcacgacccggagaatggctagtacgtaagtttttcggaagtctgccagattcatgggcgtccgggcactctgtgcctgtcgtgaccgtggtcagagccatgttgaataatgtggtcaggcctagggacaagcaaatggaactcctggagaataaggccattcatgacctaggcaaggcacatggcagcctgaaaccgtag

SEQ ID NO: 39174 - DNA, 729 bp, Artificial Sequence
  derived and/or modified sequence
atggccgagaccgaggccctgagcaagctgagagaggacttcagaatgcagaacaagagcgtgttcatcctgggcgccagcggcgagaccggcagagtgctgctgaaggagatcctggagcagggcctgttcagcaaggtgaccctgatcggcagaagaaagctgaccttcgacgaggaggcctacaagaacgtgaaccaggaggtggtggacttcgagaagctggacgactacgccagcgccttccagggccacgacgtgggcttctgctgcctgggcaccaccagaggcaaggccggcgccgagggcttcgtgagagtggacagagactacgtgctgaagagcgccgagctggccaaggccggcggctgcaagcacttcaacctgctgagcagcaagggcgccgacaagagcagcaacttcctgtacctgcaggtgaagggcgaggtggaggccaaggtggaggagctgaagttcgacagatacagcgtgttcagacccggcgtgctgctgtgcgacagacaggagagcagacccggcgagtggctggtgagaaagttcttcggcagcctgcccgacagctgggccagcggccacagcgtgcccgtggtgaccgtggtgagagccatgctgaacaacgtggtgagacccagagacaagcagatggagctgctggagaacaaggccatccacgacctgggcaaggcccacggcagcctgaagccctag

SEQ ID NO: 39175 - DNA, 729 bp, Artificial Sequence
  derived and/or modified sequence
atggccgaaaccgaggcactgtccaaactccgcgaggatttcaggatgcaaaacaaatcggtgtttatcctgggagccagcggagagacgggccgagttctgctaaaagaaatcctggaacaggggctgttttctaaagtcaccctgatcggccgccggaagttaacctttgatgaagaagcttacaaaaatgtgaaccaggaagtggtggattttgaaaaactcgacgactatgccagcgcctttcagggtcacgacgtcggcttctgttgtctgggcactaccagaggaaaggctggcgcggagggcttcgtccgcgtggaccgcgattatgtacttaagagcgccgagctggccaaggccggcggttgcaaacacttcaacctcctgtcttcaaaaggcgcggacaagtcatctaactttctgtatctgcaggtcaagggagaggtcgaagccaaggtagaggagcttaagttcgatcgctacagcgtctttcgaccaggggtcctgctctgtgatagacaagaaagtaggcctggtgagtggttggtccggaagttctttgggtctttgccagactcctgggcttcaggacacagtgtgcccgttgtgaccgttgtacgcgctatgctaaacaatgtcgtccggccaagggataagcagatggagctgctagagaataaggcaatacatgacctcggtaaggcccatggatcactgaagccctag

SEQ ID NO: 39176 - DNA, 729 bp, Artificial Sequence
  derived and/or modified sequence
atggcagagacagaggctctcagtaaattgcgggaagattttcgaatgcaaaataagagtgtgttcattctaggtgcttccggggaaacaggcagagttctgctcaaagaaatcctggagcagggactctttagtaaagttacgctcattgggcggcggaagctgacttttgacgaagaggcctacaagaatgtgaaccaggaggtcgtcgactttgaaaaactggacgactatgcatcagctttccagggccacgacgtcggattttgctgcctaggcacaacacggggaaaggcaggcgccgaggggtttgtgcgagttgatcgtgattacgttctgaaatcagccgaactggccaaagccgggggatgtaaacattttaatctccttagttcaaaaggtgccgataagtctagcaacttcctgtatctgcaggttaaaggggaggtggaagctaaggtggaagagctcaagtttgaccgatattctgtcttcagacccggcgtgctcctgtgcgacagacaagaaagcaggccgggcgagtggctggttaggaaattttttggctcattgcccgactcttgggcgagcggacattcagtgcctgtagttacagttgttagagctatgctaaacaatgtggtacggcccagggataaacaaatggagttgcttgagaacaaggccatccacgacctcggaaaggcacatgggtccctgaaaccatag

SEQ ID NO: 39177 - DNA, 729 bp, Artificial Sequence
  derived and/or modified sequence
atggcagaaactgaagctttatcaaagcttcgggaagatttccgcatgcagaacaagtcggtcttcatcctgggcgcatctggtgagacaggaagggttttgctgaaagagatcttagaacagggactgttttcaaaggtgactctgatcggcagaagaaagctgacatttgacgaggaagcctataagaatgtcaatcaggaggttgtcgactttgaaaagctggatgattatgcaagcgctttccaagggcacgacgtcggcttttgttgtctgggcaccactcgcggaaaggctggcgccgaaggctttgtgagagtcgatcgcgattacgttttgaaaagcgccgagctcgctaaagctggcggctgcaaacattttaacctgttatcttctaagggggcagacaaatcttcaaactttctgtatctgcaggtgaagggagaagtagaggccaaggtggaggaattaaaattcgatcggtattctgtttttcgcccgggggtgcttctctgcgaccgacaagagtcccggcccggcgaatggctagtcaggaaatttttcggaagcttgcccgattcctgggccagcggccacagtgtgcccgtagtgacagtcgtgagagctatgctgaataatgtagtgaggcctcgcgacaagcagatggagctgttggagaataaggccattcatgacttggggaaggctcatgggtccctcaagccatag

SEQ ID NO: 39178 - DNA, 886 bp, Artificial Sequence
  derived and/or modified sequence
gcgaggccacccggaagaccaagccggcatggccgaaacagaagccctgtcgaagcttcgggaagacttcaggatgcagaataaatccgtctttattttgggcgccagcggagaaaccggcagagtgctcttaaaggaaatcctggagcagggcctgttttccaaagtcacgctcattggccggaggaagctcaccttcgacgaggaagcttataaaaatgtgaatcaagaagtggtggactttgaaaagttggatgactacgcctctgcctttcaaggtcatgatgttggattctgttgcctgggtaccaccagagggaaagctggggcggagggatttgttcgtgttgaccgagattatgtgctgaagtctgcagagctggcaaaagctggagggtgcaaacatttcaacttgctatcctctaaaggagctgataaatcaagcaattttttatatctacaagttaagggagaagtagaagccaaggttgaagaattaaaatttgatcgttactctgtatttaggcctggagttctgttatgtgataggcaagaatctcgcccaggtgaatggctggttagaaagttctttggctccttaccagactcttgggccagtgggcattctgtgcctgtggtgaccgtggttagagcaatgctgaacaatgtggtgagaccaagagacaagcagatggaactgctggagaacaaggccatccatgacctggggaaagcgcatggctctctcaagccatgaccacattggagaaatggtttttattgtcaaccttaacacccatcaccaaatcggtaatttcagggtctaaaaaaagtcagcatgttttaactttgttgttttactatcctcaggcatccattccaatca

SEQ ID NO: 39179 - DNA, 729 bp, Artificial Sequence
  derived and/or modified sequence
atggccgagacagaggccctgagcaagctgcgggaggacttcaggatgcagaacaagagcgtcttcatcctgggcgccagcggggagaccggccgggtgctgctgaaggagatcctggagcagggcctcttcagcaaggtgaccctcatcggccgcaggaagctgacctttgatgaggaggcctacaagaatgtgaaccaggaggtggtggactttgagaagctggatgattatgccagcgccttccagggccatgatgtgggcttctgctgcctgggcaccacccggggcaaggccggggctgagggctttgtgcgggtggaccgggactatgtgctgaagtctgctgagctggccaaggccggcggctgcaagcacttcaacctgctgagcagcaaaggagctgacaagagcagcaacttcctgtacctgcaggtgaagggggaggtggaggccaaggtggaggagctgaagtttgaccgctacagcgtcttccggcctggggtgctgctgtgtgaccggcaggagagcaggcctggagagtggctggtgaggaagttcttcggcagcctgcctgacagctgggccagcggccacagcgtgcctgtggtgacagtggtgcgggccatgctgaacaacgtggtgcggccccgggacaagcagatggagctgctggagaacaaggccatccatgacctgggcaaggcccacggcagcctgaagccctag

SEQ ID NO: 39180 - DNA, 729 bp, Artificial Sequence
  derived and/or modified sequence
atggccgagaccgaggccctgagcaagctgcgggaggacttccggatgcagaacaaatccgtgttcatccttggggccagtggtgaaacagggagagtgttgctgaaagagatccttgagcaggggctgttctcaaaagtcacattaattggtagaaggaaactaacgtttgatgaggaagcctacaagaatgtgaaccaagaagtagttgatttcgaaaagcttgacgactacgcatccgcttttcaggggcacgatgtcggattttgctgcctaggcacaacccggggcaaggcaggcgctgaaggatttgtgcgcgtagaccgggactatgtcctcaaatctgccgagctcgctaaggccggtggatgtaagcactttaatctactatcaagcaaaggagcagataagagttctaacttcctttatctccaggtcaagggagaagtcgaagccaaagtggaggagctgaaatttgatcgctattccgtgtttaggcccggagtgcttttatgtgaccggcaggagtcccgccccggtgaatggctagtcagaaagttttttggatccctcccggattcttgggcctcaggccacagtgttccggtggtcacagttgtccgcgcgatgctcaacaacgtggtccgccccagggacaagcagatggaacttctcgagaataaggccattcacgacctcggcaaggcccatgggagcttgaagccttag

SEQ ID NO: 39181 - DNA, 729 bp, Artificial Sequence
  derived and/or modified sequence
atggccgagaccgaggccctgagcaagctgcgggaggacttccggatgcagaacaagtccgtattcatccttggtgcctctggcgagaccggcagggtcctcctcaaggagatcttagagcagggattgttctcaaaggtcacccttatcggacggagaaagctgaccttcgatgaagaggcatataagaacgtcaaccaggaggtcgtcgactttgagaaactggacgactacgcctctgcatttcaaggccacgacgtcggattttgttgcctcggaactactaggggcaaagcgggagcagagggcttcgtcagggtggaccgagactacgttcttaagagcgcggagctggcgaaagcaggcggctgcaagcacttcaatctgctttccagcaagggggccgacaaaagtagcaacttcctctacctgcaggtgaaaggcgaagtcgaggcaaaggtggaagagctgaagttcgataggtacagcgtgttccggcctggtgtactactgtgcgataggcaggagtcccgtccaggagagtggctggttcggaaattcttcgggtctctccctgactcttgggcttctggccactctgtccctgtagtcaccgtggttagggccatgctcaataacgtagttaggccacgggataaacagatggagctgcttgagaacaaagccattcacgatttgggtaaggctcatggctccctaaagccttag

SEQ ID NO: 39182 - DNA, 729 bp, Artificial Sequence
  derived and/or modified sequence
atggccgagaccgaggccctgagcaagctgcgggaggacttccggatgcagaacaaatctgttttcattctgggggcctctggggaaaccgggcgagtacttcttaaggagattctggagcaggggctcttttcaaaagtgaccttgatcgggagacgtaagctgacattcgacgaagaagcgtataagaacgttaatcaggaggtggttgatttcgaaaaattggatgactacgccagcgcctttcagggccacgatgttgggttctgctgtctgggaacaacgcggggcaaagctggcgctgagggatttgttcgcgtcgatcgggattacgtgctcaaatccgccgaactcgccaaggcaggaggctgcaagcatttcaatcttctgagctcaaaaggagccgataaaagtagtaactttctttatctacaggtaaaaggggaagtagaagctaaagtcgaagagcttaaatttgaccgttatagtgtgtttaggcctggcgtgctgctctgtgacagacaggaaagtcggccaggggagtggctagtgcggaagttttttggatcacttcctgacagttgggcctctggccacagcgttccggtggtgacagtggtgagggccatgctgaataatgttgtgcgcccgagagacaaacagatggagctgctggaaaataaagctatccatgacctgggtaaggcccacggcagcttaaagccatag

SEQ ID NO: 39183 - DNA, 729 bp, Artificial Sequence
  derived and/or modified sequence
atggctgagaccgaagctctctccaagctgcgtgaagacttccgcatgcagaacaaaagtgtgtttattctgggcgctagtggggagactgggcgagtgctgctgaaagagatcttggagcagggtctcttctcgaaagttacccttatcggaaggcggaaactgaccttcgacgaggaagcttacaaaaacgtcaatcaggaagtcgtagactttgaaaagctggacgactacgcctccgccttccaaggacacgatgtcggcttctgctgcttaggcactacccgaggcaaggccggagctgaaggcttcgtgagagtcgatcgggattacgtgttgaaaagtgccgagctcgcaaaagctggcggttgtaaacactttaatctactttcatcaaaaggtgcagacaaatcctccaatttcctttacctccaggtgaagggcgaagtcgaggcaaaagtagaggaactaaagttcgataggtattccgtgtttagaccaggcgtgctgctgtgcgacagacaggagtcgagaccaggggagtggctcgtgaggaagttctttggctctctgcccgactcatgggcgagtggccattcggttccggtggtcacagttgttcgggcaatgcttaacaacgtggtccgaccccgtgacaagcagatggaactgctggagaataaagccattcacgacctgggaaaggcccatgggagtctgaaaccgtag

SEQ ID NO: 39184 - DNA, 729 bp, Artificial Sequence
  derived and/or modified sequence
atggccgagactgaggcactgtcaaaattgcgggaagacttcagaatgcagaataaatccgtttttatacttggagcctctggcgagacaggccgagtgctgctgaaagaaatcctggagcagggtctttttagtaaagtgactctcatcggtcgtcgcaagcttacattcgacgaggaggcctacaaaaacgttaaccaggaggttgtggacttcgaaaaactcgatgactatgcctcagcctttcagggccacgacgtaggcttctgctgcctcggcaccacaagggggaaggctggagccgaggggttcgtccgggtagatcgcgactatgttctgaaaagtgccgagctagctaaggctggtggatgtaaacatttcaatttactgtcgagcaaaggagccgacaagagttccaacttcctgtatctccaggtgaaaggagaggtcgaagccaaagtggaagagctgaagtttgatcgttacagtgtgttccgcccaggagttctcctgtgcgataggcaggagtcaaggcccggagaatggctcgtgaggaaattctttggctcccttccggatagctgggccagcggccactctgtccccgtcgttactgttgtacgtgccatgctaaataatgttgtcaggccgcgagacaagcagatggagctgttggagaataaagctatccacgacctgggtaaggcgcatggtagcttgaagccatag

SEQ ID NO: 39185 - DNA, 729 bp, Artificial Sequence
  derived and/or modified sequence
atggcagagaccgaagcattatctaagctgagagaggatttccgtatgcagaacaaatctgtgttcatcttgggggcaagcggcgagacaggcagggttctgcttaaggagattctcgaacagggtcttttttccaaggtcacccttattggccgacgcaagctgaccttcgacgaagaagcttataaaaacgtcaatcaagaggtcgttgattttgagaaattagatgactatgcctccgcttttcagggccacgacgtgggtttttgttgcctggggacaacacggggtaaggccggtgcggagggattcgtgcgtgtggacagagattacgtcctgaagtcagctgaactggccaaggccggtggatgcaaacactttaaccttctgagttctaagggggctgacaagtcctccaacttcctgtatcttcaggtgaagggggaagtagaagccaaggtcgaggaacttaaatttgaccggtacagtgtattcagacctggtgtccttctttgcgatcgccaagaaagtcggcctggcgaatggctggtaaggaagttttttgggagtctcccagactcctgggcgtccgggcactcagtcccagtggtcactgtcgtacgggcaatgttgaataacgtggttaggccaagagataagcagatggaactgttggaaaataaagctattcacgaccttgggaaggcccatggcagcctgaaaccatag

SEQ ID NO: 39186 - protein, 133 aa, Artificial Sequence
  derived and/or modified sequence
MAETEALSKLREDFRMQNKSVFILGASGETGRVLLKEILEQGLFSKVTLIGRRKLTFDEEAYKNVNQEVVDFEKLDDYASAFQGHDVGFCCLGTTRGKAGAVRKAYALFPFCWPVISRILFLLTLFLCACCNA

SEQ ID NO: 39187 - DNA, 402 bp, Artificial Sequence
  derived and/or modified sequence
atggccgagaccgaggccctgagcaagctgagagaggacttcagaatgcagaacaagagcgtgttcatcctgggcgccagcggcgagaccggcagagtgctgctgaaggagatcctggagcagggcctgttcagcaaggtgaccctgatcggcagaagaaagctgaccttcgacgaggaggcctacaagaacgtgaaccaggaggtggtggacttcgagaagctggacgactacgccagcgccttccagggccacgacgtgggcttctgctgcctgggcaccaccagaggcaaggccggcgccgtgagaaaggcctacgccctgttccccttctgctggcccgtgatcagcagaatcctgttcctgctgaccctgttcctgtgcgcctgctgcaacgcctag

SEQ ID NO: 39188 - DNA, 402 bp, Artificial Sequence
  derived and/or modified sequence
atggcggagacagaagctctgtcaaaacttagagaggacttcagaatgcagaacaaaagtgtctttatcctgggagccagcggcgaaactggtagggtcctactcaaggagatcctcgagcagggcctcttttcgaaagtgaccctgatcgggcggagaaagctaaccttcgatgaggaagcttacaaaaacgtgaaccaggaggtagtggactttgagaagctggatgattacgcttccgcgtttcagggccacgatgttggattttgttgcttgggaacaacacggggcaaagctggagctgtgaggaaggcttatgcattatttcctttctgttggcctgtgattagccgtatcctttttcttctcacccttttcctttgtgcctgctgcaatgcctag

SEQ ID NO: 39189 - DNA, 402 bp, Artificial Sequence
  derived and/or modified sequence
atggctgagactgaagcgctgagcaagttgagagaggacttcagaatgcaaaataagtctgttttcatcctgggcgcctcaggagagaccggaagagtccttctgaaggagattttggagcagggcctgttctccaaagttactttaattgggcgccgcaaattaactttcgatgaggaggcctacaagaacgtaaaccaggaagtggtggattttgagaagcttgacgattatgcctccgcctttcagggccatgatgtgggattctgctgtctcggcaccactagaggaaaggcaggagcggtccggaaggcttacgcactcttccctttctgctggcccgtcatctccagaatactgttcctcctcacgctgtttttgtgcgcatgttgcaatgcgtag

SEQ ID NO: 39190 - DNA, 402 bp, Artificial Sequence
  derived and/or modified sequence
atggccgaaaccgaggcattaagcaaacttagagaagatttcagaatgcaaaataaaagcgtgttcatcttaggggccagcggagagacaggcagagtcctgcttaaggaaatcctagagcaaggccttttctccaaagtgaccctcattggacgcaggaaactcacctttgatgaggaggcatataaaaacgtcaaccaagaagtggttgatttcgaaaaactcgatgactatgctagcgcgtttcagggccacgatgtggggttctgttgtctgggtacaacaagaggcaaggcaggcgccgtcagaaaggcctatgcccttttcccgttctgttggcccgtgatttccagaattctgttcttacttacactgttcctttgtgcttgctgcaacgcctag

SEQ ID NO: 39191 - DNA, 713 bp, Artificial Sequence
  derived and/or modified sequence
aggtcccgcccctgtgggcggggcgaggcagcgtcgccgcgaggccacccggaagaccaagccggcatggccgaaacagaagccctgtcgaagcttcgggaagacttcaggatgcagaataaatccgtctttattttgggcgccagcggagaaaccggcagagtgctcttaaaggaaatcctggagcagggcctgttttccaaagtcacgctcattggccggaggaagctcaccttcgacgaggaagcttataaaaatgtgaatcaagaagtggtggactttgaaaagttggatgactacgcctctgcctttcaaggtcatgatgttggattctgttgcctgggtaccaccagagggaaagctggggcggtaaggaaggcatatgctcttttccctttttgctggccagtaatatcaaggattcttttcttgctcactctttttctttgtgcctgttgcaatgcttaaatgtgaataagcctttattgtttaagattctatatgctgcactaacctttggtatccttttaatagtactgataagttcgtctttcaaagtaatccttgagttcaggccccagtgctggagacgtcgtaaatatttacatgattttgcctattgtgattatcgctatcactacatcccctgactaagggaaaccatgatgtctgagtaaaactaattggtttatgctgttaacaatcagctgttt

SEQ ID NO: 39192 - DNA, 774 bp, Artificial Sequence
  derived and/or modified sequence
tcctccctaacagataaacagcccttgttcctcgggataaggactggcagtcccctgacaccctaagaccggcatctgtcgatgttatttccccagcatggccgaaacagaagccctgtcgaagcttcgggaagacttcaggatgcagaataaatccgtctttattttgggcgccagcggagaaaccggcagagtgctcttaaaggaaatcctggagcagggcctgttttccaaagtcacgctcattggccggaggaagctcaccttcgacgaggaagcttataaaaatgtgaatcaagaagtggtggactttgaaaagttggatgactacgcctctgcctttcaaggtcatgatgttggattctgttgcctgggtaccaccagagggaaagctggggcggtaaggaaggcatatgctcttttccctttttgctggccagtaatatcaaggattcttttcttgctcactctttttctttgtgcctgttgcaatgcttaaatgtgaataagcctttattgtttaagattctatatgctgcactaacctttggtatccttttaatagtactgataagttcgtctttcaaagtaatccttgagttcaggccccagtgctggagacgtcgtaaatatttacatgattttgcctattgtgattatcgctatcactacatcccctgactaagggaaaccatgatgtctgagtaaaactaattggtttatgctgttaacaatcagctgtttttccccttaataaatgtttgaaatttgaaa

SEQ ID NO: 39193 - DNA, 595 bp, Artificial Sequence
  derived and/or modified sequence
ctggcggccgccctgctcctgctgcgtcgtgaggacccggggccgggggctggccccagcatggccgaaacagaagccctgtcgaagcttcgggaagacttcaggatgcagaataaatccgtctttattttgggcgccagcggagaaaccggcagagtgctcttaaaggaaatcctggagcagggcctgttttccaaagtcacgctcattggccggaggaagctcaccttcgacgaggaagcttataaaaatgtgaatcaagaagtggtggactttgaaaagttggatgactacgcctctgcctttcaaggtcatgatgttggattctgttgcctgggtaccaccagagggaaagctggggcggtaaggaaggcatatgctcttttccctttttgctggccagtaatatcaaggattcttttcttgctcactctttttctttgtgcctgttgcaatgcttaaatgtgaataagcctttattgtttaagattctatatgctgcactaacctttggtatccttttaatagtactgataagttcgtctttcaaagtaatccttgagttcaggccccagtgctggagacgtcgtaaata

SEQ ID NO: 39194 - DNA, 402 bp, Artificial Sequence
  derived and/or modified sequence
atggccgagacagaggccctgagcaagctgcgggaggacttcaggatgcagaacaagagcgtcttcatcctgggcgccagcggggagaccggccgggtgctgctgaaggagatcctggagcagggcctcttcagcaaggtgaccctcatcggccgcaggaagctgacctttgatgaggaggcctacaagaatgtgaaccaggaggtggtggactttgagaagctggatgattatgccagcgccttccagggccatgatgtgggcttctgctgcctgggcaccacccggggcaaggccggggctgtgaggaaggcctatgccctcttccccttctgctggcctgtgatcagccgcatcctcttcctgctgaccctcttcctgtgtgcctgctgcaatgcctag

SEQ ID NO: 39195 - DNA, 402 bp, Artificial Sequence
  derived and/or modified sequence
atggccgagaccgaggccctgagcaagctgcgggaggacttccggatgcagaacaagtccgtgtttatcctcggcgcttcaggcgagaccggacgggtcctactcaaggagatcctggagcaaggccttttcagcaaggttaccttgattgggcgccgcaagttgacctttgacgaagaagcctacaagaacgtaaatcaggaagtcgtggacttcgaaaaactggacgactacgcttccgcctttcagggccacgacgtcgggttctgctgcctaggtaccactcggggtaaggcaggtgcggtgagaaaggcctatgccttattccccttctgttggccggtgatttccagaattctgtttctgctgacgttattcctttgtgcatgctgtaacgcctag

SEQ ID NO: 39196 - DNA, 402 bp, Artificial Sequence
  derived and/or modified sequence
atggccgagaccgaggccctgagcaagctgcgggaggacttccggatgcagaacaagtccgtttttattttaggagcgtcaggtgagactggacgcgttttgcttaaggagatcctggagcagggactcttttctaaggtgactttaatcggacgacgaaaactgacctttgatgaagaggcgtacaagaatgttaatcaggaagttgtagatttcgagaagctcgatgactacgcgagcgctttccagggccacgacgttggattctgttgcctagggacaacccgcggcaaagctggcgcagttcgcaaagcctacgccctcttccccttctgctggccagtgatttctcggatcctctttctgttaacattatttctatgtgcctgctgtaatgcgtag

SEQ ID NO: 39197 - DNA, 402 bp, Artificial Sequence
  derived and/or modified sequence
atggccgagaccgaggccctgagcaagctgcgggaggacttccggatgcagaacaagtcagtctttattttaggtgcttcaggcgagactggtagagtgctcctcaaggagatcctggaacaagggctgttctcaaaagtaactctgataggaagacggaaactgacattcgatgaagaggcatacaagaacgtcaaccaggaggtggttgatttcgagaagctggacgactatgcaagcgcgttccagggccacgacgtgggattttgctgcttgggaactacacggggcaaagcaggggccgtgcggaaggcatacgccctattccccttctgctggccagtaatatcccggatcttattcctgcttactttgttcctttgcgcctgttgtaacgcttag

SEQ ID NO: 39198 - DNA, 402 bp, Artificial Sequence
  derived and/or modified sequence
atggccgaaactgaggcattgtccaaactcagggaggattttaggatgcaaaataagtccgtgtttatcttgggcgcatctggggaaactggacgagtactgctgaaggaaatcctggaacaggggctgttcagcaaagtcactcttattggtcgcagaaaactgacctttgacgaggaagcctataagaacgtgaatcaggaagttgttgacttcgagaaactggacgactacgcctcagccttccaggggcatgacgtgggattttgttgtcttggtaccactcgcggaaaagctggagccgttcggaaggcgtatgccctctttcccttctgctggcctgttatttctaggattctgtttctcctgacactgtttctgtgcgcctgctgcaacgcgtag

SEQ ID NO: 39199 - DNA, 402 bp, Artificial Sequence
  derived and/or modified sequence
atggcggagaccgaggctctgtccaagttgcgggaagatttcagaatgcagaataaatcagtcttcatcctgggtgccagtggggaaacagggagggtgctgctgaaagagatcctggaacaagggctgttttccaaagtaacactgatcggcagacgcaagctgactttcgatgaagaagcctataaaaatgtgaaccaagaggtggtggattttgagaagctggacgactacgccagcgctttccagggacacgatgttggcttttgctgcttgggtaccacccgaggcaaagccggagctgtgaggaaagcatacgcccttttccctttctgctggcctgtcatctcccggattctttttctcttaaccctttttctctgcgcctgctgtaatgcatag

SEQ ID NO: 39200 - DNA, 402 bp, Artificial Sequence
  derived and/or modified sequence
atggccgaaaccgaggcgttgtctaaattgcgggaggatttcagaatgcagaataagtccgtgtttattctgggcgcttccggcgaaacgggcagggtgctgctgaaagaaattctggagcagggcctcttctcaaaagtaacgctgattgggagacggaagttaacttttgatgaagaagcctataagaatgttaatcaggaagttgttgacttcgaaaaacttgacgattacgcgtctgcctttcaaggccacgacgtgggtttttgctgtctgggcactaccagagggaaagcaggcgctgtccgaaaggcttatgctttgttccctttctgttggcccgtgatttcccgtatactttttctgttgaccctgttcttatgcgcctgttgtaatgcctag

SEQ ID NO: 39201 - protein, 683 aa, Artificial Sequence
  derived and/or modified sequence
MSTPAVPQDLQLPPSQRAQSAFKEQRRQKLKEHLLRRKTLFAYKQENEMLSSSRDQRVVTSEDQVQEGTKVLKLKTKMADKENMKRPAESKNNTVVGKHCIPLKPSNELTNSTVVIDTHKPKDSNQTPHLLLTEDDPQSQHMTLSQAFHLKNNSKKKQMTTEKQKQDANMPKKPVLGSYRGQIVQSKINSFRKPLQVKDESSAATKKLSATIPKATKPQPVNTSSVTVKSNRSSNMTATTKFVSTTSQNTQLVRPPIRSHHSNTRDTVKQGISRTSANVTIRKGPHEKELLQSKTALSSVKTSSSQGIIRNKTLSRSIASEVIARPASLSNDKLMEKSEPVDQRRHTAGKAIVDSRSAQPKETSEERKARLSEWKAGKGRVLKRPPNSVVTQHEPAGQNEKPVGSFWTTMAEEDEQRLFTEKVNNTFSECLNLINEGCPKEDILVTLNDLIKNIPDAKKLVKYWICLALIEPITSPIENIIAIYEKAILAGAQPIEEMRHTIVDILTMKSQEKANLGENMEKSCASKEEVKEVSIEDTGVDVDPEKLEMESKLHRNLLFQDCEKEQDNKTKDPTHDVKTPNTETRTSCLIKYNVSTTPYLQSVKKKVQFDGTNSAFKELKFLTPVRRSRRLQEKTSKLPDMLKDHYPCVSSLEQLTELGRETDAFVCRPNAALCRVYYEADTT

SEQ ID NO: 39202 - protein, 495 aa, Artificial Sequence
  derived and/or modified sequence
MSTPAVPQDLQLPPSQRAQSAFKEQRRQKLKEHLLRRKTLFAYKQENEMLSSSRDQRVVTSEDQVQEGTKVLKLKTKMADKENMKRPAESKNNTVVGKHCIPLKPSNELTNSTVVIDTHKPKDSNQTPHLLLTEDDPQSQHMTLSQAFHLKNNSKKKQMTTEKQKQDANMPKKPVLGSYRGQIVQSKINSFRKPLQVKDESSAATKKLSATIPKATKPQPVNTSSVTVKSNRSSNMTATTKFVSTTSQNTQLVRPPIRSHHSNTRDTVKQGISRTSANVTIRKGPHEKELLQSKTALSSVKTSSSQGIIRNKTLSRSIASEVIARPASLSNDKLMEKSEPVDQRRHTAGKAIVDSRSAQPKETSEERKARLSEWKAGKGRVLKRPPNSVVTQHEPAGQNEKPVGSFWTTMAEEDEQRLFTEKVNNTFSECLNLINEGCPKEDILVTLNDLIKNIPDAKKLVKYWICLALIEPITSPIENIIAIYEKAILAGAQHI

SEQ ID NO: 39203 - DNA, 2052 bp, Artificial Sequence
  derived and/or modified sequence
atgtctacaccggccgttccccaggatcttcaactccctccttctcagagggctcaatcagcttttaaagagcagaggcggcagaagctcaaggaacacttgctgagaagaaaaaccctgtttgcgtataaacaggagaacgagatgctttctagtagccgtgatcagagggttgtgaccagtgaggaccaggtccaggaaggcactaaagtgctaaaattgaagaccaaaatggcagacaaagagaacatgaagcgccccgcggaaagcaaaaataacactgtcgtcggaaagcactgcattcctttgaagccctctaatgagcttaccaattccaccgtggtgattgatacacacaaacccaaagactcaaatcagacaccccaccttctgctcactgaagatgacccacagtcacagcatatgaccctgagccaagcatttcatctgaagaataacagcaagaaaaaacagatgactactgaaaaacagaagcaggatgctaacatgcccaaaaagcccgtgctgggttcttatcgtggacaaattgtgcaaagcaagattaatagcttccggaaacctctgcaggtgaaagacgaatcatccgctgccaccaagaaactcagtgccacaatccctaaagccacgaaaccacagccagttaacacatcttctgtgaccgtgaagtccaatcgatcatcaaacatgaccgccaccacaaaattcgtgagcacaacatctcagaacacccagctggtgcggcctcccatcagaagccaccattccaatacccgtgatacagtgaaacagggcatctcacgcacctcggccaacgtgactatccgtaagggaccccatgagaaggagcttttacagtccaagaccgccctttccagcgtgaaaaccagcagcagccagggcattattcggaataagactctgtctcgatccatcgccagcgaagttattgcgagaccagcttctttgagcaacgacaagttgatggagaagtctgaaccggtagatcagagacggcataccgccgggaaggctatcgtcgatagcagatccgcccagcccaaggagactagtgaggaaaggaaggcaaggctctccgaatggaaggccggaaagggaagggtcttaaaaagaccgcctaacagcgtggtgacacagcatgagcccgcaggacagaatgaaaagcctgttggctctttctggactaccatggcagaggaggacgaacaacgtctcttcacagagaaggtgaataacacatttagcgaatgcttgaaccttatcaacgagggatgtcctaaggaagacattctcgtgaccctgaacgatcttatcaagaatattcccgatgccaaaaaactcgtgaagtattggatttgcctggcgttgattgagcctatcacttcaccaattgagaacattatcgcaatttatgagaaggccattctcgcaggtgcccagcccatagaggaaatgagacacaccatcgttgatatccttacaatgaaatcgcaagaaaaagctaacctgggagaaaacatggaaaagtcgtgcgcatctaaagaggaagttaaagaagtcagcatcgaagacacaggggtggatgtcgatcctgagaagttagaaatggagtctaaattgcatcgcaacctgttgttccaggactgcgagaaagaacaggataacaaaacgaaagaccccactcacgatgttaaaacaccaaacaccgaaacaaggacatcttgcctaatcaaatataatgttagcaccacaccctacctgcagtcagttaaaaaaaaagtgcagtttgacggcaccaactccgcctttaaggagcttaagtttctgacccctgtgcgccgctctcgccggctgcaggaaaagaccagtaagctccctgacatgttgaaggaccactacccttgcgtgtcatcattagaacagctgaccgagctgggtcgcgagacagatgccttcgtctgtagacctaacgccgccctgtgtcgggtgtattacgaagcggataccacctag

SEQ ID NO: 39204 - DNA, 1488 bp, Artificial Sequence
  derived and/or modified sequence
atgtcaactccagcagtcccgcaagacctacagctcccgccctcacagcgggctcagtccgccttcaaagagcagagaagacagaagctgaaggagcatctgcttagacgtaaaaccctgttcgcatataagcaggaaaacgaaatgctgtcctctagtcgggatcaacgggttgtcacctctgaggatcaggttcaggaaggcactaaggtgctcaagctaaagacaaaaatggcagataaggaaaatatgaagcgtcccgccgaatcaaaaaacaatacagtggtaggcaaacactgtatcccgctgaagccttcgaatgaactgaccaacagtaccgttgtgattgatactcacaaaccaaaggattcaaatcagaccccccacctgcttcttaccgaagatgaccctcagtctcagcatatgactctgtcacaagcctttcatttgaaaaacaattcgaagaaaaaacagatgaccacagagaagcaaaaacaggatgccaacatgccaaagaagcctgtgctggggagttaccgaggtcagatcgtccagtcaaagatcaatagcttcagaaagcccctgcaggtcaaagatgagagttccgctgctaccaagaaactgtctgctacgattcctaaggctactaagccgcaacctgtgaacactagctcagtgaccgtgaaatcaaaccggtcatccaatatgaccgcaaccacaaaattcgtgagtactacttctcagaacacacagcttgtgcgccctcccatccgttcccatcactccaacacccgggacaccgtgaagcaaggtatctcacgcacaagtgccaatgtcactatacgcaagggccctcacgaaaaggaactccttcagagtaagaccgccctctccagtgttaagaccagttccagccaagggattattcgtaacaagacgcttagtcggtcaattgcatccgaagttatcgcacggccggccagccttagcaatgataagctgatggagaagtccgagccagtggatcagcgtcgacatacagctggtaaagctatcgtggactcccgttccgcccagcccaaagaaacgagcgaagagcgcaaagccagactgtctgaatggaaggctggaaaggggcgtgtgctaaagagacccccaaactccgtggtgacccaacacgagcctgcaggacagaatgaaaagcctgtcgggtccttttggactacaatggctgaggaagatgaacagagactgtttacggaaaaagtaaacaataccttttcggagtgcctgaatctaattaatgagggctgtccaaaagaagatatcctcgtcacactcaacgatctgatcaaaaacatccctgacgcaaaaaagctggtgaaatactggatctgcctagcactgatcgagcccatcaccagcccaatcgaaaatatcatcgccatttatgaaaaggccatcctggcaggcgcgcagcacatatag

SEQ ID NO: 39205 - DNA, 2052 bp, Artificial Sequence
  derived and/or modified sequence
atgagcaccccagctgtgccccaggacctgcagctgccccccagccagagggcccagagcgccttcaaggagcagaggcggcagaagctgaaggagcacctgctgcggaggaagaccctgtttgcctacaagcaggagaatgagatgctgagcagcagccgggaccagagggtggtgaccagcgaggaccaggtgcaggagggcaccaaggtgctgaagctgaagaccaagatggctgacaaggagaacatgaagaggcctgctgagagcaagaacaacacagtggtgggcaagcactgcatccccctgaagcccagcaatgagctgaccaacagcacagtggtgattgacacccacaagcccaaggacagcaaccagaccccccacctgctgctgacagaagatgacccccagagccagcacatgaccctgagccaggccttccacctgaagaacaacagcaagaagaagcagatgaccacagagaagcagaagcaggatgccaacatgcccaagaagcctgtgctgggcagctaccggggccagatcgtgcagagcaagatcaacagcttcaggaagcccctgcaggtgaaggatgagagcagcgctgccaccaagaagctgagcgccaccatccccaaggccaccaagccccagcctgtgaacaccagctctgtgacagtgaagagcaacagaagcagcaacatgacagccaccaccaagtttgtgtccaccaccagccagaacacccagctggtgcggccccccatccgcagccaccacagcaacacccgggacacagtgaagcagggcatcagcaggaccagcgccaacgtgaccatcaggaagggcccccatgagaaggagctgctgcagagcaagacagccctgagctctgtgaagaccagcagcagccagggcatcatccggaacaagaccctgagccgcagcatcgccagcgaggtgattgcccggcctgccagcctgagcaatgacaagctgatggagaagtctgagcctgtggaccagaggaggcacacagctgggaaggccatcgtggacagccgcagcgcccagcccaaggagaccagcgaggagaggaaggcccggctgtctgagtggaaggccggcaagggccgggtgctgaagaggcctcccaacagcgtggtgacccagcacgagcccgccggccagaatgagaagcctgtgggcagcttctggaccaccatggccgaggaggatgagcagaggctcttcacagagaaggtgaacaacaccttctctgaatgtctgaacctgatcaatgaaggctgccccaaggaggacatcctggtgaccctgaatgacctgatcaagaacatcccagatgccaagaagctggtgaagtactggatctgcctggccctgattgagcccatcaccagccccatcgagaacatcatcgccatctatgagaaggccatcctggccggggcccagcccatcgaggagatgaggcacaccatcgtggacatcctgaccatgaagagccaggagaaggccaacctgggggagaacatggagaagagctgtgccagcaaggaggaggtgaaggaggtgtccattgaggacaccggggtggatgtggaccctgagaagctggagatggagagcaagctgcacaggaacctgctcttccaggactgtgagaaggagcaggacaacaagaccaaggaccccacccatgatgtgaagacccccaacacagagaccaggaccagctgcctgatcaagtacaacgtgtccaccaccccctacctgcagagcgtgaagaagaaggtgcagtttgatggcaccaacagcgccttcaaggagctgaagttcctgacccctgtgcggcgcagccggcggctgcaggagaagaccagcaagctgcctgacatgctgaaggaccactacccctgtgtgagcagcctggagcagctgacagagctgggccgggagacagatgcctttgtgtgccggcccaatgctgccctgtgccgggtgtactatgaggccgacaccacctag

SEQ ID NO: 39206 - DNA, 1488 bp, Artificial Sequence
  derived and/or modified sequence
atgagcaccccagctgtgccccaggacctgcagctgccccccagccagagggcccagagcgccttcaaggagcagaggcggcagaagctgaaggagcacctgctgcggaggaagaccctgtttgcctacaagcaggagaatgagatgctgagcagcagccgggaccagagggtggtgaccagcgaggaccaggtgcaggagggcaccaaggtgctgaagctgaagaccaagatggctgacaaggagaacatgaagaggcctgctgagagcaagaacaacacagtggtgggcaagcactgcatccccctgaagcccagcaatgagctgaccaacagcacagtggtgattgacacccacaagcccaaggacagcaaccagaccccccacctgctgctgacagaagatgacccccagagccagcacatgaccctgagccaggccttccacctgaagaacaacagcaagaagaagcagatgaccacagagaagcagaagcaggatgccaacatgcccaagaagcctgtgctgggcagctaccggggccagatcgtgcagagcaagatcaacagcttcaggaagcccctgcaggtgaaggatgagagcagcgctgccaccaagaagctgagcgccaccatccccaaggccaccaagccccagcctgtgaacaccagctctgtgacagtgaagagcaacagaagcagcaacatgacagccaccaccaagtttgtgtccaccaccagccagaacacccagctggtgcggccccccatccgcagccaccacagcaacacccgggacacagtgaagcagggcatcagcaggaccagcgccaacgtgaccatcaggaagggcccccatgagaaggagctgctgcagagcaagacagccctgagctctgtgaagaccagcagcagccagggcatcatccggaacaagaccctgagccgcagcatcgccagcgaggtgattgcccggcctgccagcctgagcaatgacaagctgatggagaagtctgagcctgtggaccagaggaggcacacagctgggaaggccatcgtggacagccgcagcgcccagcccaaggagaccagcgaggagaggaaggcccggctgtctgagtggaaggccggcaagggccgggtgctgaagaggcctcccaacagcgtggtgacccagcacgagcccgccggccagaatgagaagcctgtgggcagcttctggaccaccatggccgaggaggatgagcagaggctcttcacagagaaggtgaacaacaccttctctgaatgtctgaacctgatcaatgaaggctgccccaaggaggacatcctggtgaccctgaatgacctgatcaagaacatcccagatgccaagaagctggtgaagtactggatctgcctggccctgattgagcccatcaccagccccatcgagaacatcatcgccatctatgagaaggccatcctggccggggcccagcacatctag

SEQ ID NO: 39207 - DNA, 2052 bp, Artificial Sequence
  derived and/or modified sequence
atgagcacccccgccgtgccccaggacctgcagctgccccccagccagcgagctcagtctgcattcaaagaacaacggcggcagaaacttaaggagcaccttctcaggcgcaaaactctcttcgcatataagcaagaaaacgaaatgctgtcatcttccagagaccagagggtggtgactagcgaggaccaagtgcaggagggaaccaaagtgctgaagttaaaaaccaaaatggccgataaagaaaacatgaaacgtccggctgagtcaaagaacaatacggttgtaggaaagcactgtattcctctcaagcccagtaacgaactgaccaatagtaccgtggtaattgacacccacaaaccgaaagactctaatcaaacaccgcatctgctgttaacagaggacgacccacagtcacaacacatgacactgtcccaggcatttcatctgaagaataacagcaaaaagaaacagatgactactgaaaaacagaagcaggacgccaacatgcctaaaaagccggtgcttggaagttaccgcgggcaaattgtccagtctaaaattaacagcttccggaaaccactgcaagtgaaggatgaatcttcagctgcaaccaaaaaactgtccgccacaattccaaaggccaccaagcctcagcctgtgaacacgtcctcagtcaccgtcaaatctaacagatccagcaatatgacagcaaccacaaagtttgtttcgactacctctcagaacacacagctcgtgcgtccaccaattcgatctcaccactcaaacactagggacactgtgaaacagggaatctcccgtacatccgcaaacgtcacaattagaaagggccctcacgaaaaggagctgctgcaaagcaaaactgccctgtctagcgtcaagaccagcagtagccaagggataataagaaataagacgctgtcgcggtctatagctagcgaagtgatcgctcggcctgccagcctgtcaaacgacaagttgatggagaaaagcgaacctgtggaccagcggcggcacactgcaggcaaggccatcgtcgactcaaggagcgcccagcccaaagagacatctgaggaaagaaaagcaagactctctgagtggaaagccggcaaaggaagagtgctcaagcgccccccgaattcggttgttactcaacatgaacctgctggtcagaatgagaagcccgtcgggtcattctggacgacaatggccgaagaagacgaacagagactgttcacggagaaggttaataatacctttagtgagtgcctgaacctcatcaacgaaggctgtcctaaagaagacatcctcgtgaccctgaatgatttgatcaaaaacataccagatgccaagaagcttgtgaagtattggatttgcctcgcccttatagaacctatcacaagtcctatcgagaacatcatcgccatatacgaaaaggccattttggccggcgctcagccaattgaggagatgagacatacaatcgtggatatcctgaccatgaaatcacaggaaaaagcaaacctcggagaaaacatggagaaatcgtgcgcttcaaaagaagaagtaaaagaagtctcgatcgaggacaccggcgtggacgtggacccggagaagctggaaatggagagtaagctgcatagaaacctgctatttcaagattgtgagaaggagcaggacaataaaactaaagacccaacacacgacgtgaagacacctaacactgaaaccaggactagttgcctaatcaagtacaacgtttccactaccccgtatctccagtctgtgaaaaagaaagtgcagttcgacgggacaaattcggctttcaaagaacttaaatttctgacaccagttcgcaggtcaaggcgccttcaggagaaaacttccaagctgccagacatgcttaaggatcactacccatgcgtcagctctcttgagcagctcactgagctgggccgtgaaaccgacgcttttgtctgcagacccaacgctgcgttatgtcgtgtgtattacgaggcagataccacttag

SEQ ID NO: 39208 - DNA, 1488 bp, Artificial Sequence
  derived and/or modified sequence
atgagcacccccgccgtgccccaggacctgcagctgccccccagccagcgcgcccagagtgcattcaaagagcaaagaagacagaaattgaaggaacatctgctgaggaggaagacgctcttcgcctataaacaagagaatgagatgttgagcagctctcgggatcagagagttgttactagtgaggatcaggtgcaggaaggtacgaaggttttgaagttgaagactaagatggccgacaaggaaaatatgaaaaggccggcggagagcaaaaacaacacggttgtgggaaaacattgtatccctttaaagcctagtaatgaactcaccaatagcaccgtggtgattgacacccacaagccaaaagattccaatcaaacccctcatctgttactgactgaggacgaccctcagtctcagcacatgacactgagtcaggccttccatctgaagaataattcaaagaagaaacaaatgaccacagaaaagcaaaagcaggatgctaatatgccgaagaaacccgtgctgggctcctatcgcggtcaaatagtgcaatctaaaataaactcttttcggaagcccctccaagttaaggacgagtcatcagccgcaacaaagaaactttctgccacaatccctaaggcgactaaaccccagccagtgaacacatcctctgtgacagtgaaatcaaatcgatcttccaatatgactgctaccaccaaatttgttagcaccacttcgcaaaacacacagcttgttagacccccgattcgcagtcatcatagcaacactcgggatactgtcaagcagggcatcagccggacaagcgcaaatgttaccatccggaagggccctcacgagaaggaactccttcagtctaagacggccctgagctcggtgaagacatcatctagccagggtatcattcggaataaaactctctcaaggagtattgctagcgaggtaatagcccgccccgctagcctgtccaacgacaagcttatggaaaaaagcgaaccagtggaccaacgcaggcacacggcggggaaagctattgtcgattcacgcagtgcacagccaaaagagacctcagaagagcggaaggccagactctccgagtggaaggcaggtaagggccgagtcctaaagagaccaccaaacagtgttgtgactcagcacgaaccggccggacaaaatgagaagcccgtcggatccttttggaccaccatggctgaggaggacgagcagaggctgttcactgagaaggtgaacaacaccttctctgaatgtttaaatcttatcaatgagggctgtcctaaggaggatattttagtcaccctaaacgacctcattaaaaacatccctgacgccaaaaaactggtcaaatactggatctgcctcgcgctcatagaaccaatcacttccccaatcgagaacattatcgcaatttacgagaaggcaatactggctggggcccagcacatctag

SEQ ID NO: 39209 - DNA, 2052 bp, Artificial Sequence
  derived and/or modified sequence
atgagcacgccagcggttccacaggaccttcaactccccccatcacagcgcgcacaatctgcttttaaagagcagcggagacaaaagctgaaggaacatctgctgaggaggaaaacgcttttcgcgtacaagcaggaaaatgagatgttgagctcttcccgagaccagagggtcgtgacctctgaggaccaggttcaggaaggaaccaaggtgctgaaacttaaaaccaaaatggctgacaaagaaaacatgaagaggccggcagaatcaaagaacaacaccgtcgtcggaaagcactgcattccacttaaaccatccaatgaactcactaactctactgtagttatcgacactcataagccaaaggattccaaccaaactcctcacttgttgttgaccgaggacgaccctcaatcccaacatatgaccctctcccaggcatttcaccttaagaacaactccaaaaagaagcagatgacgaccgaaaagcaaaagcaggatgcaaacatgccaaagaaaccagtgctaggatcatacagaggccaaattgtgcagagtaagatcaactcctttcggaagccgctgcaggttaaggacgaatccagtgcagcaacaaagaaactgagtgcaaccattccaaaggctacgaagccacaaccagtgaacaccagctccgtaaccgtcaaaagcaataggtcatcaaacatgacagccactaccaagttcgttagtacaacaagtcaaaacacacagctcgtcaggcctccaattaggtcacaccactcaaacacacgggacaccgtaaagcaaggtattagcaggacgtccgcgaacgtcaccattcggaagggccctcacgagaaagaactgctgcaatcaaagaccgcattaagttcagtgaagactagcagcagtcaggggataattaggaacaaaacactctcccgctctatcgcctcagaggtcatcgcgagaccagctagcctaagcaacgataagctgatggaaaagagtgaacccgtcgatcagcggcgacatacagcaggaaaagccatagttgacagcaggtctgcccagcctaaagaaacttctgaagaaaggaaggctagactctccgagtggaaagctggcaaaggacgggtgctgaagcgccctcctaattcagtagttacccagcatgagcctgcagggcagaatgagaaaccagttggaagcttttggaccacaatggccgaagaggacgaacagcgccttttcacagagaaggtcaacaatacattttctgagtgcttgaacctgataaacgagggatgcccaaaagaggatatcctggtgacccttaatgatttgattaaaaacatccccgatgcaaaaaaactggtgaagtactggatctgccttgctcttatcgaacccataacgagccccattgagaatattattgccatttacgaaaaagcgatcctggcaggagcccagccaatcgaagaaatgcgccacacaatagttgatatcttaacaatgaaatcacaagagaaggccaatctgggcgagaacatggaaaagagttgcgcttccaaagaggaagtgaaggaggtgtcaatcgaagacacaggtgtggatgttgatccagagaaactagagatggaatccaagctgcacagaaaccttctgttccaggattgtgagaaggagcaggacaacaaaactaaggaccctacacacgacgtcaagacccctaacacggagaccaggacatcctgcctgattaagtataatgtatctaccaccccatatctccagtcagtgaaaaaaaaagtccagttcgacggcacaaattctgcttttaaagagctgaaatttcttacacctgtcaggagaagccgaagattgcaggaaaaaacttcgaagctaccagatatgctcaaggaccactatccatgcgtgtcctcgctcgagcagcttactgaattagggcgtgagacggacgcatttgtgtgcagacccaatgctgccttgtgtagggtctactacgaggcagacactacgtag

SEQ ID NO: 39210 - DNA, 1488 bp, Artificial Sequence
  derived and/or modified sequence
atgtcaaccccagccgtgccgcaagaccttcagcttcccccttcccagcgagcacaaagtgcgttcaaggagcagcggaggcagaaactcaaagaacacctgcttagaagaaagaccctctttgcctacaaacaggaaaatgagatgctgagcagttccagggatcagcgtgtggtcacgtccgaggaccaagtccaggagggaaccaaagtccttaagctgaaaaccaagatggccgataaagaaaacatgaagcgacctgcagagtctaagaacaacaccgtggtgggtaaacactgtatccctctcaagccgtccaacgaactgactaattctacagtagtgattgatactcacaagcctaaggatagcaaccagaccccccacctgcttctgactgaggatgacccacagagccagcacatgactcttagtcaagcctttcatttgaagaataacagcaagaagaagcaaatgaccactgagaagcaaaagcaggacgccaacatgcctaaaaaacccgtgctcggcagctaccggggtcagatcgtacagtccaaaattaactcctttcgcaagcccttacaggtgaaagacgagtcttctgctgctaccaaaaaactctcagccacaattcctaaggctaccaagccacagcccgtaaatacctcctctgttacagttaagagcaatcgttccagcaacatgactgccacaacaaagtttgtctccacaaccagccagaacacccagctggtaaggccaccaattcggagccaccacagcaatacgagagataccgtcaaacaaggtatcagccgaactagcgcaaatgtcaccattaggaagggtccccacgagaaggagttactgcagtccaagactgcattatcatcagtaaagacatccagcagccagggcattatcagaaataagacactgagccgctccatcgcatctgaggttattgcacgcccagcttccttgtccaacgataagctgatggagaaatcagagcccgtggaccagagacgtcatacggcaggtaaagcaatcgttgattcccgcagtgctcagcctaaggaaaccagtgaggaaagaaaagccagactgtctgagtggaaagccggtaagggaagagtactcaagcgtccacccaatagcgtcgttacccagcatgagcctgccggtcagaacgaaaaacccgtcggctcattttggacgacaatggcagaagaagacgagcagcggctattcacggaaaaagttaataacacatttagtgagtgtctgaacctgattaatgaaggctgcccaaaagaggacatcctggtgaccctgaacgatctcatcaagaacatacccgacgcgaaaaagctggtcaaatactggatttgtctggcactcatcgagccaataacttctcccattgaaaatatcattgcaatctatgagaaagcaattctagctggcgctcagcatatctag

SEQ ID NO: 39211 - DNA, 3351 bp, Artificial Sequence
  derived and/or modified sequence
ttagccgcggtgcagactgcggcggcggtggtctgaggaagttctatcttggcgctaaagcggagacgcatcccccgacccgaggctacgatgagcacaccggccgtgccccaggacctgcagctgcccccgagtcagagggcgcagtccgcattcaaagagcaaagaagacaaaaactcaaggaacatctgttgagaagaaaaacgctttttgcatacaagcaggaaaatgagatgttatccagtagtagagatcagagagttgtgacatctgaggaccaagttcaagaagggactaaagtgctgaaacttaaaacaaaaatggctgataaagaaaacatgaagagacctgcagagagcaaaaataatacagtggtggggaaacattgtattcctttaaaaccttcaaatgaactaaccaattcaactgtagtaattgacacacataaacctaaggatagtaatcaaactccgcatttgttactaactgaagatgatccccaaagtcaacatatgacattaagccaggcatttcaccttaaaaacaatagtaaaaagaaacaaatgactacagaaaaacaaaagcaagatgctaacatgcccaagaaacctgtgcttggatcttatcgtggccagattgttcagtctaagattaattcatttagaaaacctctacaagtcaaagatgagagttctgcagcaacaaagaaactttcagccactatacctaaagccacaaaacctcagcctgtaaacaccagcagtgtaacagtgaaaagtaatagatcctccaatatgactgccactactaaatttgtgagcactacatctcagaacacacaacttgtgcgacctcctattagaagtcatcacagtaatacccgggacactgtgaaacaaggcatcagtagaacttctgccaatgttacaatccggaaagggcctcatgaaaaagaactattacaatcaaaaacagctttatctagtgtcaaaaccagttcttctcaaggtataataagaaataagactctatcaagatccatagcatctgaagttatagccaggcctgcttcattgtctaatgataaactgatggaaaagtcagagcccgttgaccagcgaagacatactgcaggaaaagcaattgttgatagtagatcagctcagcccaaagaaacctcggaagagagaaaagctcgtctgagtgagtggaaagctggcaaaggaagagtgctaaaaaggccccctaattcagtagttactcagcatgagcctgcaggacaaaatgaaaaaccagttgggtctttttggactaccatggcagaagaagatgaacaaagattatttactgaaaaagtaaacaacacattttctgaatgcctgaacttgattaatgagggatgtccaaaagaagatatactggtcacactgaatgacctgattaaaaatattccagatgccaaaaagcttgttaagtattggatatgtcttgcacttattgaaccaatcacaagtcctattgaaaatattattgcaatctatgagaaagccattctggcaggggctcagcctattgaagagatgcgacacacgattgtagatattctaacaatgaagagtcaagaaaaagctaatttaggagaaaatatggagaagtcttgtgcaagcaaggaagaagtcaaagaagtcagtattgaagatacaggtgttgatgtagatccagaaaaactggaaatggagagtaaacttcatagaaatttgctatttcaagattgtgaaaaagagcaagacaacaaaacaaaagatccaacccatgatgttaaaacccccaatacagaaacgaggacaagttgcttaattaaatataatgtgtctactacgccatacttgcaaagtgtgaaaaaaaaggtgcagtttgatggaacaaattccgcatttaaagagctgaagtttttaacaccagtgagacgttctcgacgtcttcaagagaaaacttctaaattgccagatatgttaaaagatcattatccttgtgtgtcttcattggaacagctaacggagttgggaagagaaactgatgcttttgtatgccgccctaatgcagcactgtgccgggtgtactatgaggctgatacaacataagagaaataaagctctgttagggaatggggtttttattatttgtggggtgttttgttttgagtagctttatattgctcttaggtctggagttggccatgtacctatgtatcctaagcattcacggcagtgagctcctttactaacattcatgttatggcaagagttgtcctctacattggaaagctaatcctaccttgtcagtttcaaccaactgagttttttctttaagaaaggtaaattttgtcagctagtttactatgttccttgaatataaacaggttataatactaccctgttcactttactaaatataagtacagtaatgatgcataattagaaaatgaggtattctaggtaaaatgtatgtttgccttgacatgtttttaaaagttatgatgtacctccctgcctttaaacagaatacttttttcttttttttggcctttctcagattagtcaaaaattctatagaatgactcacttcgaatactaagacacaggaggtttagcctgctttcttaccaaattcatgttacccagacttgtgttctcttgcgtcccttggactgcctgttgattgatggaaagtgtctgcactgacacttttcgtcagtagtctgtagtttcgtggcctcttttgattataactggggtcaccaagaaggtttacttaattaaataccgcatttctaagagaagatactttgtgtaagaaaagatgccacatttagtggtttaacttttgtaacttcacttgatagtttttaagcaattagaatggagttagggaaagaacatatcatactgaacaaatgtcattctagtttagatagcatttctaagataactgatactaatacttgttttcttccctataacataaaaaacttcactgttaagtcatgtcccttgaaacatgatagttacatacacagttttctctccacacataaataacaccactaaagttgttttgtaaggttccaaactaatatggcatatatcaactctacagtttcaaataaatgactttttaattgtaaaagattagttgaaaaactgtatgaatgtgaagatcacatgcttagtcatttttatgttcattccactttgtatatcttttctatttattgacttctcatgttctagagagtaggacttttattccgtgtacctgatatatatacaattaaaatatctgtgtaatta

SEQ ID NO: 39212 - DNA, 1682 bp, Artificial Sequence
  derived and/or modified sequence
accggccccggcaactgcagtccaggctccgcctccctacgcccattggcttattcaattcacgcaggaaccaatgggcggagacggcagccgcgccgtctgacggcttagccgcggtgcagactgcggcggcggtggtctgaggaagttctatcttggcgctaaagcggagacgcatcccccgacccgaggctacgatgagcacaccggccgtgccccaggacctgcagctgcccccgagtcagagggcgcagtccgcattcaaagagcaaagaagacaaaaactcaaggaacatctgttgagaagaaaaacgctttttgcatacaagcaggaaaatgagatgttatccagtagtagagatcagagagttgtgacatctgaggaccaagttcaagaagggactaaagtgctgaaacttaaaacaaaaatggctgataaagaaaacatgaagagacctgcagagagcaaaaataatacagtggtggggaaacattgtattcctttaaaaccttcaaatgaactaaccaattcaactgtagtaattgacacacataaacctaaggatagtaatcaaactccgcatttgttactaactgaagatgatccccaaagtcaacatatgacattaagccaggcatttcaccttaaaaacaatagtaaaaagaaacaaatgactacagaaaaacaaaagcaagatgctaacatgcccaagaaacctgtgcttggatcttatcgtggccagattgttcagtctaagattaattcatttagaaaacctctacaagtcaaagatgagagttctgcagcaacaaagaaactttcagccactatacctaaagccacaaaacctcagcctgtaaacaccagcagtgtaacagtgaaaagtaatagatcctccaatatgactgccactactaaatttgtgagcactacatctcagaacacacaacttgtgcgacctcctattagaagtcatcacagtaatacccgggacactgtgaaacaaggcatcagtagaacttctgccaatgttacaatccggaaagggcctcatgaaaaagaactattacaatcaaaaacagctttatctagtgtcaaaaccagttcttctcaaggtataataagaaataagactctatcaagatccatagcatctgaagttatagccaggcctgcttcattgtctaatgataaactgatggaaaagtcagagcccgttgaccagcgaagacatactgcaggaaaagcaattgttgatagtagatcagctcagcccaaagaaacctcggaagagagaaaagctcgtctgagtgagtggaaagctggcaaaggaagagtgctaaaaaggccccctaattcagtagttactcagcatgagcctgcaggacaaaatgaaaaaccagttgggtctttttggactaccatggcagaagaagatgaacaaagattatttactgaaaaagtaaacaacacattttctgaatgcctgaacttgattaatgagggatgtccaaaagaagatatactggtcacactgaatgacctgattaaaaatattccagatgccaaaaagcttgttaagtattggatatgtcttgcacttattgaaccaatcacaagtcctattgaaaatattattgcaatctatgagaaagccattctggcaggggctcagcatatt

SEQ ID NO: 39213 - DNA, 2052 bp, Artificial Sequence
  derived and/or modified sequence
atgagcacccccgccgtgccccaggacctgcagctgccccccagccagagagcccagagcgccttcaaggagcagagaagacagaagctgaaggagcacctgctgagaagaaagaccctgttcgcctacaagcaggagaacgagatgctgagcagcagcagagaccagagagtggtgaccagcgaggaccaggtgcaggagggcaccaaggtgctgaagctgaagaccaagatggccgacaaggagaacatgaagagacccgccgagagcaagaacaacaccgtggtgggcaagcactgcatccccctgaagcccagcaacgagctgaccaacagcaccgtggtgatcgacacccacaagcccaaggacagcaaccagaccccccacctgctgctgaccgaggacgacccccagagccagcacatgaccctgagccaggccttccacctgaagaacaacagcaagaagaagcagatgaccaccgagaagcagaagcaggacgccaacatgcccaagaagcccgtgctgggcagctacagaggccagatcgtgcagagcaagatcaacagcttcagaaagcccctgcaggtgaaggacgagagcagcgccgccaccaagaagctgagcgccaccatccccaaggccaccaagccccagcccgtgaacaccagcagcgtgaccgtgaagagcaacagaagcagcaacatgaccgccaccaccaagttcgtgagcaccaccagccagaacacccagctggtgagaccccccatcagaagccaccacagcaacaccagagacaccgtgaagcagggcatcagcagaaccagcgccaacgtgaccatcagaaagggcccccacgagaaggagctgctgcagagcaagaccgccctgagcagcgtgaagaccagcagcagccagggcatcatcagaaacaagaccctgagcagaagcatcgccagcgaggtgatcgccagacccgccagcctgagcaacgacaagctgatggagaagagcgagcccgtggaccagagaagacacaccgccggcaaggccatcgtggacagcagaagcgcccagcccaaggagaccagcgaggagagaaaggccagactgagcgagtggaaggccggcaagggcagagtgctgaagagaccccccaacagcgtggtgacccagcacgagcccgccggccagaacgagaagcccgtgggcagcttctggaccaccatggccgaggaggacgagcagagactgttcaccgagaaggtgaacaacaccttcagcgagtgcctgaacctgatcaacgagggctgccccaaggaggacatcctggtgaccctgaacgacctgatcaagaacatccccgacgccaagaagctggtgaagtactggatctgcctggccctgatcgagcccatcaccagccccatcgagaacatcatcgccatctacgagaaggccatcctggccggcgcccagcccatcgaggagatgagacacaccatcgtggacatcctgaccatgaagagccaggagaaggccaacctgggcgagaacatggagaagagctgcgccagcaaggaggaggtgaaggaggtgagcatcgaggacaccggcgtggacgtggaccccgagaagctggagatggagagcaagctgcacagaaacctgctgttccaggactgcgagaaggagcaggacaacaagaccaaggaccccacccacgacgtgaagacccccaacaccgagaccagaaccagctgcctgatcaagtacaacgtgagcaccaccccctacctgcagagcgtgaagaagaaggtgcagttcgacggcaccaacagcgccttcaaggagctgaagttcctgacccccgtgagaagaagcagaagactgcaggagaagaccagcaagctgcccgacatgctgaaggaccactacccctgcgtgagcagcctggagcagctgaccgagctgggcagagagaccgacgccttcgtgtgcagacccaacgccgccctgtgcagagtgtactacgaggccgacaccacctag

SEQ ID NO: 39214 - DNA, 1488 bp, Artificial Sequence
  derived and/or modified sequence
atgagcacccccgccgtgccccaggacctgcagctgccccccagccagagagcccagagcgccttcaaggagcagagaagacagaagctgaaggagcacctgctgagaagaaagaccctgttcgcctacaagcaggagaacgagatgctgagcagcagcagagaccagagagtggtgaccagcgaggaccaggtgcaggagggcaccaaggtgctgaagctgaagaccaagatggccgacaaggagaacatgaagagacccgccgagagcaagaacaacaccgtggtgggcaagcactgcatccccctgaagcccagcaacgagctgaccaacagcaccgtggtgatcgacacccacaagcccaaggacagcaaccagaccccccacctgctgctgaccgaggacgacccccagagccagcacatgaccctgagccaggccttccacctgaagaacaacagcaagaagaagcagatgaccaccgagaagcagaagcaggacgccaacatgcccaagaagcccgtgctgggcagctacagaggccagatcgtgcagagcaagatcaacagcttcagaaagcccctgcaggtgaaggacgagagcagcgccgccaccaagaagctgagcgccaccatccccaaggccaccaagccccagcccgtgaacaccagcagcgtgaccgtgaagagcaacagaagcagcaacatgaccgccaccaccaagttcgtgagcaccaccagccagaacacccagctggtgagaccccccatcagaagccaccacagcaacaccagagacaccgtgaagcagggcatcagcagaaccagcgccaacgtgaccatcagaaagggcccccacgagaaggagctgctgcagagcaagaccgccctgagcagcgtgaagaccagcagcagccagggcatcatcagaaacaagaccctgagcagaagcatcgccagcgaggtgatcgccagacccgccagcctgagcaacgacaagctgatggagaagagcgagcccgtggaccagagaagacacaccgccggcaaggccatcgtggacagcagaagcgcccagcccaaggagaccagcgaggagagaaaggccagactgagcgagtggaaggccggcaagggcagagtgctgaagagaccccccaacagcgtggtgacccagcacgagcccgccggccagaacgagaagcccgtgggcagcttctggaccaccatggccgaggaggacgagcagagactgttcaccgagaaggtgaacaacaccttcagcgagtgcctgaacctgatcaacgagggctgccccaaggaggacatcctggtgaccctgaacgacctgatcaagaacatccccgacgccaagaagctggtgaagtactggatctgcctggccctgatcgagcccatcaccagccccatcgagaacatcatcgccatctacgagaaggccatcctggccggcgcccagcacatctag

SEQ ID NO: 39215 - protein, 394 aa, Artificial Sequence
  derived and/or modified sequence
MFCPLKLILLPVLLDYSLGLNDLNVSPPELTVHVGDSALMGCVFQSTEDKCIFKIDWTLSPGEHAKDEYVLYYYSNLSVPIGRFQNRVHLMGDILCNDGSLLLQDVQEADQGTYICEIRLKGESQVFKKAVVLHVLPEEPKELMVHVGGLIQMGCVFQSTEVKHVTKVEWIFSGRRAKEEIVFRYYHKLRMSVEYSQSWGHFQNRVNLVGDIFRNDGSIMLQGVRESDGGNYTCSIHLGNLVFKKTIVLHVSPEEPRTLVTPAALRPLVLGGNQLVIIVGIVCATILLLPVLILIVKKTCGNKSSVNSTVLVKNTKKTNPEIKEKPCHFERCEGEKHIYSPIIVREVIEEEEPSEKSEATYMTMHPVWPSLRSDRNNSLEKKSGGGMPKTQQAF

SEQ ID NO: 39216 - DNA, 1185 bp, Artificial Sequence
  derived and/or modified sequence
atgttttgccccctgaaactcattctgctcccagtgctgctggactatagcctcggactcaacgacctgaatgtcagcccacccgaactgactgtacacgtcggagatagcgcactaatgggctgtgtcttccaatctactgaagataaatgtatattcaagattgactggactttgagtccgggtgagcacgcaaaagacgaatacgtgctatattactatagcaacctgtcggttcccatcggtaggttccagaaccgagtccatctcatgggtgatatcctctgtaatgacggatctctcctactgcaagatgtgcaagaggccgatcagggaacctacatctgcgagattaggctgaagggagagtctcaggtctttaaaaaggcagtggtactccacgtcttgccagaggagccaaaagagttaatggtccacgtgggagggcttattcagatgggatgcgtttttcagagcactgaagtaaagcatgtgacaaaagtggaatggatattttctgggcggagggcaaaggaagagattgtcttccgttactatcacaagttgagaatgtctgtcgagtactctcagagctggggccatttccaaaacagagttaacttagtgggggacatctttagaaatgatggttctattatgttgcagggcgtgcgggaatccgatggagggaactacacgtgctccatacacttgggcaatctagtgtttaaaaagacaatcgtcctgcatgtcagtcccgaagagccacggacgttagtgacccctgctgcccttaggcctctcgtcttgggtggcaatcagctagtcattattgtgggtatcgtgtgtgccacgatcctgctcctgcccgtcctgattctcatcgtcaaaaaaacttgtggaaacaagtcaagtgtgaatagcacagtgctggtgaaaaataccaagaagacgaacccagagattaaggaaaaaccctgccattttgaacgctgcgaaggggaaaaacatatttactctcccataatagtgagggaggtgattgaagaggaggaacctagcgaaaagtccgaagccacctacatgacgatgcaccccgtgtggccatcccttagaagcgaccggaacaactcgttggaaaaaaagagtggaggtgggatgcccaagactcaacaggccttttag

SEQ ID NO: 39217 - DNA, 1944 bp, Artificial Sequence
  derived and/or modified sequence
ctgtttgcatctctgcaaccacttcagaaggcacgtgtttggtttgctctgagcctaacctagagtgctcgcagcagtctttcagttgagcttggggactgcagctgtggggagatttcagtgcattgcctcccctgggtgctcttcatcttggatttgaaagttgagagcagcatgttttgcccactgaaactcatcctgctgccagtgttactggattattccttgggcctgaatgacttgaatgtttccccgcctgagctaacagtccatgtgggtgattcagctctgatgggatgtgttttccagagcacagaagacaaatgtatattcaagatagactggactctgtcaccaggagagcacgccaaggacgaatatgtgctatactattactccaatctcagtgtgcctattgggcgcttccagaaccgcgtacacttgatgggggacatcttatgcaatgatggctctctcctgctccaagatgtgcaagaggctgaccagggaacctatatctgtgaaatccgcctcaaaggggagagccaggtgttcaagaaggcggtggtactgcatgtgcttccagaggagcccaaagagctcatggtccatgtgggtggattgattcagatgggatgtgttttccagagcacagaagtgaaacacgtgaccaaggtagaatggatattttcaggacggcgcgcaaaggaggagattgtatttcgttactaccacaaactcaggatgtctgtggagtactcccagagctggggccacttccagaatcgtgtgaacctggtgggggacattttccgcaatgacggttccatcatgcttcaaggagtgagggagtcagatggaggaaactacacctgcagtatccacctagggaacctggtgttcaagaaaaccattgtgctgcatgtcagcccggaagagcctcgaacactggtgaccccggcagccctgaggcctctggtcttgggtggtaatcagttggtgatcattgtgggaattgtctgtgccacaatcctgctgctccctgttctgatattgatcgtgaagaagacctgtggaaataagagttcagtgaattctacagtcttggtgaagaacacgaagaagactaatccagagataaaagaaaaaccctgccattttgaaagatgtgaaggggagaaacacatttactccccaataattgtacgggaggtgatcgaggaagaagaaccaagtgaaaaatcagaggccacctacatgaccatgcacccagtttggccttctctgaggtcagatcggaacaactcacttgaaaaaaagtcaggtgggggaatgccaaaaacacagcaagccttttgagaagaatggagagtcccttcatctcagcagcggtggagactctctcctgtgtgtgtcctgggccactctaccagtgatttcagactcccgctctcccagctgtcctcctgtctcattgtttggtcaatacactgaagatggagaatttggagcctggcagagagactggacagctctggaggaacaggcctgctgaggggaggggagcatggacttggcctctggagtgggacactggccctgggaaccaggctgagctgagtggcctcaaaccccccgttggatcagaccctcctgtgggcagggttcttagtggatgagttactgggaagaatcagagataaaaaccaacccaaatcattcctctggcacattatttctaaataagtgttgtttgtggaaatcgtcctatttttatgcctcggttgagggggcaagtaaagtcctggtgaggaatttacagttagaaacttttggaaaaactgaagttcctggaggaaagccaaaccgtgctaacacactagaggctggttttggtcctgggaaaggtttggggtgaatgggttggaagtagggtatgaatac

SEQ ID NO: 39218 - DNA, 1185 bp, Artificial Sequence
  derived and/or modified sequence
atgttctgccccctgaagctgatcctgctgcctgtgctgctggactacagcctgggcctgaatgacctgaatgtgtccccacctgagctgactgtgcacgtgggggacagcgccctgatgggctgtgtgttccagagcacagaggacaagtgcatcttcaagattgactggaccctgagccctggagagcacgccaaggatgaatatgtgctgtactactacagcaacctgtctgtgcccatcggccgcttccagaacagagtgcacctgatgggagacatcctgtgcaatgatggcagcctgctgctgcaggatgtgcaggaggccgaccagggcacctacatctgtgagatccggctgaagggggagagccaggtgttcaagaaggctgtggtgctgcacgtgctgcctgaggagcccaaggagctgatggtgcacgtgggcggcctcatccagatgggctgtgtgttccagagcacagaggtgaagcacgtgaccaaggtggagtggatcttctctggaagaagagccaaggaggagatcgtgttccgctactaccacaagctgaggatgtctgtggagtacagccagagctggggccacttccagaacagagtgaacctggtgggggacatcttcagaaatgatggcagcatcatgctgcagggcgtgcgggagagtgatggcggcaactacacctgcagcatccacctgggcaacctggtgttcaagaagaccatcgtgctgcacgtgtccccagaggagcccaggaccctggtgaccccagctgccctgcggcccctggtgctgggcggcaaccagctggtgatcatcgtgggcatcgtgtgtgccaccatcctgctgctgcctgtgctgatcctgattgtgaagaagacctgtggcaacaagagctctgtgaacagcacagtgctggtgaagaacaccaagaagaccaaccctgagatcaaggagaagccctgccactttgagcgctgtgagggggagaagcacatctacagccccatcatcgtgcgggaggtgattgaggaggaggagcccagcgagaagtctgaggccacctacatgaccatgcaccctgtgtggcccagcctgcggagtgacaggaacaacagcctggagaagaagagcggcggcggcatgcccaagacccagcaggccttctag

SEQ ID NO: 39219 - DNA, 1185 bp, Artificial Sequence
  derived and/or modified sequence
atgttctgccccctgaagctgatcctgctgcccgtgctgctggactattccttaggcctgaatgacttaaacgtgtctcccccggagctaactgtgcatgtaggcgactctgccctcatgggatgtgtttttcagtcaacagaagacaagtgcatttttaaaatagattggactctcagcccgggagaacacgcaaaggacgaatatgtactttattattattccaacctgtccgtgcctatcggacgtttccagaacagagtgcacttgatgggggatattttatgcaacgacgggtcacttctcttgcaggacgttcaggaggccgaccagggcacgtatatatgtgagatccgtctcaaaggcgagtctcaggtgtttaaaaaggccgtagtgctgcacgtgttgccggaggagcctaaggaacttatggttcacgtgggagggttgattcagatgggctgcgtctttcagagtactgaggtcaagcacgtcactaaggtggagtggatcttctcaggacgacgcgccaaagaagagatcgtatttaggtattaccacaagttgaggatgagtgtggagtactctcagagctggggtcactttcaaaatcgggtgaacctcgtcggggacattttccgcaacgatggcagcattatgctgcagggcgtaagggaatccgacggaggcaattacacctgtagcattcacctgggaaatttggtttttaaaaaaaccatagtcctgcatgttagccccgaggaaccccgtacactggtaactcctgccgcactcaggccactggtgctcggcggtaatcagttggtaatcatcgtgggtatcgtctgtgccaccattctgcttctgccggttctcatcctcatcgtaaagaagacctgtggaaacaaaagtagcgttaattcgactgtgctggtgaaaaacaccaaaaagacgaaccccgaaattaaggaaaaaccgtgccattttgagcgctgtgagggcgaaaagcacatctattcgccaatcatagtacgggaagtaattgaagaggaggagccaagtgagaaatccgaggctacttatatgactatgcatcctgtttggccttctctgaggtcagaccgtaacaatagtctggaaaagaaaagcgggggtggcatgccgaagactcagcaggctttttag

SEQ ID NO: 39220 - DNA, 1185 bp, Artificial Sequence
  derived and/or modified sequence
atgttttgccccctgaagctgatactgctgcctgtgctcctggactactcgttagggttaaatgatctcaatgtatccccaccagaattaaccgtccatgtgggcgactcagcactcatgggttgtgtttttcagtcaactgaagataagtgtattttcaagatcgactggaccctctcccccggagagcatgctaaagatgagtatgtgctttactattattcaaatctctccgtccctattggtcgatttcagaatcgggttcatttaatgggtgacatcctgtgcaacgatggtagcctgctcctacaggacgtgcaggaggcggaccaaggcacctatatctgtgagattaggctcaaaggtgagtctcaggtgttcaaaaaagctgtggttctacacgttttgccagaggagcctaaggaactcatggtccacgtaggtgggctgatccagatgggatgcgtgtttcagagcaccgaggtgaaacatgtcaccaaagtcgaatggatcttttctggcagaagggccaaggaagaaatagtgttcaggtactatcacaaattgcggatgagcgtggaatactcccagagttggggtcattttcagaatcgagtcaatctggtgggtgacatttttcggaacgacggcagcattatgctgcagggggtgcgggaatcggatggcggaaactacacttgttctatccacttgggcaatctcgtgttcaagaaaaccatcgtgctgcacgtaagccccgaagaacccaggaccctggtcacccctgctgcattgagaccgctggtgctaggaggcaatcagctggtgattatcgtcggtatcgtgtgcgctactatccttctattgcccgtactaattctgatcgttaagaaaacatgtggtaataaaagctccgttaactctacggtgctggtgaagaacactaaaaaaactaatccagaaatcaaagaaaagccatgtcatttcgagcgatgtgagggagagaagcacatctatagtccaattattgttcgtgaggtcatcgaggaggaggagccaagcgaaaagagcgaggcaacctatatgaccatgcatccagtttggccctcccttcgcagcgatagaaataactccctagagaaaaaaagcggaggtggtatgcctaaaacacagcaggctttttag

SEQ ID NO: 39221 - DNA, 1185 bp, Artificial Sequence
  derived and/or modified sequence
atgttctgccccctgaagctgatcctgctgcccgtgctgctggactacagcctgggcctgaacgacctgaacgtgagcccccccgagctgaccgtgcacgtgggcgacagcgccctgatgggctgcgtgttccagagcaccgaggacaagtgcatcttcaagatcgactggaccctgagccccggcgagcacgccaaggacgagtacgtgctgtactactacagcaacctgagcgtgcccatcggcagattccagaacagagtgcacctgatgggcgacatcctgtgcaacgacggcagcctgctgctgcaggacgtgcaggaggccgaccagggcacctacatctgcgagatcagactgaagggcgagagccaggtgttcaagaaggccgtggtgctgcacgtgctgcccgaggagcccaaggagctgatggtgcacgtgggcggcctgatccagatgggctgcgtgttccagagcaccgaggtgaagcacgtgaccaaggtggagtggatcttcagcggcagaagagccaaggaggagatcgtgttcagatactaccacaagctgagaatgagcgtggagtacagccagagctggggccacttccagaacagagtgaacctggtgggcgacatcttcagaaacgacggcagcatcatgctgcagggcgtgagagagagcgacggcggcaactacacctgcagcatccacctgggcaacctggtgttcaagaagaccatcgtgctgcacgtgagccccgaggagcccagaaccctggtgacccccgccgccctgagacccctggtgctgggcggcaaccagctggtgatcatcgtgggcatcgtgtgcgccaccatcctgctgctgcccgtgctgatcctgatcgtgaagaagacctgcggcaacaagagcagcgtgaacagcaccgtgctggtgaagaacaccaagaagaccaaccccgagatcaaggagaagccctgccacttcgagagatgcgagggcgagaagcacatctacagccccatcatcgtgagagaggtgatcgaggaggaggagcccagcgagaagagcgaggccacctacatgaccatgcaccccgtgtggcccagcctgagaagcgacagaaacaacagcctggagaagaagagcggcggcggcatgcccaagacccagcaggccttctag

SEQ ID NO: 39222 - protein, 923 aa, Artificial Sequence
  derived and/or modified sequence
MKVGWPGESCWQVGLAVEDSPALGAPRVGALPDVVPEGTLLNMVLRRMHRPRSCSYQLLLEHQRPSCIQGLRWTPLTNSEESLDFSESLEQASTERVLRAGRQLHRHLLATCPNLIRDRKYHLRLYRQCCSGRELVDGILALGLGVHSRSQVVGICQVLLDEGALCHVKHDWAFQDRDAQFYRFPGPEPEPVRTHEMEEELAEAVALLSQRGPDALLTVALRKPPGQRTDEELDLIFEELLHIKAVAHLSNSVKRELAAVLLFEPHSKAGTVLFSQGDKGTSWYIIWKGSVNVVTHGKGLVTTLHEGDDFGQLALVNDAPRAATIILREDNCHFLRVDKQDFNRIIKDVEAKTMRLEEHGKVVLVLERASQGAGPSRPPTPGRNRYTVMSGTPEKILELLLEAMGPDSSAHDPTETFLSDFLLTHRVFMPSAQLCAALLHHFHVEPAGGSEQERSTYVCNKRQQILRLVSQWVALYGSMLHTDPVATSFLQKLSDLVGRDTRLSNLLREQWPERRRCHRLENGCGNASPQMKARNLPVWLPNQDEPLPGSSCAIQVGDKVPYDICRPDHSVLTLQLPVTASVREVMAALAQEDGWTKGQVLVKVNSAGDAIGLQPDARGVATSLGLNERLFVVNPQEVHELIPHPDQLGPTVGSAEGLDLVSAKDLAGQLTDHDWSLFNSIHQVELIHYVLGPQHLRDVTTANLERFMRRFNELQYWVATELCLCPVPGPRAQLLRKFIKLAAHLKEQKNLNSFFAVMFGLSNSAISRLAHTWERLPHKVRKLYSALERLLDPSWNHRVYRLALAKLSPPVIPFMPLLLKDMTFIHEGNHTLVENLINFEKMRMMARAARMLHHCRSHNPVPLSPLRSRVSHLHEDSQVARISTCSEQSLSTRSPASTWAYVQQLKVIDNQRELSRLSRELEP

SEQ ID NO: 39223 - protein, 598 aa, Artificial Sequence
  derived and/or modified sequence
MKVGWPGESCWQVGLAVEDSPALGAPRVGALPDVVPEGTLLNMVLRRMHRPRSCSYQLLLEHQRPSCIQGLRWTPLTNSEESLDFSESLEQASTERVLRAGRQLHRHLLATCPNLIRDRKYHLRLYRQCCSGRELVDGILALGLGVHSRSQVVGICQVLLDEGALCHVKHDWAFQDRDAQFYRFPGPEPEPVRTHEMEEELAEAVALLSQRGPDALLTVALRKPPGQRTDEELDLIFEELLHIKAVAHLSNSVKRELAAVLLFEPHSKAGTVLFSQGDKGTSWYIIWKGSVNVVTHGKGLVTTLHEGDDFGQLALVNDAPRAATIILREDNCHFLRVDKQDFNRIIKDVEAKTMRLEEHGKVVLVLERASQGAGPSRPPTPGRNRYTVMSGTPEKILELLLEAMGPDSSAHDPTETFLSDFLLTHRVFMPSAQLCAALLHHFHVEPAGGSEQERSTYVCNKRQQILRLVSQWVALYGSMLHTDPVATSFLQKLSDLVGRDTRLSNLLREQWPERRRCHRLENGCGNASPQMKVSAWPQFLSSAPPGLQAPPSPPDPEGLCGRGKLSSHRHTLGSLIGVHGALAACGALGQAVPGGAEA

SEQ ID NO: 39224 - DNA, 2772 bp, Artificial Sequence
  derived and/or modified sequence
atgaaggtgggctggcccggcgagagctgctggcaggtgggcctggccgtggaggacagccccgccctgggcgcccccagagtgggcgccctgcccgacgtggtgcccgagggcaccctgctgaacatggtgctgagaagaatgcacagacccagaagctgcagctaccagctgctgctggagcaccagagacccagctgcatccagggcctgagatggacccccctgaccaacagcgaggagagcctggacttcagcgagagcctggagcaggccagcaccgagagagtgctgagagccggcagacagctgcacagacacctgctggccacctgccccaacctgatcagagacagaaagtaccacctgagactgtacagacagtgctgcagcggcagagagctggtggacggcatcctggccctgggcctgggcgtgcacagcagaagccaggtggtgggcatctgccaggtgctgctggacgagggcgccctgtgccacgtgaagcacgactgggccttccaggacagagacgcccagttctacagattccccggccccgagcccgagcccgtgagaacccacgagatggaggaggagctggccgaggccgtggccctgctgagccagagaggccccgacgccctgctgaccgtggccctgagaaagccccccggccagagaaccgacgaggagctggacctgatcttcgaggagctgctgcacatcaaggccgtggcccacctgagcaacagcgtgaagagagagctggccgccgtgctgctgttcgagccccacagcaaggccggcaccgtgctgttcagccagggcgacaagggcaccagctggtacatcatctggaagggcagcgtgaacgtggtgacccacggcaagggcctggtgaccaccctgcacgagggcgacgacttcggccagctggccctggtgaacgacgcccccagagccgccaccatcatcctgagagaggacaactgccacttcctgagagtggacaagcaggacttcaacagaatcatcaaggacgtggaggccaagaccatgagactggaggagcacggcaaggtggtgctggtgctggagagagccagccagggcgccggccccagcagaccccccacccccggcagaaacagatacaccgtgatgagcggcacccccgagaagatcctggagctgctgctggaggccatgggccccgacagcagcgcccacgaccccaccgagaccttcctgagcgacttcctgctgacccacagagtgttcatgcccagcgcccagctgtgcgccgccctgctgcaccacttccacgtggagcccgccggcggcagcgagcaggagagaagcacctacgtgtgcaacaagagacagcagatcctgagactggtgagccagtgggtggccctgtacggcagcatgctgcacaccgaccccgtggccaccagcttcctgcagaagctgagcgacctggtgggcagagacaccagactgagcaacctgctgagagagcagtggcccgagagaagaagatgccacagactggagaacggctgcggcaacgccagcccccagatgaaggccagaaacctgcccgtgtggctgcccaaccaggacgagcccctgcccggcagcagctgcgccatccaggtgggcgacaaggtgccctacgacatctgcagacccgaccacagcgtgctgaccctgcagctgcccgtgaccgccagcgtgagagaggtgatggccgccctggcccaggaggacggctggaccaagggccaggtgctggtgaaggtgaacagcgccggcgacgccatcggcctgcagcccgacgccagaggcgtggccaccagcctgggcctgaacgagagactgttcgtggtgaacccccaggaggtgcacgagctgatcccccaccccgaccagctgggccccaccgtgggcagcgccgagggcctggacctggtgagcgccaaggacctggccggccagctgaccgaccacgactggagcctgttcaacagcatccaccaggtggagctgatccactacgtgctgggcccccagcacctgagagacgtgaccaccgccaacctggagagattcatgagaagattcaacgagctgcagtactgggtggccaccgagctgtgcctgtgccccgtgcccggccccagagcccagctgctgagaaagttcatcaagctggccgcccacctgaaggagcagaagaacctgaacagcttcttcgccgtgatgttcggcctgagcaacagcgccatcagcagactggcccacacctgggagagactgccccacaaggtgagaaagctgtacagcgccctggagagactgctggaccccagctggaaccacagagtgtacagactggccctggccaagctgagcccccccgtgatccccttcatgcccctgctgctgaaggacatgaccttcatccacgagggcaaccacaccctggtggagaacctgatcaacttcgagaagatgagaatgatggccagagccgccagaatgctgcaccactgcagaagccacaaccccgtgcccctgagccccctgagaagcagagtgagccacctgcacgaggacagccaggtggccagaatcagcacctgcagcgagcagagcctgagcaccagaagccccgccagcacctgggcctacgtgcagcagctgaaggtgatcgacaaccagagagagctgagcagactgagcagagagctggagccctag

SEQ ID NO: 39225 - DNA, 1797 bp, Artificial Sequence
  derived and/or modified sequence
atgaaggtgggctggcccggcgagagctgctggcaggtgggcctggccgtggaggacagccccgccctgggcgcccccagagtgggcgccctgcccgacgtggtgcccgagggcaccctgctgaacatggtgctgagaagaatgcacagacccagaagctgcagctaccagctgctgctggagcaccagagacccagctgcatccagggcctgagatggacccccctgaccaacagcgaggagagcctggacttcagcgagagcctggagcaggccagcaccgagagagtgctgagagccggcagacagctgcacagacacctgctggccacctgccccaacctgatcagagacagaaagtaccacctgagactgtacagacagtgctgcagcggcagagagctggtggacggcatcctggccctgggcctgggcgtgcacagcagaagccaggtggtgggcatctgccaggtgctgctggacgagggcgccctgtgccacgtgaagcacgactgggccttccaggacagagacgcccagttctacagattccccggccccgagcccgagcccgtgagaacccacgagatggaggaggagctggccgaggccgtggccctgctgagccagagaggccccgacgccctgctgaccgtggccctgagaaagccccccggccagagaaccgacgaggagctggacctgatcttcgaggagctgctgcacatcaaggccgtggcccacctgagcaacagcgtgaagagagagctggccgccgtgctgctgttcgagccccacagcaaggccggcaccgtgctgttcagccagggcgacaagggcaccagctggtacatcatctggaagggcagcgtgaacgtggtgacccacggcaagggcctggtgaccaccctgcacgagggcgacgacttcggccagctggccctggtgaacgacgcccccagagccgccaccatcatcctgagagaggacaactgccacttcctgagagtggacaagcaggacttcaacagaatcatcaaggacgtggaggccaagaccatgagactggaggagcacggcaaggtggtgctggtgctggagagagccagccagggcgccggccccagcagaccccccacccccggcagaaacagatacaccgtgatgagcggcacccccgagaagatcctggagctgctgctggaggccatgggccccgacagcagcgcccacgaccccaccgagaccttcctgagcgacttcctgctgacccacagagtgttcatgcccagcgcccagctgtgcgccgccctgctgcaccacttccacgtggagcccgccggcggcagcgagcaggagagaagcacctacgtgtgcaacaagagacagcagatcctgagactggtgagccagtgggtggccctgtacggcagcatgctgcacaccgaccccgtggccaccagcttcctgcagaagctgagcgacctggtgggcagagacaccagactgagcaacctgctgagagagcagtggcccgagagaagaagatgccacagactggagaacggctgcggcaacgccagcccccagatgaaggtgagcgcctggccccagttcctgagcagcgccccccccggcctgcaggccccccccagcccccccgaccccgagggcctgtgcggcagaggcaagctgagcagccacagacacaccctgggcagcctgatcggcgtgcacggcgccctggccgcctgcggcgccctgggccaggccgtgcccggcggcgccgaggcctag

SEQ ID NO: 39226 - DNA, 2772 bp, Artificial Sequence
  derived and/or modified sequence
atgaaagttggctggccaggagagagctgctggcaggtcggtttagctgttgaggacagcccagcactcggagctccccgcgtaggggctttgcctgacgtggtgcctgaaggcactctcttgaacatggtgctgcgccgaatgcataggccacgctcctgtagctaccaactcctgttggaacatcagcgtcccagttgcatccagggactgaggtggacaccactgactaacagcgaagagagtctggacttctctgaaagcctggaacaagccagcactgaaagagttctgcgggccgggagacaactccatagacacttgctcgcaacgtgtcccaatcttatccgtgaccgaaaataccacctgcgtctgtacaggcagtgttgttccggtagggagttagtggatggcatcctcgcattgggactgggtgtgcatagcagatcacaggttgttggcatctgccaggtactgctcgatgaaggggctctgtgccatgtaaaacatgactgggctttccaggatagagacgcccagttttaccggtttcccggcccagagccggagccagttaggacccacgagatggaggaggaattagccgaagctgttgctctgttatctcagagagggcccgacgctctcctcacagtggctctccgcaaaccccctggccagagaacggacgaagaattggacctgatctttgaagagctgttgcacattaaagccgttgcccaccttagcaactccgtaaaaagagagctcgccgccgtgcttctcttcgagccacacagtaaagctggaacagtgctgttcagccaaggagacaaagggacgtcttggtacattatctggaaaggctccgtcaatgtcgttacacacggaaaggggctagtgacaaccctgcatgaaggtgatgacttcgggcaactggcattagttaatgatgcaccgcgcgccgcaactattatcctgagagaagataactgtcactttctccgggttgacaagcaggatttcaatcgcataataaaagacgtggaggctaaaacaatgaggttggaagagcacggcaaggttgtgctggttctggagagggcatcccagggcgctggtccttctcgcccccccactcctggccggaataggtataccgtgatgtctgggactcccgaaaagattctggaactcttgctggaggctatgggacctgactcgagtgcccacgacccaactgagaccttcctttccgattttttgcttacacatcgagtgttcatgcccagcgcccagctttgcgccgcattactccatcatttccatgttgagccagctggcgggtctgaacaggagcggagtacatacgtctgcaataaacgacagcagattttgcgcctggtgtctcaatgggtcgcgctgtatggaagcatgctgcatacggatcctgtcgccacctcctttcttcaaaagctgtccgatttagtgggcagagacacacggctcagcaacctactgagggagcagtggcctgaacgcaggcgctgtcacaggctggagaacggctgtggaaatgcatcccctcaaatgaaggcccgtaaccttcccgtttggttacccaatcaggatgaaccactccccgggtcttcctgcgcaattcaggtcggcgacaaggtgccctacgacatctgccggcctgatcactccgtgctgacgttgcaacttcctgtgactgcaagcgtcagagaagttatggctgcactcgcccaggaggacggctggactaaaggacaggttttggttaaagttaactcagcaggcgatgcgatcgggctccagcctgacgcccgaggcgtagccaccagcctgggccttaacgagcgcctgtttgtcgtgaatcctcaggaggtgcatgagctgatcccacacccggaccagctcggtccaactgttggaagtgcagaggggctggacctggtaagtgccaaagatctcgccggccagctgacagaccacgactggtccctgtttaactctattcaccaggtcgagctgatccactatgtattaggtccacagcatctgcgagacgtcacaaccgctaacttggagaggttcatgcgccgcttcaatgaattacaatattgggtcgctaccgaattatgtttgtgccctgtgcccggtcccagagctcaactgctcagaaagttcatcaagctggctgcccacctaaaggagcaaaagaatttaaactccttctttgccgttatgttcggcctgtctaatagcgccatttctaggctcgctcacacgtgggaacgactacctcacaaagtgcgcaagctctattccgctctcgagcgcctgctggaccccagctggaatcaccgagtgtaccgactcgccttggctaaactgtcaccacccgttattccctttatgcctcttctgcttaaggatatgacttttatccacgagggcaaccatacactggtcgagaatctgatcaacttcgagaaaatgcgcatgatggcaagagccgcgcgaatgctgcatcattgtaggagccataatcccgtccccctgtctccattaaggtctagagtgtcacacctccatgaggactctcaggtggcacgtatctctacttgtagtgaacagtccctgtctacccgttctcctgccagtacttgggcctacgtccagcagctgaaggtgattgataatcagagggagctcagcaggttatctcgggaattagagccctag

SEQ ID NO: 39227 - DNA, 1797 bp, Artificial Sequence
  derived and/or modified sequence
atgaaggtggggtggcctggcgagagttgctggcaggtagggctggctgttgaggatagtccagctctcggtgcccctagggtcggtgctttgcccgacgttgttcccgaaggtactctgctgaacatggtcctgagacgcatgcatcgcccacggtcttgtagctatcagcttctgctagaacaccagcgtcccagctgtatccaggggctccgctggactcctctgacaaactctgaggaatcactcgacttctccgagtccttagaacaggctagcacagaaagagttcttcgggctggacggcagctgcaccgccatctgttggccacatgccccaacctaattcgggatcgcaagtaccatctgaggctataccgacagtgctgctccgggcgagagctggttgatggcatcttggcgcttgggctgggcgtacatagccgcagccaggttgtgggtatttgtcaagtcctccttgacgaaggcgcgctgtgtcatgtgaagcacgattgggcttttcaggatcgcgacgcccaattttacagatttcccgggcctgagcctgagcccgtgcggacccatgaaatggaggaagagcttgctgaagccgttgccttgctgtcccaaagggggcctgatgcgctactaaccgttgcactgaggaagccacccggccaaaggactgacgaggagctcgacttgatctttgaggaacttctccacatcaaggccgtcgcccatctctccaactccgttaaacgcgagctagccgcagtgctgctgttcgagccccattccaaggctggcaccgtcttgttttcccagggagacaaaggcacttcctggtatatcatttggaaaggatctgtgaacgtggtgactcacggcaaagggctcgttactacacttcatgagggtgatgactttggccaactcgctttggtgaatgatgctccaagagcagcgactatcattctgcgcgaagataactgccattttctacgggtagacaagcaggacttcaatcgaatcataaaggacgttgaggccaagaccatgcggctggaggagcatggcaaagttgtcttggtgttggagcgcgcttcccagggcgcaggcccttcacgccccccaactccagggaggaatcggtataccgtgatgtccggtacacccgaaaaaatcctggagctgcttctggaagcgatgggtcctgattcctcggcgcacgatcctaccgagaccttcttgagtgattttctgctaacgcatcgggtgtttatgccgtctgcccagctgtgtgcagccctcctacaccattttcacgttgagcctgccggaggcagcgaacaggagagatccacttacgtttgcaataaaaggcagcaaatcctgagactggtttcacagtgggtggccttatatggatcgatgttacacactgatcccgtggcgacaagcttcctgcagaaactttcagacctggtaggacgggatacaaggctctctaatctgttacgtgaacagtggccggagaggagacgctgtcatcggctggagaatgggtgtggaaatgcctccccccagatgaaagtgtccgcctggccgcagttcctctctagcgcccccccagggctccaagcccctccttccccaccggatcctgaggggctgtgcggacgggggaagctcagtagtcatcgtcacactctcgggagtttgatcggcgtacacggagctttagctgcctgtggggccttaggacaggccgtgcctggaggagccgaggcatag

SEQ ID NO: 39228 - DNA, 2772 bp, Artificial Sequence
  derived and/or modified sequence
atgaaagtggggtggccaggtgaaagctgttggcaagtcggattagctgtggaggactcgccggctttaggggcaccacgcgttggcgctctcccagacgtagtgcctgagggcacccttctgaatatggttctccgtcgaatgcataggccccgaagctgctcgtatcaactgcttctagagcatcagcggcccagctgtatccagggtctgcggtggactcccctgacgaacagtgaagagagtctggatttcagcgagagcctggaacaggcaagcactgagcgcgttttgcgagccggccggcagctccaccgacaccttctggcaacctgccctaacctcattcgcgaccggaagtaccaccttagattgtaccgtcagtgttgtagtgggcgggagctcgttgatgggatcctggccctgggattaggcgtgcactcccgcagccaggtggtcggaatctgtcaggttcttttggatgaaggcgcattatgccacgtgaagcacgattgggcttttcaggatcgggacgcccagttctatagatttcccggacctgagccagagccagtccgcacccatgagatggaagaagagcttgctgaagccgtggcattactctcccagaggggacccgacgcactgctgactgtggctcttaggaaacccccaggacagcggactgatgaagaactggatctcattttcgaggaacttctgcacataaaggctgttgcccacctctccaacagcgtgaagcgcgaactggccgccgtgctccttttcgaaccacattcaaaggctggcacagtgctattttctcaaggggataagggcacatcttggtacatcatttggaagggaagcgtcaatgtggtgacacacgggaaaggtctggtcacaacattgcacgaaggagatgatttcggccagcttgcattggtcaacgacgcacctcgagcagcaactatcattttacgagaagacaactgtcacttcttacgggtagacaagcaggacttcaataggattatcaaagacgtggaagcaaaaactatgagacttgaagagcacggcaaagtggtgctggtgttagaaagggcctcgcagggtgctggtcccagccgacctcctacgcctggtaggaatcgatacacagtaatgtctgggactcccgagaaaattttggagttacttcttgaggctatggggccagactcttctgcacacgaccctacggagacattccttagtgactttctgctgacccatagggtctttatgccctctgctcaactctgcgccgcactgttgcatcacttccacgtggagcctgccggcggttcagagcaggagcggagcacctacgtctgcaacaaacggcagcaaatcctgcgcctcgttagtcaatgggtcgctctgtacgggagcatgctgcacacggaccccgtggcaacctctttcctgcaaaaactgtccgatctggtgggtcgcgatacacggttgtctaatctgttaagagaacagtggccggagagacggcggtgccaccgcttagagaacggatgcgggaacgcttcgccccagatgaaagcgcggaacctacctgtttggctacctaatcaagacgagccccttccagggagttcttgtgcaatccaggtgggcgataaggtgccttatgacatttgccgccctgatcactcagtcctgacactgcagctgccggtgaccgcatctgtgcgggaggtaatggctgccctggcacaggaagatggatggacaaagggtcaagtgctagtaaaggtgaattcagcaggcgatgctattggactccagccagacgcccgcggggtggccacctccctaggactgaatgaacggctgttcgttgtgaacccacaagaggttcacgaacttattccccaccccgatcagctggggcctacggtaggatccgcagaggggctagatctggtcagtgccaaagatctggccggccagttgacagaccatgactggtctctgtttaatagtatccatcaggtcgagcttattcattatgttttgggcccgcagcacctgagagatgtgacaactgctaatttggagaggtttatgagacgctttaatgaattacaatattgggtagctactgagttgtgcttatgcccagtcccagggccgagggcacaactcctccgaaaattcattaagctcgctgctcacctcaaagagcagaaaaatctcaattctttttttgccgtgatgtttggattgtctaatagtgctatctcccgactagcacatacatgggaaaggctgcctcataaagtgagaaagttgtacagcgctctggagcgcctgctagatcctagttggaaccatcgggtttacaggctggccttagccaaactgtcgcctccagttatccccttcatgcccctactgttgaaggatatgacctttatccacgagggcaaccataccctagtggaaaacctgatcaacttcgagaaaatgcgtatgatggcacgagccgctcggatgctccaccattgcaggtcacataacccagtgccactctccccacttagatcaagagtcagtcaccttcatgaggatagccaggtggctcggatttccacctgttcagagcagtcgctgagcacaagatcccccgccagcacctgggcatacgtgcaacagcttaaagtcatcgacaatcagagagaactatcacgcctgtcgcgggaactggagccctag

SEQ ID NO: 39229 - DNA, 2772 bp, Artificial Sequence
  derived and/or modified sequence
atgaaggtgggctggccaggagagagctgctggcaggtgggcctggccgtggaggacagccctgccctgggcgccccccgggtgggcgccctgcctgatgtggtgcctgagggcaccctgctgaacatggtgctgcggaggatgcaccggcccaggagctgcagctaccagctgctgctggagcaccagaggcccagctgcatccagggcctgcgctggacccccctgaccaacagcgaggagagcctggacttcagcgagagcctggagcaggccagcacagagcgggtgctgcgggccggccggcagctgcaccgccacctgctggccacctgccccaacctgatccgggacaggaagtaccacctgcggctgtaccggcagtgctgcagcggccgggagctggtggatggcatcctggccctgggcctgggcgtgcacagccgcagccaggtggtgggcatctgccaggtgctgctggatgaaggagccctgtgccacgtgaagcatgactgggccttccaggacagagatgcccagttctaccgcttccctggccctgagcctgagcctgtgaggacccatgagatggaggaggagctggccgaggccgtggccctgctgagccagaggggcccagatgccctgctgactgtggccctgaggaagcccccaggccagaggacagatgaggagctggacctgatctttgaggagctgctgcacatcaaggctgtggcccacctgagcaacagcgtgaagcgggagctggccgctgtgctgctgtttgagccccacagcaaggccggcaccgtgctcttcagccagggcgacaagggcacctcctggtacatcatctggaagggctctgtgaatgtggtgacccacggcaagggcctggtgaccaccctgcatgaaggagatgactttggccagctggccctggtgaatgatgccccccgggccgccaccatcatcctgcgggaggacaactgccacttcctgcgggtggacaagcaggacttcaaccgcatcatcaaggatgtggaggccaagaccatgaggctggaggagcacggcaaggtggtgctggtgctggagcgggccagccagggcgccggccccagccggccccccaccccaggaagaaaccgctacacagtgatgagcggcaccccagagaagatcctggagctgctgctggaggccatgggccctgacagcagcgcccatgaccccacagagaccttcctgagtgacttcctgctgacccacagggtcttcatgcccagcgcccagctgtgtgccgccctgctgcaccacttccacgtggagcctgctgggggcagcgagcaggagaggagcacctacgtgtgcaacaagaggcagcagatcctgcggctggtgtcccagtgggtggccctgtatggctccatgctgcacacagatcctgtggccaccagcttcctgcagaagctgagtgacctggtgggccgggacacccggctgagcaacctgctgcgggagcagtggccagagcggcggcgctgccaccggctggagaatggctgtggaaatgccagcccccagatgaaggccaggaacctgcctgtgtggctgcccaaccaggatgagcccctgcccggcagcagctgtgccatccaggtgggggacaaggtgccctatgacatctgcaggccagaccacagcgtgctgaccctgcagctgcctgtgacagcctctgtgcgggaggtgatggccgccctggcccaggaggatggctggaccaagggccaggtgctggtgaaggtgaacagcgctggagatgccatcggcctgcagccagatgcccggggcgtggccaccagcctgggcctgaatgaaaggctgtttgtggtgaacccccaggaggtgcatgagctgatcccccacccagaccagctgggccccaccgtgggcagcgctgagggcctggacctggtgtctgccaaggacctggccggccagctgacagaccatgactggagcctcttcaacagcatccaccaggtggagctgatccactacgtgctgggcccccagcacctgagagatgtgaccacagccaacctggagcgcttcatgaggcgcttcaatgagctgcagtactgggtggccacagagctgtgcctgtgccctgtgcccggcccccgggcccagctgctgaggaagttcatcaagctggccgcccacctgaaggagcagaagaacctgaacagcttctttgctgtgatgtttggcctgagcaacagcgccatcagccggctggcccacacctgggagcggctgccccacaaggtgaggaagctgtacagcgccctggagcggctgctggaccccagctggaaccaccgggtgtaccgcctggccctggccaagctgagcccccctgtgatccccttcatgcccctgctgctgaaggacatgaccttcatccacgagggcaaccacaccctggtggagaacctgatcaactttgagaagatgaggatgatggcccgggccgccaggatgctgcaccactgccgcagccacaaccctgtgcccctgagccccctgcggagccgggtgagccacctgcacgaggacagccaggtggcccgcatcagcacctgcagcgagcagagcctgagcaccaggagccctgccagcacctgggcctacgtgcagcagctgaaggtgattgacaaccagcgggagctgagccggctgagccgggagctggagccctag

SEQ ID NO: 39230 - DNA, 1797 bp, Artificial Sequence
  derived and/or modified sequence
atgaaggtgggctggccaggagagagctgctggcaggtgggcctggccgtggaggacagccctgccctgggcgccccccgggtgggcgccctgcctgatgtggtgcctgagggcaccctgctgaacatggtgctgcggaggatgcaccggcccaggagctgcagctaccagctgctgctggagcaccagaggcccagctgcatccagggcctgcgctggacccccctgaccaacagcgaggagagcctggacttcagcgagagcctggagcaggccagcacagagcgggtgctgcgggccggccggcagctgcaccgccacctgctggccacctgccccaacctgatccgggacaggaagtaccacctgcggctgtaccggcagtgctgcagcggccgggagctggtggatggcatcctggccctgggcctgggcgtgcacagccgcagccaggtggtgggcatctgccaggtgctgctggatgaaggagccctgtgccacgtgaagcatgactgggccttccaggacagagatgcccagttctaccgcttccctggccctgagcctgagcctgtgaggacccatgagatggaggaggagctggccgaggccgtggccctgctgagccagaggggcccagatgccctgctgactgtggccctgaggaagcccccaggccagaggacagatgaggagctggacctgatctttgaggagctgctgcacatcaaggctgtggcccacctgagcaacagcgtgaagcgggagctggccgctgtgctgctgtttgagccccacagcaaggccggcaccgtgctcttcagccagggcgacaagggcacctcctggtacatcatctggaagggctctgtgaatgtggtgacccacggcaagggcctggtgaccaccctgcatgaaggagatgactttggccagctggccctggtgaatgatgccccccgggccgccaccatcatcctgcgggaggacaactgccacttcctgcgggtggacaagcaggacttcaaccgcatcatcaaggatgtggaggccaagaccatgaggctggaggagcacggcaaggtggtgctggtgctggagcgggccagccagggcgccggccccagccggccccccaccccaggaagaaaccgctacacagtgatgagcggcaccccagagaagatcctggagctgctgctggaggccatgggccctgacagcagcgcccatgaccccacagagaccttcctgagtgacttcctgctgacccacagggtcttcatgcccagcgcccagctgtgtgccgccctgctgcaccacttccacgtggagcctgctgggggcagcgagcaggagaggagcacctacgtgtgcaacaagaggcagcagatcctgcggctggtgtcccagtgggtggccctgtatggctccatgctgcacacagatcctgtggccaccagcttcctgcagaagctgagtgacctggtgggccgggacacccggctgagcaacctgctgcgggagcagtggccagagcggcggcgctgccaccggctggagaatggctgtggaaatgccagcccccagatgaaggtgtctgcctggccccagttcctgagcagcgcccctcctggcctgcaggccccacccagccccccagaccctgagggcctgtgtggccggggcaagctgagcagccaccgccacaccctgggcagcctcatcggcgtgcatggagccctggccgcctgtggggccctgggccaggccgtgcctggaggagctgaggcctag

SEQ ID NO: 39231 - DNA, 2772 bp, Artificial Sequence
  derived and/or modified sequence
atgaaggtgggctggcccggcgagagctgctggcaggtgggcctggccgttgaggactcccccgcactaggcgcgccacgcgttggcgccttgcctgatgtcgtgcccgaaggcaccctgctgaacatggtgctccgtagaatgcaccggccccggagctgcagctaccagttgttgcttgaacatcaaagaccatcttgcattcagggccttcgatggacacccctgactaacagcgaggagagcctcgacttctccgagagtttagagcaggcatcaacagagagagtcctccgcgccggccgtcaactccacaggcatctgctggcaacctgtccaaaccttatcagagacagaaaatatcacctgcgcttgtaccgacagtgttgctctggaagggagcttgtcgacggcattctggctctgggcttaggcgtgcactccaggagccaagtggtaggcatctgtcaggtactcctggatgagggggctctttgccacgtcaaacacgattgggctttccaggaccgggatgcccaattctaccgattccccggaccagaacctgaacccgttagaacacacgagatggaggaagagctcgccgaggccgttgcactgctatcccagagaggacctgacgccctgctgactgttgccctgagaaagccccctggacaaaggaccgatgaagagctggacttaattttcgaagaactgcttcacattaaagctgtggcccacttaagcaattcagtgaagcgggagttggccgcagtgttactgttcgagccccactcgaaggcgggtaccgtcctatttagccagggggacaaaggcacaagctggtatattatctggaagggctccgtcaacgtggtgactcacgggaaaggtctggtcaccactctgcacgaaggagacgattttggtcaactggcactcgtcaacgacgcacctcgggccgcgactatcattctgagggaggacaattgtcattttctgcgggtggataagcaggatttcaacagaattatcaaagatgtcgaagccaagacaatgcggttggaagaacatggcaaggtcgtgctcgtcttggaacgcgcatctcagggtgctggcccgagcagacctcccacccccggacggaatagatatacggtgatgagcgggacacctgagaagatcctggaattgctgctcgaagccatgggacctgattctagcgcgcacgaccctacagaaacattcctgtctgattttctgctgactcacagggtatttatgccgagtgcacaactgtgcgccgctctgcttcaccacttccacgttgagccagccggtggttcagaacaggaacgctcgacttacgtctgtaacaagcgacagcagatcctgagacttgtgtcacagtgggtggccttatacgggagcatgctgcatacggatcccgtggccacatccttcctccagaaactgtccgatctggtgggccgcgacaccaggctgagtaaccttctcagggaacagtggcctgaaaggagacgctgccaccgtctggagaatggctgcgggaacgcctctccacagatgaaggcccggaatctgcctgtttggttaccaaaccaggatgagccgttgcctggaagcagctgtgctatccaggtgggtgataaggtgccatatgatatttgtcggcccgatcacagcgttctcactctccagctgccagttaccgcatctgtaagggaagtcatggccgcccttgcacaggaagacggttggactaagggacaagttctggttaaggtgaactccgctggagatgccattgggttacagcccgatgcgagaggggtggcgacatctctgggcctgaatgagcgcttgttcgtggtgaacccccaagaggtgcacgagttgatccctcatcctgatcagctaggtccaacagtggggagcgctgaaggcctggacttggtgtcggccaaggaccttgctggtcagctaaccgatcacgactggtctcttttcaacagtatccaccaggtggagctgatccactacgtgctgggacctcaacatttgagggacgttaccactgctaatctggagaggttcatgcgccgctttaacgaactgcagtactgggtcgctacggagctctgcctgtgcccagtgccaggaccccgggctcagctgttgagaaagtttatcaagctcgctgctcacctgaaggagcagaagaacctgaacagtttcttcgccgtaatgtttggactgagtaatagcgccatcagtcgactggcccacacctgggagcgtctaccgcataaggtacgcaagctgtattcagccttggaacgcttacttgatcctagctggaaccaccgggtctacaggttggcattggcgaagctttcaccccccgttatcccctttatgcccttgctattgaaggatatgacgtttattcatgaagggaatcacacactagtagaaaacctgattaatttcgaaaagatgagaatgatggcccgggccgcacgaatgctgcaccactgtcggagtcataacccagtgccgctctctcccctgcggagtagagtgagtcatcttcatgaggacagccaagtggcgagaatcagcacctgttctgaacagtccctcagcacaaggtctcctgccagtacatgggcgtatgtccaacagttgaaggtgatcgacaatcaaagagaactgagtaggctatcgcgagaattagagccgtag

SEQ ID NO: 39232 - DNA, 1797 bp, Artificial Sequence
  derived and/or modified sequence
atgaaggtgggctggcccggcgagagctgctggcaggtgggcctggccgtggaagactcaccagctttgggagctcctcgggttggtgctcttcccgacgttgtcccagagggaacgctgctgaacatggtcctgaggaggatgcataggcctcggagttgttcctaccagttactcctcgagcaccagcgtcccagttgcattcaggggctgcgctggacccccctcactaattccgaggagtctctagacttttctgaaagcttagagcaggccagtactgaacgagtgctcagagcaggcaggcaactgcacagacacctgcttgccacctgtcctaatttgatccgggaccgcaagtaccacctgagactatatcggcagtgttgcagcggcagggagctcgtcgacggcatcctggccctcggactcggcgtccattctcggtctcaggtcgtgggcatttgccaggttctgctagatgagggggcactgtgtcatgttaagcatgactgggcttttcaggatcgagatgcacagttttaccggtttccaggccctgaacctgaaccagtgcggacacacgaaatggaagaggagctggccgaagccgtagccctgcttagccaacggggtcccgacgccctgcttactgttgcccttaggaagcccccaggccaaagaacagatgaggaactggatctgattttcgaagaactgctgcacattaaggcagtggcccatctctctaattctgtcaagcgagaactggccgcggtcctacttttcgagcctcatagcaaggcgggtacagttttgttctcacagggggataaggggacatcttggtatatcatttggaaaggttctgttaacgtggtgacccacggcaaaggtctcgtgacaactctgcacgaaggggacgatttcgggcaactggctctggtcaatgatgccccaagggcagccacaattatactgagggaggataactgccactttctgcgcgtcgataaacaggactttaatagaatcataaaagatgtagaggctaaaactatgcgccttgaagaacatggaaaggtggtcctggtgctcgagagggccagtcaaggcgccggtccatctcgcccccctactcctggaagaaacaggtataccgtgatgagtggtacccccgaaaaaatcttggagctgctgctagaggcaatggggcccgactcttcagcccacgaccccactgaaactttcctttcggactttctcctgacgcatcgagttttcatgccttccgcccagttgtgcgccgccctgttacaccattttcacgtcgagcctgctggtggatctgagcaggagcgatccacatacgtgtgcaataaacgccagcagattctcagactcgtgtcacagtgggtggccctttatggttcgatgctccataccgatcccgttgcgacttcgttccttcaaaagctgagcgacctggttggccgagacacaaggctgagcaaccttttgagggagcagtggccagagcggagacggtgtcacaggttggagaacgggtgtggaaatgcctccccccagatgaaagtgagcgcatggccacagtttctgtcttccgcgccacccggcctacaggcacctccttccccccctgaccccgagggcctgtgcgggcgcggcaaactgagtagccatcgccatacgctgggatctttgatcggggtccatggggcccttgccgcctgcggtgctctggggcaagccgtccctggtggcgcagaggcctag

SEQ ID NO: 39233 - DNA, 2772 bp, Artificial Sequence
  derived and/or modified sequence
atgaaggtgggctggcccggcgagagctgctggcaggtgggcctggcggtggaagattcaccagcccttggcgcccctcgggtcggtgccttgcccgacgtggtcccagagggtactctgctcaatatggtgctgcggcgcatgcaccgacccaggagctgttcctatcaacttttgctagagcaccaaagaccatcatgtatccaagggttacggtggaccccactgaccaactccgaagagtcgctcgactttagcgagagcctagaacaggcctctacggaacgcgtgcttagggcggggcggcagctgcaccggcacctactggccacctgccccaacttaatcagggaccggaaatatcatcttcgcttgtaccggcagtgctgctctggacgggagctggtcgatgggatcctggccctaggactaggagtgcactcccgatcgcaggtggtgggcatttgccaggtgctccttgatgagggagctctatgtcacgtcaagcacgactgggcctttcaggaccgggatgcgcagttctataggtttccaggacctgagcccgagcctgttcgcacccacgaaatggaagaagagttagcggaggcagttgcactcctttcacagcgcggacctgacgcattgctgactgtggcacttagaaaaccaccgggccagcggaccgatgaggagcttgacctcatattcgaggagcttctgcatattaaggcggtcgctcatctcagtaacagcgtgaaaagggaactcgctgctgttctactgtttgaaccccatagcaaggctgggactgtcctcttctctcagggcgataaaggcacctcatggtacataatctggaaagggtctgtgaatgtagttacgcacggtaaggggctcgtgactacacttcatgagggcgacgacttcggccaactggcacttgttaacgacgcgccgagagccgcaacaattattcttcgagaggataattgtcacttcttacgtgttgacaaacaggatttcaataggattatcaaggacgtggaagctaaaaccatgcgcctggaagagcacgggaaggtcgtgctggtgcttgagcgagccagtcagggagctggcccaagcaggccccctacccctgggaggaatcgctataccgtgatgtcaggcacccccgagaagattctagaattgttgctcgaagccatgggacccgacagctctgcgcacgaccctacagagaccttcctaagtgacttcttactgacgcatcgagtgttcatgcctagcgcccagttatgcgccgctctcctgcaccacttccatgttgagcccgccgggggatccgagcaagaacgctctacttacgtgtgcaataagagacaacaaatcctccgactggtgagccagtgggtcgcactttatgggagtatgctgcacaccgatcctgtcgctactagttttcttcaaaaactcagcgatttggtgggacgcgatacacgcctgagcaatctgctgcgggagcagtggcctgaaaggcgtagatgccataggctagaaaacgggtgcggtaatgcaagcccacaaatgaaggcaagaaatttacccgtgtggctcccaaatcaagacgaaccccttcccgggtcctcttgcgcaatccaggtgggagataaagtgccatacgacatttgtcgtcctgaccacagtgttcttacacttcaactacctgtgaccgcttcagtgagagaagttatggccgctttggctcaggaagacggttggaccaaaggccaggtcctagttaaggtgaattcggctggggacgccatcggcctgcagccagatgccaggggagtggccacctctctgggtctgaatgagagacttttcgtggttaatccgcaagaggtgcacgaactgatccctcacccagaccagttgggccccacggtaggcagtgccgaaggcctggaccttgtctcagcaaaggatcttgccggtcagctgaccgaccatgactggtcactgtttaactcaatccaccaggttgaactaattcactacgtgctgggcccgcagcatcttagagacgtcacaaccgccaacctggagcgctttatgcggcgcttcaatgagctacagtattgggtggccaccgagttgtgcctttgtccagtgccaggcccccgcgctcaactgctcagaaaattcatcaagctggccgcacatctgaaagagcagaaaaacttaaacagtttctttgcagtcatgttcggcctgtcaaactctgccatatcccggcttgcacatacctgggaacgtctcccccataaggttagaaagctgtattccgcactcgaacggttgttggacccatcatggaaccaccgtgtatacagactggccttagcaaagcttagtccgcccgttatccctttcatgcccctcctgctgaaggatatgacgtttatacatgaagggaaccataccctggtggagaatctgattaatttcgagaagatgagaatgatggctagagcagcacgtatgttgcaccattgccggtcccacaatcctgtgccgctgagtccactgaggagccgggtgtctcaccttcacgaagacagccaggtggctcgaattagtacttgttcggagcagtcactgtcaaccagaagcccggcctccacgtgggcctacgtacaacagctgaaggtcatcgacaatcaacgagaattgtctcgactttcaagggaacttgagccctag

SEQ ID NO: 39234 - DNA, 2772 bp, Artificial Sequence
  derived and/or modified sequence
atgaaggtagggtggccaggagaaagttgttggcaggtagggctggcagtagaggactctcctgccttgggcgcacccagagtgggggctctgcctgacgttgttcctgaggggaccttactcaacatggtgcttcggaggatgcacagacctcgctcctgttcctatcaactgctgctggagcatcagcgccctagctgcatccaggggttaagatggacacctctgacaaacagcgaggagtctctggactttagcgaaagccttgaacaggcctccactgaacgggtgcttagagctggacgacaactgcatagacacctgttagcaacctgtcccaacctcatccgcgatcgaaagtaccatctccgtctgtaccggcagtgctgcagcggcagggagctcgtcgacggcatactcgctcttggtctcggggtgcactccaggtcccaggtggtggggatctgtcaggtgctgctggatgaaggggctctttgtcatgttaagcatgactgggcattccaggatcgggacgcccagttttaccggtttcccggacctgagcccgaacctgtgcgcacacacgaaatggaagaggaacttgccgaagccgtagccctcttgtcacagagagggcctgacgctctcctgacagtggccttgcggaagccacccggacagcgcacagatgaagagctggaccttatctttgaagaactgttgcatattaaggccgtggctcatctgagcaacagtgtgaaaagagaactggccgcagtcttgttattcgaacctcatagtaaagccggtacagtgctcttctcgcaaggagacaaaggtacctcctggtatatcatttggaaaggctctgtcaatgttgtgacccacggtaaaggattggtcacgactttgcacgaaggagatgacttcgggcaattagcccttgtcaacgatgcccctcgtgcagcaaccatcatcttgagggaagataattgccactttctgcgcgtcgacaaacaggacttcaatagaatcataaaggatgtcgaggcaaaaactatgcgccttgaggagcatggcaaagtggtcctggtccttgagagagcctcacaaggcgcaggccctagccgacccccaaccccagggaggaataggtacactgtcatgagcggcacacccgagaaaatcctggagctgctgctggaggctatgggcccagactcgagtgctcacgaccccactgaaactttcttgtctgattttctactgacacaccgggtgttcatgccctctgcccagctgtgcgccgctctgctccaccattttcacgtggagccggcaggcggatccgagcaagagcgcagtacttatgtgtgtaacaagagacagcagatactcagattggtatcacaatgggtcgcattgtacggttcaatgctccacacagaccccgtcgccacttctttcctacagaaactatctgatttggtgggcagggacactcgcctgtccaatctcctgagagaacagtggccggagcgaaggcggtgtcatcgtctcgagaacggctgtggaaatgcgagtccgcaaatgaaagctagaaatctgccagtgtggctgcctaatcaggacgagcctctgcctggatcaagctgcgcaatacaggtgggagacaaagtaccatatgacatctgtaggccagaccatagcgtgctgactctgcaactaccggtgacggcttcggttcgtgaagtaatggcagcactggcgcaagaggacggttggacaaagggccaggtcttggtcaaagtaaatagcgctggtgacgcgataggattgcagccagatgcgcgtggtgtggccacgtcattgggcctgaatgagcggctgttcgtagtcaacccccaggaggtgcacgagctgatcccccatccagaccagctaggccctactgtgggttccgctgaggggctggatttggtctccgctaaagatctcgccggtcagctgaccgaccacgactggtccctatttaatagtattcaccaggttgagcttatacattatgtgttgggccctcagcacctgagggatgtaaccacagcgaacctagaacgattcatgcggaggttcaatgaattacagtattgggtggccactgagctctgtctgtgtcctgtacccggacctagagcccagctcctgaggaagttcatcaaactggccgctcatttgaaagagcagaagaacttaaacagctttttcgccgtcatgttcggtctgagcaactccgctatatccagactggcacacacttgggaacgtctcccacacaaggtgaggaagctttacagcgctcttgaaagattgttggacccctcatggaaccacagggtgtaccgcttagctctggcaaaacttagcccgcctgtgattccattcatgccactattactgaaggatatgacttttatccacgagggaaatcacaccctcgttgaaaacctaattaacttcgagaaaatgagaatgatggccagggctgccaggatgctgcaccactgtaggtcccacaatccagtccctctcagccctctccgtagtagggttagtcatctccacgaagattcacaggtggcaagaatcagcacgtgcagcgaacaatccctctctacacgtagtccggcaagcacgtgggcttacgtgcagcagctgaaagtcatcgataaccaaagggagcttagtcgcctctccagagaactcgagccctag

SEQ ID NO: 39235 - DNA, 1797 bp, Artificial Sequence
  derived and/or modified sequence
atgaaagttgggtggccaggagaaagctgctggcaggtgggactagctgtggaagatagcccggctctgggagctccgagggtgggtgctttgccggatgtggtccctgagggaaccctcttgaacatggttcttcggaggatgcatcgcccaagatcctgtagttaccaactgttgctggaacatcaaaggccctcatgcattcagggtctgaggtggacacctctgacgaattcggaagagagcctggatttcagtgagagcctggagcaggcaagcaccgaaagggtgctccgcgctggacgccagcttcacagacacctcttagccacttgtccgaacctgatcagggatagaaagtaccacctgcgcctgtatcggcagtgctgcagtggccgagagctggtcgacgggatcttagctttgggtctgggcgtgcactcaagatcacaagtcgttggaatctgtcaggtgttgctggacgagggtgctctttgccatgtgaaacatgactgggcctttcaagaccgggatgcccagttttaccggttccccggaccagagcctgagccagttagaacccacgagatggaagaggaactggccgaagctgtggcactcttgtcccagaggggcccagacgcactgctcacagtggcactgcgcaagccaccaggacaacgaactgacgaggaactggacttaatcttcgaggagctcctgcacattaaagccgtggctcacctcagtaatagtgtgaagagggaactggctgctgtgttgctttttgaaccccatagcaaagcaggcacggtgctgttcagccagggggacaaaggtaccagttggtatataatatggaaaggatccgtgaacgtggtgacacatggaaagggcctcgtgactactttacatgaaggagatgattttggtcagttggctcttgttaatgacgcccctagagcggctactatcatcctgagggaagacaactgccactttttacgcgtagataagcaagattttaatcgtataataaaagacgtggaggcaaagacaatgaggctggaggagcacggcaaagtggttctcgtcttagagagagcctcccagggagcaggcccttcgcgaccgcctactcccggtagaaatcggtatacggttatgtctggcacacccgaaaagatactggagctgttgctggaagcaatgggcccagactcctccgcacacgacccaaccgagaccttcttatcagacttcctcctcacacacagggtgtttatgcctagcgctcaactctgcgcagccctcctgcaccacttccatgtggaacctgcaggcggaagcgaacaggaacgaagcacttacgtttgtaacaaaaggcagcagatcttgcggctggtgagtcagtgggtggccctgtacggaagtatgttgcacactgaccctgtggctacaagcttcctccaaaaactgtcagacctggtaggaagggacaccagactcagcaatctgctaagggaacaatggcctgagcggcgacggtgtcacagactggaaaatggttgtgggaacgccagtccacagatgaaagtaagtgcctggcctcagttcctttcatctgcccctccagggcttcaggccccaccgtcaccgcctgaccctgagggactgtgcggcagggggaaactttctagtcatcggcacactctggggagtctgatcggagtgcacggtgccctggctgcctgtggtgctctcggacaagcagtgccaggcggagccgaggcctag

SEQ ID NO: 39236 - DNA, 2772 bp, Artificial Sequence
  derived and/or modified sequence
atgaaggtagggtggccaggtgagtcatgttggcaggtcggcttggccgtggaggatagcccagccctgggggcaccacgggttggggcattacccgacgtggtacctgaagggaccctcctgaacatggtgctaagaaggatgcataggccacgttcctgctcctatcaactgcttctggagcatcagcgcccttcctgcattcaaggactccgttggacacccctgacaaactctgaggagtcactggatttcagtgagagccttgaacaggcctctacagaaagggttcttagagccggtaggcagcttcatcgccacttgctggctacatgccccaacctgattagggacaggaagtatcatctcaggttgtatcggcaatgctgctcaggcagggaactggttgatggtattctggcattggggctaggggtgcattccagatcccaagttgttggcatttgtcaggtattgcttgatgaaggcgcactgtgccacgtgaaacatgattgggcgttccaggatagggatgcccagttctaccgttttcccggaccggaaccggagccagtgcgtacgcacgagatggaagaggagctggctgaggccgttgccctattatcacaaaggggacctgacgccttgctcaccgtggccctcagaaagccaccaggccaacggacagacgaggaactggacctgatcttcgaagaactgctgcatattaaagctgtagcacatctctccaatagtgtcaaacgagagctggctgcagtgctcttgttcgagccacattctaaggccggaactgtgctgttctcccaaggcgataaggggacatcctggtacataatttggaaaggttcagtaaatgtggtgacacatggaaagggtctggttaccacactccatgaaggtgacgacttcggtcaactcgccctcgtgaacgatgcaccgagagctgcaactatcatactgagagaggataattgtcacttcctcagagtggacaagcaggacttcaataggattatcaaagacgtcgaggccaaaacaatgcgcctcgaagagcatggcaaggtggtgctcgtgctggagcgcgcttcacagggagcgggtccctctcgcccaccaacaccaggacgcaatagatataccgtaatgagtgggacgcccgaaaagatcctcgagctgcttttggaggccatgggcccagactcttccgcacatgatccaacagagacgttccttagcgattttctgttaactcatcgcgtcttcatgccttctgcacagctctgcgccgctctgttacaccacttccacgttgaaccagccggtggaagtgagcaggagagaagcacctacgtgtgcaataagaggcagcaaattctgcgcctcgtttctcagtgggtagcactgtacgggtctatgctacataccgatccggtggcaaccagcttcttgcagaagttatctgaccttgttgggcgtgatactagattgagcaacctgctgcgtgagcagtggcccgaacggcgtagatgccatcgcctcgaaaatggttgtgggaatgctagcccacagatgaaggccaggaatttgccggtttggctgcccaatcaggatgagcctcttccaggatccagttgcgcgattcaggtgggtgacaaagtgccttatgatatttgtcgcccagaccattcagttttaaccctccaactgcctgtaaccgcatctgtccgggaagtcatggccgcactcgctcaagaggatggttggactaaggggcaagtcttggtgaaagttaacagcgctggtgacgctatcggcttacagcccgacgctagaggagtggccaccagcctgggactaaatgagcgcctcttcgttgtcaatccccaggaagtgcacgagctgatcccccatcccgatcaattaggacctacagtgggctccgccgaaggactcgacctggtgtctgcaaaagacttggccggacagttaaccgatcatgactggagcttgttcaactcgatccaccaggtcgagcttatccactatgtcttgggaccacaacacctgagggacgtaacaactgcaaatcttgaacgctttatgagaaggtttaatgaactgcagtattgggttgccactgaactttgcctttgtcctgtaccagggcctcgcgctcagctgctccgcaagttcatcaagcttgccgcacatttgaaggaacagaagaacctgaattcctttttcgccgtgatgtttggtctgtcaaatagcgccatctcccgcctggcccacacatgggagcggctgccgcataaggtccgaaagctttacagtgctcttgagcgtttgctcgatcccagctggaaccaccgggtttaccgacttgctctcgccaagcttagcccccctgtgatcccattcatgcctctcctgctaaaagatatgacgttcattcacgaggggaaccacaccctagttgagaatctcataaacttcgagaagatgcgtatgatggcccgtgcagcgagaatgctgcatcactgtcgctcccacaatccggttccactgtctccgctaagatcccgggtaagccacctccacgaagatagccaggtagctagaattagcacatgcagcgagcagagcctgtcaacccgttctcctgctagcacgtgggcttatgtgcagcaattaaaagtgatagacaatcagcgagagctgtcccgtctatcccgagagctcgaaccctag

SEQ ID NO: 39237 - DNA, 3604 bp, Artificial Sequence
  derived and/or modified sequence
atactctgggctcaggcggatgtccactctggtacccccgggtgcggactccaaagcctgccagtgccggcccccttcccctacgcattcctctaccgtaaggcagggcgcctccaccccgccccctccgccagtcctggggaggggaagggggcgggcagcgcagggggtgtgacagctcccgcccggaccggtgccagcgcagccttgcttcagcgcccggtgccagctggctccttcgtctgagacgaaggcgcaggctcggggctccctgtcgccggtggctgggtggcgtccccccaccacgcccccacccctctactcacccaagaggagcctctccaccgagccctgcatcctgctgccctggcagccagtccagctaggcactggcccagttcactgtacctggacttacccactggcaccctccggatccccttatcaaagctgatgggggtcgctggggaccccccagccttttgctagagcctgcacggctgtgcgagcttgaaaagaaacatgaaggtgggctggccaggtgagagctgctggcaggtgggcctggctgtggaggatagcccagctctgggagcaccgcgggtgggagccctccctgacgtggtgccggaggggacactactcaacatggtgttgagaaggatgcaccggccccgaagctgctcctaccagctgctgctggagcaccagcgtccgagctgcatccaggggctgcgctggacaccactcaccaacagcgaggagtccctggatttcagcgagagcctggagcaggcctccacagagcgggtgctcagggctgggaggcagctgcatcggcatctgctggccacctgcccaaacctcatccgagaccggaagtaccaccttaggctctatcggcagtgctgctctggccgggagctggtggatgggatcttggccctgggacttggggtccattcccggagccaagttgtgggaatctgccaggtgctgctggatgaaggtgccctctgccatgtgaaacacgactgggccttccaggaccgagatgcccaattctaccggttccccgggcccgagcccgagcccgtgagaactcatgagatggaggaggagttggccgaagctgtggccctgctctcccagcgggggcctgacgccctgctcactgtggcacttcgaaagcccccaggtcagcgcacggatgaagagctggacctcatctttgaggagctgctgcacatcaaggctgtggcccacctctccaactcggtgaagcgagaattagcggctgttctgctctttgaaccacacagcaaggcagggaccgtgttgttcagccagggggacaagggcacttcgtggtacattatctggaagggatctgtcaacgtggtgacccatggcaaggggctggtgaccaccctgcatgagggagatgattttggacagctggctctggtgaatgatgcaccccgggcagccaccatcatcctgcgagaagacaactgtcatttcctgcgtgtggacaagcaggacttcaaccgtatcatcaaggatgtggaggcaaagaccatgcggctggaagaacatggcaaagtggtgctggtgctggagagagcctctcagggcgccggcccttcccgacccccaaccccaggcaggaaccggtatacagtgatgtctggcaccccagagaagatcctagagcttctgttggaggccatgggaccagattccagtgctcatgacccaacagagacattcctcagcgacttcctcctgacccacagggtcttcatgcccagcgcccaactctgcgctgcccttctgcaccacttccatgtggagcctgcgggtggcagcgagcaggagcgcagcacctacgtctgcaacaagaggcagcagatcttgcggctggtcagccagtgggtggccctgtatggctccatgctccacactgaccctgtggccaccagcttcctccagaaactctcagacctggtgggcagggacacccgactcagcaacctgctgagggagcagtggccagagaggcggcgatgccacaggttggagaatggctgtgggaatgcatctcctcagatgaaggcccggaacttgcctgtttggctccccaaccaggacgagccccttcctggcagcagctgtgccatccaagttggggataaagtcccctatgacatctgccggccagaccactcagtgttgaccctgcagctgcctgtgacagcctccgtgagagaggtgatggcagcgttggcccaggaggatggctggaccaaggggcaggtgctggtgaaggtcaattctgcaggtgatgccattggcctgcagccagatgcccgtggtgtggccacatctctggggctcaatgagcgtctctttgttgtcaacccacaggaagtgcatgagctgatcccacaccctgaccagctggggcccactgtgggctctgctgaggggctggacctggtgagtgccaaggacctggcaggccagctgacggaccacgactggagcctcttcaacagtatccaccaggtggagctgatccactatgtgctgggcccccagcatctgcgggatgtcaccaccgccaacctggagcgcttcatgcgccgcttcaatgagctgcagtactgggtggccaccgagctgtgtctctgccccgtgcccggcccccgggcccagctgctcaggaagttcattaagctggcggcccacctcaaggagcagaagaatctcaattccttctttgccgtcatgtttggcctcagcaactcggccatcagccgcctagcccacacctgggagcggctgcctcacaaagtccggaagctgtactccgccctcgagaggctgctggatccctcatggaaccaccgggtataccgactggccctcgccaagctctcccctcctgtcatccccttcatgccccttcttctcaaagacatgaccttcattcatgagggaaaccacacactagtggagaatctcatcaactttgagaagatgagaatgatggccagagccgcgcggatgctgcaccactgccgaagccacaaccctgtgcctctctcaccactcagaagccgagtttcccacctccacgaggacagccaggtggcgaggatttccacatgctcggagcagtccctgagcacccggagtccagccagcacctgggcttatgtccagcagctgaaggtcattgacaaccagcgggaactctcccgcctctcccgagagctggagccatgaggaggggctgggactggagctggagcaggcacttgcagccgggaaagccagggtgtgccgggccaagatactcacaggctggccacagctgggcaaggctctccgtggagtggactcgagtccctggagcaggcagtgtggaggcagccatcccctgtgatgactggcagctaaggaggacctcggagtggacccgagccaggaataacgaatgacccaaggccaaggaagggaggacagagaggccccaggagtgggtggagagtggagtgcgctgggacgttgtgtgcaatagagaggtctccacacc

SEQ ID NO: 39238 - DNA, 3294 bp, Artificial Sequence
  derived and/or modified sequence
gtgccagctggctccttcgtctgagacgaaggcgcaggctcggggctccctgtcgccggtggctgggtggcgtccccccaccacgcccccacccctctactcacccaagaggagcctctccaccgagccctgcatcctgctgccctggcagccagtccagctaggcactggcccagttcactgtacctggacttacccactggaaaagaaacatgaaggtgggctggccaggtgagagctgctggcaggtgggcctggctgtggaggatagcccagctctgggagcaccgcgggtgggagccctccctgacgtggtgccggaggggacactactcaacatggtgttgagaaggatgcaccggccccgaagctgctcctaccagctgctgctggagcaccagcgtccgagctgcatccaggggctgcgctggacaccactcaccaacagcgaggagtccctggatttcagcgagagcctggagcaggcctccacagagcgggtgctcagggctgggaggcagctgcatcggcatctgctggccacctgcccaaacctcatccgagaccggaagtaccaccttaggctctatcggcagtgctgctctggccgggagctggtggatgggatcttggccctgggacttggggtccattcccggagccaagttgtgggaatctgccaggtgctgctggatgaaggtgccctctgccatgtgaaacacgactgggccttccaggaccgagatgcccaattctaccggttccccgggcccgagcccgagcccgtgagaactcatgagatggaggaggagttggccgaagctgtggccctgctctcccagcgggggcctgacgccctgctcactgtggcacttcgaaagcccccaggtcagcgcacggatgaagagctggacctcatctttgaggagctgctgcacatcaaggctgtggcccacctctccaactcggtgaagcgagaattagcggctgttctgctctttgaaccacacagcaaggcagggaccgtgttgttcagccagggggacaagggcacttcgtggtacattatctggaagggatctgtcaacgtggtgacccatggcaaggggctggtgaccaccctgcatgagggagatgattttggacagctggctctggtgaatgatgcaccccgggcagccaccatcatcctgcgagaagacaactgtcatttcctgcgtgtggacaagcaggacttcaaccgtatcatcaaggatgtggaggcaaagaccatgcggctggaagaacatggcaaagtggtgctggtgctggagagagcctctcagggcgccggcccttcccgacccccaaccccaggcaggaaccggtatacagtgatgtctggcaccccagagaagatcctagagcttctgttggaggccatgggaccagattccagtgctcatgacccaacagagacattcctcagcgacttcctcctgacccacagggtcttcatgcccagcgcccaactctgcgctgcccttctgcaccacttccatgtggagcctgcgggtggcagcgagcaggagcgcagcacctacgtctgcaacaagaggcagcagatcttgcggctggtcagccagtgggtggccctgtatggctccatgctccacactgaccctgtggccaccagcttcctccagaaactctcagacctggtgggcagggacacccgactcagcaacctgctgagggagcagtggccagagaggcggcgatgccacaggttggagaatggctgtgggaatgcatctcctcagatgaaggcccggaacttgcctgtttggctccccaaccaggacgagccccttcctggcagcagctgtgccatccaagttggggataaagtcccctatgacatctgccggccagaccactcagtgttgaccctgcagctgcctgtgacagcctccgtgagagaggtgatggcagcgttggcccaggaggatggctggaccaaggggcaggtgctggtgaaggtcaattctgcaggtgatgccattggcctgcagccagatgcccgtggtgtggccacatctctggggctcaatgagcgtctctttgttgtcaacccacaggaagtgcatgagctgatcccacaccctgaccagctggggcccactgtgggctctgctgaggggctggacctggtgagtgccaaggacctggcaggccagctgacggaccacgactggagcctcttcaacagtatccaccaggtggagctgatccactatgtgctgggcccccagcatctgcgggatgtcaccaccgccaacctggagcgcttcatgcgccgcttcaatgagctgcagtactgggtggccaccgagctgtgtctctgccccgtgcccggcccccgggcccagctgctcaggaagttcattaagctggcggcccacctcaaggagcagaagaatctcaattccttctttgccgtcatgtttggcctcagcaactcggccatcagccgcctagcccacacctgggagcggctgcctcacaaagtccggaagctgtactccgccctcgagaggctgctggatccctcatggaaccaccgggtataccgactggccctcgccaagctctcccctcctgtcatccccttcatgccccttcttctcaaagacatgaccttcattcatgagggaaaccacacactagtggagaatctcatcaactttgagaagatgagaatgatggccagagccgcgcggatgctgcaccactgccgaagccacaaccctgtgcctctctcaccactcagaagccgagtttcccacctccacgaggacagccaggtggcgaggatttccacatgctcggagcagtccctgagcacccggagtccagccagcacctgggcttatgtccagcagctgaaggtcattgacaaccagcgggaactctcccgcctctcccgagagctggagccatgaggaggggctgggactggagctggagcaggcacttgcagccgggaaagccagggtgtgccgggccaagatactcacaggctggccacagctgggcaaggctctccgtggagtggactcgagtccctggagcaggcagtgtggaggcagccatcccctgtgatgactggcagctaaggaggacctcggagtggacccgagccaggaataacgaatgacccaaggccaaggaagggaggacagagaggccccaggagtgggtggagagtggagtgcgctgggacgttgtgtgcaatagagaggtctccacacc

SEQ ID NO: 39239 - DNA, 4092 bp, Artificial Sequence
  derived and/or modified sequence
ggatccccttatcaaagctgatgggggtcgctggggaccccccagccttttgctagagcctgcacggctgtgcgagcttgaaaagaaacatgaaggtgggctggccaggtgagagctgctggcaggtgggcctggctgtggaggatagcccagctctgggagcaccgcgggtgggagccctccctgacgtggtgccggaggggacactactcaacatggtgttgagaaggatgcaccggccccgaagctgctcctaccagctgctgctggagcaccagcgtccgagctgcatccaggggctgcgctggacaccactcaccaacagcgaggagtccctggatttcagcgagagcctggagcaggcctccacagagcgggtgctcagggctgggaggcagctgcatcggcatctgctggccacctgcccaaacctcatccgagaccggaagtaccaccttaggctctatcggcagtgctgctctggccgggagctggtggatgggatcttggccctgggacttggggtccattcccggagccaagttgtgggaatctgccaggtgctgctggatgaaggtgccctctgccatgtgaaacacgactgggccttccaggaccgagatgcccaattctaccggttccccgggcccgagcccgagcccgtgagaactcatgagatggaggaggagttggccgaagctgtggccctgctctcccagcgggggcctgacgccctgctcactgtggcacttcgaaagcccccaggtcagcgcacggatgaagagctggacctcatctttgaggagctgctgcacatcaaggctgtggcccacctctccaactcggtgaagcgagaattagcggctgttctgctctttgaaccacacagcaaggcagggaccgtgttgttcagccagggggacaagggcacttcgtggtacattatctggaagggatctgtcaacgtggtgacccatggcaaggggctggtgaccaccctgcatgagggagatgattttggacagctggctctggtgaatgatgcaccccgggcagccaccatcatcctgcgagaagacaactgtcatttcctgcgtgtggacaagcaggacttcaaccgtatcatcaaggatgtggaggcaaagaccatgcggctggaagaacatggcaaagtggtgctggtgctggagagagcctctcagggcgccggcccttcccgacccccaaccccaggcaggaaccggtatacagtgatgtctggcaccccagagaagatcctagagcttctgttggaggccatgggaccagattccagtgctcatgacccaacagagacattcctcagcgacttcctcctgacccacagggtcttcatgcccagcgcccaactctgcgctgcccttctgcaccacttccatgtggagcctgcgggtggcagcgagcaggagcgcagcacctacgtctgcaacaagaggcagcagatcttgcggctggtcagccagtgggtggccctgtatggctccatgctccacactgaccctgtggccaccagcttcctccagaaactctcagacctggtgggcagggacacccgactcagcaacctgctgagggagcagtggccagagaggcggcgatgccacaggttggagaatggctgtgggaatgcatctcctcagatgaaggtgtctgcctggccccagtttctttcctctgctcctcctggactgcaggcccctccttcgccccctgaccctgaggggctctgtgggcgtgggaagctctcctcccacagacacacccttgggtctctgataggtgttcacggggcccttgctgcatgtggtgccctgggccaggccgtgccaggaggcgcagaggcctaaggtggcctccctcctcgcccactccctgactcaatgggccttttattccttttgggaggtaattcatgcccacaggtagagcctgggagatgaggaatggtggctggagttggcccctgaggcccacggggctcctggtggccagtgctgtgggagctcagaggaaggcgaggcccctccctggaaagtcagagggggccccaggccattctcagctggggcttaaagggaagcaaagaggggatgagaagatgtgactgcagccaggatttggttgaggaatggtgggagaaagaactggaaaggtagattaggttggtggtggggagggctgcactgggaataaaatccaggggcctcaccatccagcaggctccccatggtcccaccctactgtgtgtcccagcccctgcctgctggagactcttactggcttcttctcctccgcaggcgaagcccgttctcccctcagggcctttgcacttatcccttagcctggaagggtctttctctggctctgcctggcaggatccttctcgttctcatctcagccaaatgctgggttcccagacaggccccctcccgtctccctatccggagcaccctcccctttctcccaccacgctctgccttggtgtcctctgtgattttcttcaaagcactctcgccatgtggagttgttttctttgcctacttgctttctgtcctttggtatctctcccatcccactggagagttgacttccctcctgcgggcccccacctccgcttctccttgctcacatgctgcctggctcttggctgacgctcagaaactgatgtgggctcaccctcgcaggccgggcactgcgctaggtgctgatgctgcacctcattcaaccctggcctgtggggctgcagtcaggcaaggggcagagcagttcaacaacccgtgatgtgcagtgacacgggacactttccctgaatgtgcactggagtcggctcttccaactgtagtccgctcctgaaaacgggaggggaagagccaactccagtgcagattcagggaaagtgtcccgtgtaagcgactactggagttgagagctgcagggggcaagggtggaggaagaagaggattcctggtgggcaaacccaggaggaaagggaacccaggaggaggatccctggaggagcgagagtaagagtaggaccccagagcaggcaggaggtgggcagggccccctgggccaaggacaggggtctgatctttgtcctaagagcagtgcaaaccattaaaggggtttgagccaaggttggcaaagtctgatttgtgttttgaataggtcagctaaagagcctgggctttctccagcagacaatggacgccactgaagtcgagtgcgggagcttcacagggctctggtcaggcagattggaggaggagggctggaggcacctgggagggaggaggaggagcatagttgggccattggagtagataaggagtgaggcctcgtgggcaggtggaactggagttagcctgggcaggggaggagggggcacagaagacccacttcaaagaagaatcttcaaagcaagatgacaagctacggaagtgtggaggagcctggagctggggagaatggctggggaacagagtggtctgggaggcaggatgcaaggatccgatgggtatatggagtgtgaggtaatggatcattcatgtggaaggatgcagggggtttttgagaccagggtttggaagagagttcagcactgctggtagttttgggaatcacccatgtgcaggcgacacatgaggcagtaaggaactctgcaggggtccctgagatttggaaatgtagggaagagcaatggattgaggtccgaacctggaggatctgctatacgcagagctgggaggagggacagagtcagtaccagagtcggaaaaaagcagggtgggaaggggaacctgagtcaggagacttgcctggcaggcgctgccctgccagcagaggcctgacagtggtttccatgaactgcatccctgctgtgggctgggacagggccactgacacagtatcggagcacagagggggaaaggagcaggagggattccaactctgccagttagcagctgtgtggctttgggcatgttacttaacctctctgagcctcatttatttcatccataaaatggaaataaaaataatacttttgtcaaa

SEQ ID NO: 39240 - DNA, 3370 bp, Artificial Sequence
  derived and/or modified sequence
ggatccccttatcaaagctgatgggggtcgctggggaccccccagccttttgctagagcctgcacggctgtgcgagcttgaaaagaaacatgaaggtgggctggccaggtgagagctgctggcaggtgggcctggctgtggaggatagcccagctctgggagcaccgcgggtgggagccctccctgacgtggtgccggaggggacactactcaacatggtgttgagaaggatgcaccggccccgaagctgctcctaccagctgctgctggagcaccagcgtccgagctgcatccaggggctgcgctggacaccactcaccaacagcgaggagtccctggatttcagcgagagcctggagcaggcctccacagagcgggtgctcagggctgggaggcagctgcatcggcatctgctggccacctgcccaaacctcatccgagaccggaagtaccaccttaggctctatcggcagtgctgctctggccgggagctggtggatgggatcttggccctgggacttggggtccattcccggagccaagttgtgggaatctgccaggtgctgctggatgaaggtgccctctgccatgtgaaacacgactgggccttccaggaccgagatgcccaattctaccggttccccgggcccgagcccgagcccgtgagaactcatgagatggaggaggagttggccgaagctgtggccctgctctcccagcgggggcctgacgccctgctcactgtggcacttcgaaagcccccaggtcagcgcacggatgaagagctggacctcatctttgaggagctgctgcacatcaaggctgtggcccacctctccaactcggtgaagcgagaattagcggctgttctgctctttgaaccacacagcaaggcagggaccgtgttgttcagccagggggacaagggcacttcgtggtacattatctggaagggatctgtcaacgtggtgacccatggcaaggggctggtgaccaccctgcatgagggagatgattttggacagctggctctggtgaatgatgcaccccgggcagccaccatcatcctgcgagaagacaactgtcatttcctgcgtgtggacaagcaggacttcaaccgtatcatcaaggatgtggaggcaaagaccatgcggctggaagaacatggcaaagtggtgctggtgctggagagagcctctcagggcgccggcccttcccgacccccaaccccaggcaggaaccggtatacagtgatgtctggcaccccagagaagatcctagagcttctgttggaggccatgggaccagattccagtgctcatgacccaacagagacattcctcagcgacttcctcctgacccacagggtcttcatgcccagcgcccaactctgcgctgcccttctgcaccacttccatgtggagcctgcgggtggcagcgagcaggagcgcagcacctacgtctgcaacaagaggcagcagatcttgcggctggtcagccagtgggtggccctgtatggctccatgctccacactgaccctgtggccaccagcttcctccagaaactctcagacctggtgggcagggacacccgactcagcaacctgctgagggagcagtggccagagaggcggcgatgccacaggttggagaatggctgtgggaatgcatctcctcagatgaaggcccggaacttgcctgtttggctccccaaccaggacgagccccttcctggcagcagctgtgccatccaagttggggataaagtcccctatgacatctgccggccagaccactcagtgttgaccctgcagctgcctgtgacagcctccgtgagagaggtgatggcagcgttggcccaggaggatggctggaccaaggggcaggtgctggtgaaggtcaattctgcaggtgatgccattggcctgcagccagatgcccgtggtgtggccacatctctggggctcaatgagcgtctctttgttgtcaacccacaggaagtgcatgagctgatcccacaccctgaccagctggggcccactgtgggctctgctgaggggctggacctggtgagtgccaaggacctggcaggccagctgacggaccacgactggagcctcttcaacagtatccaccaggtggagctgatccactatgtgctgggcccccagcatctgcgggatgtcaccaccgccaacctggagcgcttcatgcgccgcttcaatgagctgcagtactgggtggccaccgagctgtgtctctgccccgtgcccggcccccgggcccagctgctcaggaagttcattaagctggcggcccacctcaaggagcagaagaatctcaattccttctttgccgtcatgtttggcctcagcaactcggccatcagccgcctagcccacacctgggagcggctgcctcacaaagtccggaagctgtactccgccctcgagaggctgctggatccctcatggaaccaccgggtataccgactggccctcgccaagctctcccctcctgtcatccccttcatgccccttcttctcaaagacatgaccttcattcatgagggaaaccacacactagtggagaatctcatcaactttgagaagatgagaatgatggccagagccgcgcggatgctgcaccactgccgaagccacaaccctgtgcctctctcaccactcagaagccgagtttcccacctccacgaggacagccaggtggcgaggatttccacatgctcggagcagtccctgagcacccggagtccagccagcacctgggcttatgtccagcagctgaaggtcattgacaaccagcgggaactctcccgcctctcccgagagctggagccatgaggaggggctgggactggagctggagcaggcacttgcagccgggaaagccagggtgtgccgggccaagatactcacaggctggccacagctgggcaaggctctccgtggagtggactcgagtccctggagcaggcagtgtggaggcagccatcccctgtgatgactggcagctaaggaggacctcggagtggacccgagccaggaataacgaatgacccaaggccaaggaagggaggacagagaggccccaggagtgggtggagagtggagtgcgctgggacgttgtgtgcaatagagaggtctccacaccagatgtcttccagattctgtgcctctggctttgttgtccagccaggcctgcagtttattttcacagtggacagagagagagagagaggctgcatgtgtgtaccgtgtgtggcaagggcagggccttggcctggggcaggggccccctgctttctttccacagctttcttccaacagcaggcagtggggctgcgggcctg

SEQ ID NO: 39241 - protein, 858 aa, Artificial Sequence
  derived and/or modified sequence
MAELSEEALLSVLPTIRVPKAGDRVHKDECAFSFDTPESEGGLYICMNTFLGFGKQYVERHFNKTGQRVYLHLRRTRRPKEEDPATGTGDPPRKKPTRLAIGVEGGFDLSEEKFELDEDVKIVILPDYLEIARDGLGGLPDIVRDRVTSAVEALLSADSASRKQEVQAWDGEVRQVSKHAFSLKQLDNPARIPPCGWKCSKCDMRENLWLNLTDGSILCGRRYFDGSGGNNHAVEHYRETGYPLAVKLGTITPDGADVYSYDEDDMVLDPSLAEHLSHFGIDMLKMQKTDKTMTELEIDMNQRIGEWELIQESGVPLKPLFGPGYTGIRNLGNSCYLNSVVQVLFSIPDFQRKYVDKLEKIFQNAPTDPTQDFSTQVAKLGHGLLSGEYSKPVPESGDGERVPEQKEVQDGIAPRMFKALIGKGHPEFSTNRQQDAQEFFLHLINMVERNCRSSENPNEVFRFLVEEKIKCLATEKVKYTQRVDYIMQLPVPMDAALNKEELLEYEEKKRQAEEEKMALPELVRAQVPFSSCLEAYGAPEQVDDFWSTALQAKSVAVKTTRFASFPDYLVIQIKKFTFGLDWVPKKLDVSIEMPEELDISQLRGTGLQPGEEELPDIAPPLVTPDEPKGSLGFYGNEDEDSFCSPHFSSPTSPMLDESVIIQLVEMGFPMDACRKAVYYTGNSGAEAAMNWVMSHMDDPDFANPLILPGSSGPGSTSAAADPPPEDCVTTIVSMGFSRDQALKALRATNNSLERAVDWIFSHIDDLDAEAAMDISEGRSAADSISESVPVGPKVRDGPGKYQLFAFISHMGTSTMCGHYVCHIKKEGRWVIYNDQKVCASEKPPKDLGYIYFYQRVAS

SEQ ID NO: 39242 - DNA, 3181 bp, Artificial Sequence
  derived and/or modified sequence
gggactgggaacggtgggagccgccgtgtgtggagaagctgctgccggtgtcatggcggagctgagtgaggaggcgctgctgtcagtattaccgacgatccgggtccctaaggctggagaccgggtccacaaagacgagtgcgccttctccttcgacacgccggagtctgaggggggcctctacatctgtatgaacacgtttctgggctttgggaaacagtatgtggagagacatttcaataagaccggccagcgagtctacttgcacctccggcggacccggcgcccgaaagaggaggaccctgctacaggcactggagacccaccccggaagaagcccacgcggctggctattggtgttgaaggcggatttgaccttagcgaggagaagtttgaattagacgaggatgtgaagattgtcattttgccagattacctggagattgcccgggatggactggggggactgcctgacattgtcagagatcgggtgaccagtgcagtggaggccctactgtcggccgactcagcctcccgcaagcaggaggtgcaggcatgggatggggaagtacggcaggtgtctaagcatgccttcagcctcaagcagttggacaaccctgctcgaatccctccctgtggctggaagtgctccaagtgtgacatgagagagaacctgtggctcaacctgactgatggctccatcctctgtgggcgacgctacttcgatggcagtgggggcaacaaccacgctgtggagcactaccgagagacaggctacccgttagctgtcaagctgggcaccatcacccctgatggagctgacgtgtactcatatgatgaggatgacatggtcctggaccccagcctggctgagcacctgtcccacttcggcatcgacatgctgaagatgcagaagacagacaagacgatgactgagttggagatagacatgaaccagcggattggtgaatgggagctgatccaggagtcaggtgtgccactcaagcccctgtttgggcctggctacacaggcatccggaacctgggtaacagctgctacctcaactctgtggtccaggtgctcttcagcatccctgacttccagaggaagtatgtggataagctggagaagatcttccagaatgccccgacggaccctacccaggatttcagcacccaggtggccaagctgggccatggccttctctccggggagtattccaagccagtaccggagtcgggcgatggggagcgggtgccagaacagaaggaagttcaagatggcattgcccctcggatgttcaaggccctcatcggcaagggccaccctgaattctccaccaaccggcagcaggatgcccaggagttcttccttcaccttatcaacatggtggagaggaattgccggagctctgaaaatcctaatgaagtgttccgcttcttggtggaggaaaagatcaagtgcctggccacagagaaggtgaagtacacccagcgagttgactacatcatgcagctgcctgtgcccatggatgcagcccttaacaaagaggagcttctggagtacgaggagaagaagcggcaagccgaagaggagaagatggcactgccagaactggttcgggcccaggtgcccttcagctcttgcctggaggcctacggggcccctgagcaggtcgatgacttctggagcacggccctgcaggccaagtcagtagctgtcaagaccacacgatttgcctcattccctgactacctggtcatccagatcaagaagttcaccttcggcttagactgggtgcccaagaaactggatgtgtccatcgagatgccagaggagctcgacatctcccagttgaggggcacagggctgcagcccggagaggaggagctgccagacattgccccacccctggtcactccggatgagcccaaaggtagccttggtttctatggcaacgaagacgaagactccttctgctcccctcacttctcctctccgacatcgcccatgctggatgaatcagtcatcatccagctggtggagatgggattccctatggacgcctgccgcaaagctgtctactacacgggcaacagcggggctgaggccgccatgaactgggtcatgtcacacatggatgatccagattttgcaaaccccctcatcctgcctggctctagtgggccgggctccacaagcgcagcagccgacccccctcctgaggactgtgtgaccaccattgtctccatgggcttctcccgggaccaggccttgaaagcgctgcgggccacgaacaatagtttagaacgggctgtggactggatcttcagtcacattgacgacctggatgctgaagctgccatggacatctcagagggccgctcagctgccgactccatctctgagtctgtgccagtgggacctaaagtccgggatggtcctggaaagtatcagctctttgccttcattagtcacatgggcacctctaccatgtgtggtcactacgtctgccacatcaagaaagaaggcagatgggtgatctacaatgaccagaaagtgtgtgcctccgagaagccgcccaaggacctgggctacatctacttctaccagagagtggccagctaagagcctgcctcaccccttaccaatgagggcaggggaagaccacctggcatgagggagaggggctgagggatggacttcagcccctctgctctgtaccctttttccttttgtccccggcagcagggaagaagctggaggccgtgggagaatggctgggcagagcagaggggcagcgatagactctggggatggagcaggacggggacgggaggggccggccacctgtctgtaaggagactttgttgcttcccctgcccccggaatccacagtgctctgcttctctgtgtcgccccgcccagccccctggtgtggagggaggggtctcgtttgtgcgcgtgggtgtagctttgtgcatcctctcccagtggagcgatcacctgtgcctcccctccccctttgtttgcccctgtgtggttggtcaaggagggatgtgagggaaatagggaccccccgacttgccctcctgcctcagtctttcccccaccctgtctcttccttgtccttctctggaaaatgccaaaatacacgatgtgaataaaagtacaacggct

SEQ ID NO: 39243 - DNA, 2577 bp, Artificial Sequence
  derived and/or modified sequence
atggccgagctgagcgaggaggccctgctgagcgtgctgcccaccatcagagtgcccaaggccggcgacagagtgcacaaggacgagtgcgccttcagcttcgacacccccgagagcgagggcggcctgtacatctgcatgaacaccttcctgggcttcggcaagcagtacgtggagagacacttcaacaagaccggccagagagtgtacctgcacctgagaagaaccagaagacccaaggaggaggaccccgccaccggcaccggcgacccccccagaaagaagcccaccagactggccatcggcgtggagggcggcttcgacctgagcgaggagaagttcgagctggacgaggacgtgaagatcgtgatcctgcccgactacctggagatcgccagagacggcctgggcggcctgcccgacatcgtgagagacagagtgaccagcgccgtggaggccctgctgagcgccgacagcgccagcagaaagcaggaggtgcaggcctgggacggcgaggtgagacaggtgagcaagcacgccttcagcctgaagcagctggacaaccccgccagaatccccccctgcggctggaagtgcagcaagtgcgacatgagagagaacctgtggctgaacctgaccgacggcagcatcctgtgcggcagaagatacttcgacggcagcggcggcaacaaccacgccgtggagcactacagagagaccggctaccccctggccgtgaagctgggcaccatcacccccgacggcgccgacgtgtacagctacgacgaggacgacatggtgctggaccccagcctggccgagcacctgagccacttcggcatcgacatgctgaagatgcagaagaccgacaagaccatgaccgagctggagatcgacatgaaccagagaatcggcgagtgggagctgatccaggagagcggcgtgcccctgaagcccctgttcggccccggctacaccggcatcagaaacctgggcaacagctgctacctgaacagcgtggtgcaggtgctgttcagcatccccgacttccagagaaagtacgtggacaagctggagaagatcttccagaacgcccccaccgaccccacccaggacttcagcacccaggtggccaagctgggccacggcctgctgagcggcgagtacagcaagcccgtgcccgagagcggcgacggcgagagagtgcccgagcagaaggaggtgcaggacggcatcgcccccagaatgttcaaggccctgatcggcaagggccaccccgagttcagcaccaacagacagcaggacgcccaggagttcttcctgcacctgatcaacatggtggagagaaactgcagaagcagcgagaaccccaacgaggtgttcagattcctggtggaggagaagatcaagtgcctggccaccgagaaggtgaagtacacccagagagtggactacatcatgcagctgcccgtgcccatggacgccgccctgaacaaggaggagctgctggagtacgaggagaagaagagacaggccgaggaggagaagatggccctgcccgagctggtgagagcccaggtgcccttcagcagctgcctggaggcctacggcgcccccgagcaggtggacgacttctggagcaccgccctgcaggccaagagcgtggccgtgaagaccaccagattcgccagcttccccgactacctggtgatccagatcaagaagttcaccttcggcctggactgggtgcccaagaagctggacgtgagcatcgagatgcccgaggagctggacatcagccagctgagaggcaccggcctgcagcccggcgaggaggagctgcccgacatcgccccccccctggtgacccccgacgagcccaagggcagcctgggcttctacggcaacgaggacgaggacagcttctgcagcccccacttcagcagccccaccagccccatgctggacgagagcgtgatcatccagctggtggagatgggcttccccatggacgcctgcagaaaggccgtgtactacaccggcaacagcggcgccgaggccgccatgaactgggtgatgagccacatggacgaccccgacttcgccaaccccctgatcctgcccggcagcagcggccccggcagcaccagcgccgccgccgaccccccccccgaggactgcgtgaccaccatcgtgagcatgggcttcagcagagaccaggccctgaaggccctgagagccaccaacaacagcctggagagagccgtggactggatcttcagccacatcgacgacctggacgccgaggccgccatggacatcagcgagggcagaagcgccgccgacagcatcagcgagagcgtgcccgtgggccccaaggtgagagacggccccggcaagtaccagctgttcgccttcatcagccacatgggcaccagcaccatgtgcggccactacgtgtgccacatcaagaaggagggcagatgggtgatctacaacgaccagaaggtgtgcgccagcgagaagccccccaaggacctgggctacatctacttctaccagagagtggccagctag

SEQ ID NO: 39244 - DNA, 2577 bp, Artificial Sequence
  derived and/or modified sequence
atggcagaactttctgaagaagctcttttaagtgtcctgcccacaattcgtgttccaaaagctggagaccgcgttcacaaagacgagtgcgcatttagctttgatactcccgagagcgaaggcgggctctacatttgcatgaacacctttttgggatttggtaaacaatacgtagagagacactttaacaaaacaggtcagcgggtttatctacatctgagacgcaccagaaggcccaaggaagaggatccggccaccggaaccggcgatcctcccaggaaaaaaccaacccgactagccattggagtggagggcggctttgatctgtctgaggagaagttcgagctagacgaagacgttaagatcgtgatcctccctgattacctggaaattgctcgtgacggtttaggcgggctgcccgatattgtgcgcgaccgcgtgacctctgccgtggaagcactgctgtcagccgatagtgcctctcggaagcaggaggtgcaagcctgggacggggaagtccgtcaggtctctaagcatgcattctcactgaagcagctggataacccagcccgaatcccaccttgtggatggaaatgctcaaagtgcgacatgcgagagaacctgtggctcaacctgacagacgggagtatcctttgtggtaggaggtattttgacggctctggtggaaacaatcatgccgtcgaacactatagagaaaccgggtatcctctggccgttaagttggggacaatcacccctgatggagccgacgtctatagctatgacgaagatgatatggtacttgacccttctctagccgaacacctgtcacattttgggattgatatgctgaagatgcagaaaaccgataaaaccatgaccgagttagaaatcgacatgaatcagaggataggcgagtgggaactgattcaagaatcgggagttcctctgaaacccctcttcggacccggttacaccgggattagaaacttaggcaactcatgctatctcaactcagtggtccaggtgctgttttccattccagattttcagagaaagtacgtagataaactcgagaaaatcttccaaaatgctccaactgaccctacccaggatttttcgacccaggtggccaaactaggacatgggctgttatctggtgagtactcaaagcccgtgcctgagagcggggatggagaacgcgtgcccgagcagaaagaagtgcaagacggcattgcgccgaggatgtttaaggccttgatcggtaaggggcacccggagttcagtaccaatcggcagcaggacgcccaggagttcttcctgcatctgattaacatggtggagcgaaattgcaggtcctctgaaaaccctaacgaggtgtttcgtttcctggtggaagagaagattaaatgccttgcgactgagaaggtgaagtatacgcagcgggtggattacatcatgcaactccccgttccaatggatgctgcactgaacaaggaggaactcctcgagtatgaggagaagaagagacaggcggaggaggagaagatggcgctgcctgagctggtaagagcacaagtcccttttagtagctgccttgaagcatacggggccccagagcaggtcgacgatttctggagtaccgcgttacaggctaaatctgttgccgtgaaaactactcggtttgcaagcttccccgattatctggtgattcaaatcaaaaagtttacatttggactggactgggtgcctaagaaactcgacgtgtctatcgaaatgcccgaagagctagatatctcacaactgaggggcacaggcctgcagcccggcgaggaggagctgccagatatagcgcccccactcgtgacccccgatgagcccaagggaagtttgggcttctatggtaacgaggatgaagatagcttctgtagtccacacttttctagccctacgagcccaatgttagatgagtctgttatcattcagcttgtcgagatggggtttccaatggacgcatgtcggaaagctgtttattacacgggcaattccggcgccgaggccgccatgaattgggtgatgtcccacatggacgaccctgacttcgcaaacccgctcatcctccctggatcttctggccctgggtccacctctgctgctgctgatccaccgcctgaggactgtgtcacaacgattgtgagcatgggctttagtcgagaccaggcactcaaggcactccgtgctactaataactctctggaaagagctgtcgattggattttctcacatatagacgatctagacgcggaggccgcaatggatatctcggagggacgatcggccgccgactctatctccgagtcagtgccagtaggcccgaaagtgcgagacggcccggggaagtaccagctgttcgccttcatcagtcatatgggaacttctacaatgtgtggacattacgtatgtcatattaagaaagaggggaggtgggtgatatataatgatcagaaggtgtgtgcatcagaaaaaccccctaaggacctgggatacatctatttctaccagagggtggcctcgtag

SEQ ID NO: 39245 - DNA, 2577 bp, Artificial Sequence
  derived and/or modified sequence
atggccgagctgtctgaggaggccctgctgtctgtgctgcccaccatccgggtgcccaaggccggggacagagtgcacaaggatgaatgtgccttctcctttgacaccccagagagcgagggcggcctgtacatctgcatgaacaccttcctgggctttgggaagcagtatgtggagcggcacttcaacaagacaggccagagggtgtacctgcacctgcggaggacccggcggcccaaggaggaggaccctgccaccggcaccggggacccccccaggaagaagcccacccggctggccatcggcgtggagggcggctttgacctgtctgaggagaagtttgagctggatgaagatgtgaagatcgtcatcctgcctgactacctggagatcgccagagatggcctgggcggcctgcctgacatcgtgcgggacagagtgaccagcgctgtggaggccctgctgtctgctgacagcgccagcaggaagcaggaggtgcaggcctgggatggagaggtgcggcaggtgtccaagcacgccttcagcctgaagcagctggacaacccagcccgcatccccccctgtggctggaagtgcagcaaatgtgacatgagggagaacctgtggctgaacctgacagatggcagcatcctgtgtggccgccgctactttgatggcagcggcggcaacaaccacgctgtggagcactaccgggagaccggctaccccctggccgtgaagctgggcaccatcaccccagatggagcagatgtgtacagctatgatgaagatgacatggtgctggaccccagcctggccgagcacctgagccactttggaattgacatgctgaagatgcagaagacagacaagaccatgacagagctggagattgacatgaaccagagaattggagagtgggagctgatccaggagagcggcgtgcccctgaagcccctgtttggacctggctacacaggcatccggaacctgggcaacagctgctacctgaacagcgtggtgcaggtgctcttcagcatcccagacttccagaggaaatatgtggacaagctggagaagatcttccagaatgcccccacagaccccacccaggacttcagcacccaggtggccaagctgggccacggcctgctgagcggggagtacagcaagcctgtgcctgagagcggagatggagagcgggtgcctgagcagaaggaggtgcaggacggcatcgcccccaggatgttcaaggccctgattggcaagggccaccctgagttcagcaccaaccggcagcaggatgcccaggagttcttcctgcacctgatcaacatggtggagaggaactgccgcagcagcgagaaccccaatgaggtgttccgcttcctggtggaggagaagatcaagtgcctggccacagagaaggtgaagtacacccagagggtggactacatcatgcagctgcctgtgcccatggatgctgccctgaacaaggaggagctgctggagtatgaggagaagaagaggcaggccgaggaggagaagatggccctgcctgagctggtgcgggcccaggtgcccttcagcagctgcctggaggcctacggggcccctgagcaggtggatgacttctggagcacagccctgcaggccaagtctgtggccgtgaagaccaccaggtttgccagcttcccagactacctggtgatccagatcaagaagttcaccttcggcctggactgggtgcccaagaagctggatgtgtccattgagatgcctgaggagctggacatcagccagctgcggggcaccggcctgcagcctggagaggaggagctgcctgacatcgccccacccctggtgaccccagatgagcccaagggcagcctgggcttctatggaaatgaagatgaagattccttctgcagcccccacttcagcagccccaccagccccatgctggatgagagcgtcatcatccagctggtggagatgggcttccccatggatgcctgcaggaaggctgtgtactacacaggcaacagcggggctgaggccgccatgaactgggtgatgagccacatggatgatcctgactttgccaaccccctcatcctgcccggcagcagcggccctggcagcaccagcgctgctgctgaccccccacctgaggactgtgtgaccaccatcgtgtccatgggcttcagccgggaccaggccctgaaggccctgcgggccaccaacaacagcctggagagagctgtggactggatcttcagccacattgatgacctggatgctgaggccgccatggacatcagcgagggccgctctgctgctgacagcatcagcgagagcgtgcctgtgggccccaaggtgagagatggccctgggaagtaccagctgtttgccttcatcagccacatgggcaccagcaccatgtgtggccactacgtgtgccacatcaagaaggagggccgctgggtgatctacaatgaccagaaggtgtgtgccagcgagaagccacccaaggacctgggctacatctacttctaccagagggtggccagctag

SEQ ID NO: 39246 - DNA, 2577 bp, Artificial Sequence
  derived and/or modified sequence
atggccgagctgagcgaggaggccctgctgagcgtgctgcccaccattagggttcccaaagccggcgacagagtgcataaggatgagtgcgcattttcatttgacactcctgagagtgagggaggcctgtacatctgtatgaacaccttcctcgggttcggaaagcagtacgtggaaagacacttcaataaaacaggccagagggtctacctacacctgcgcagaactagaagaccaaaggaagaagatcccgccaccgggaccggagacccacctaggaaaaaaccaacacgcctggccatcggagtggaaggtggtttcgacctaagtgaggagaagttcgagttggacgaggacgtcaaaattgtgattcttcccgactatctcgagatcgcccgggatgggctggggggtctccctgacattgtacgcgatagagtgacaagtgcagtggaggccctgctttctgcagacagcgcctcacggaaacaggaggtgcaggcatgggacggcgaagtgaggcaggtctccaaacatgcttttagcctgaaacagcttgataatcctgctcggatccctccctgtggttggaagtgctcaaaatgcgatatgcgagagaacctgtggctcaacctcacagacggctcaatcttgtgtggtagaaggtacttcgatggcagtggtggaaacaatcatgccgtcgaacactatcgcgagaccggctacccgcttgcagtgaagctgggtacaattacccctgacggcgccgacgtctactcctatgatgaggatgatatggtgctggatcctagtcttgcagaacacctgtcccactttggcatcgacatgctgaagatgcagaaaacggacaagacaatgacggaactcgaaattgatatgaatcagaggatcggggagtgggaactgattcaggagagcggcgtgccccttaaacccctcttcggtcccggctacacaggaatcaggaatctgggaaactcctgttaccttaactctgtggtacaagtactgttcagtatcccggactttcagcgcaaatacgtggacaagttggagaaaatctttcagaacgcccctacggaccctacacaggatttctctacgcaggtggccaaactaggccacggactgctgagtggggaatacagcaagccggttcccgagagcggagacggagagagagtcccagagcaaaaagaagttcaggacggaatagcccctcggatgttcaaggctttgatcggaaaggggcacccagaattcagtacgaataggcaacaggacgctcaggaattctttctgcatcttattaatatggtagagaggaattgtcgttcctctgagaatccaaacgaggtctttcgctttttagtagaggagaagatcaagtgcctggccacggaaaaggtaaagtacacacagcgtgtagattacatcatgcaactgccggtccccatggacgctgcgctgaacaaagaagaactgcttgagtacgaagagaaaaaacgtcaggctgaggaagagaaaatggcactgcccgagctggttagagcacaggtgccattctcatcatgtctggaagcctacggagcccctgagcaggtggacgacttctggtccaccgccctgcaggctaagtcagtggccgtaaagacgacccgctttgcgagctttcccgactacctggtcatccagatcaaaaaattcacctttggtctagactgggtgcccaaaaagttggatgtaagcattgagatgcccgaagaattagatatcagtcagctacggggcacaggcttgcagccaggggaggaggaactcccggacattgcacctcctctcgtgactcctgatgaacctaagggctctttgggcttctacgggaacgaggacgaggactcattctgctctccccatttctcatccccgacatcccccatgcttgacgagtccgtgatcatacagcttgtggaaatgggattccccatggatgcatgcaggaaggccgtttattatacgggcaacagcggagcagaggctgcaatgaattgggttatgagccacatggacgaccccgacttcgcgaacccgctcatcctccccgggagctcaggaccagggagcacttccgcagctgctgatccaccacccgaggattgcgttaccacgatcgttagcatggggttctccagggatcaagctcttaaggccctacgggccacaaacaattccttggaacgggcagtcgactggatttttagccatattgacgatcttgacgcagaagcagcgatggacatctcagagggccgcagcgctgccgacagcatctcagagagcgtcccagtgggacccaaggtgcgggacggcccagggaaatatcagctatttgcattcattagccacatgggcacgtcgaccatgtgcggacattacgtctgccacattaaaaaggaaggacgctgggtgatttataatgatcagaaagtttgcgccagcgagaagccccctaaagaccttggctacatttacttctaccaaagagtcgccagttag

SEQ ID NO: 39247 - DNA, 2577 bp, Artificial Sequence
  derived and/or modified sequence
atggctgaactgagcgaagaagcactgcttagcgttctccccacaatccgggtacctaaggctggcgatagggtgcacaaagatgagtgtgctttttcgttcgatacacctgagtctgaaggcggtctgtatatctgcatgaacacgttcctcgggttcggcaagcagtacgtcgaaaggcactttaataaaaccgggcaaagggtctacttgcacctgcgccgaaccaggagacccaaagaggaggaccctgcaacgggcacaggggatcctcccagaaagaagcctacaaggctggcaataggagtggagggcggttttgacctgagtgaggaaaaattcgaactcgacgaagatgtcaagatcgtaattctcccagactatcttgagatcgctagagacgggctcggcggactcccggatatcgtccgcgatagagtcaccagcgctgttgaagctctgctgtccgcggactcagcgtccagaaagcaagaggtccaggcgtgggacggcgaagtgaggcaagtgtccaaacacgccttctccctgaaacagcttgataacccggcacgaatacccccatgtggctggaagtgctccaagtgcgacatgagagaaaatctgtggctgaatctgactgatggctcaatcctctgcggcaggagatacttcgatggctccggcggaaacaatcatgcggtggagcactaccgagaaacggggtatcctctggccgtgaagctgggcacaattacgcctgatggcgctgatgtctactcctatgacgaggacgacatggttcttgatcccagcctcgcagagcatctaagccactttggcatcgatatgctcaagatgcaaaagaccgataagaccatgaccgaattagaaattgacatgaatcagcgcatcggggaatgggagctcatccaggagtccggtgtcccccttaagcctctcttcgggcctggatatactgggattcggaacctcgggaattcctgttaccttaactctgttgtccaggttcttttctccatccccgactttcagcgaaaatatgtggataagctagaaaagatctttcagaatgctcccacagaccctacacaggactttagcacacaagtcgcgaagcttggccacgggttgctctcaggcgaatattcaaagcccgtgccagagtctggagatggcgagcgggtgcctgagcaaaaagaggttcaggacggcatagcacctagaatgttcaaagctcttatcggcaaagggcatcctgagttctctacaaaccgccagcaggacgcacaggagttctttttgcacctgatcaatatggtcgagcgaaattgcaggtcaagcgagaatccaaacgaagtattccggtttctggtggaagaaaagattaagtgcctggccaccgaaaaggtgaaatacacccagcgggtcgattatataatgcagctgccagtgccgatggatgctgccctcaacaaggaggaacttctcgaatacgaggagaaaaaacggcaggcagaggaggaaaaaatggcccttcccgagctggtgcgcgcacaggtaccgttctccagttgtctggaggcttatggcgcacctgagcaggtggacgatttctggtctaccgcattgcaggcaaaaagtgttgccgtgaaaacaacaaggtttgcctcattccccgactacctagtgatccaaattaagaaatttacctttggcctcgactgggtgcccaaaaagttggacgtttccatcgagatgccggaagaattggacatctcccagctgcgtggaaccggactgcaaccgggtgaggaggagctgcccgatatcgccccacctctagtcacccccgacgaacccaaaggctcattaggattttacgggaacgaagacgaggatagtttttgcagccctcattttagttctccaacctctcccatgcttgacgaaagtgtgataatccagcttgtagagatgggattcccgatggatgcttgcaggaaggctgtttactatacaggcaactcaggggcagaagccgctatgaattgggtaatgagccacatggacgatcccgatttcgccaatccattgatcctcccaggaagttcaggtcccggaagtacgagcgcagccgctgacccccctcctgaggactgcgtcaccaccatcgtttctatgggtttcagtagagaccaggcgctaaaggctctgagggccacaaacaacagtctagagcgtgcggtggactggattttcagccacattgacgatttggatgctgaagcagcaatggacatctccgaggggaggagcgccgctgacagcatcagtgagagtgtgcctgtcggacctaaagttcgtgatggacccggaaaatatcaactgtttgcttttatttcgcatatgggaacttcaacaatgtgcggccactatgtctgccatatcaaaaaggagggccgatgggtgatctacaacgatcaaaaggtctgcgccagcgagaagccccctaaggacctgggttatatttatttttatcagcgggtggcctcgtag

SEQ ID NO: 39248 - protein, 543 aa, Artificial Sequence
  derived and/or modified sequence
MLLRSKPALPPPLMLLLLGPLGPLSPGALPRPAQAQDVVDLDFFTQEPLHLVSPSFLSVTIDANLATDPRFLILLGSPKLRTLARGLSPAYLRFGGTKTDFLIFDPKKESTFEERSYWQSQVNQDICKYGSIPPDVEEKLRLEWPYQEQLLLREHYQKKFKNSTYSRSSVDVLYTFANCSGLDLIFGLNALLRTADLQWNSSNAQLLLDYCSSKGYNISWELGNEPNSFLKKADIFINGSQLGEDFIQLHKLLRKSTFKNAKLYGPDVGQPRRKTAKMLKSFLKAGGEVIDSVTWHHYYLNGRTATKEDFLNPDVLDIFISSVQKVFQVVESTRPGKKVWLGETSSAYGGGAPLLSDTFAAGFMWLDKLGLSARMGIEVVMRQVFFGAGNYHLVDENFDPLPDYWLSLLFKKLVGTKVLMASVQGSKRRKLRVYLHCTNTDNPRYKEGDLTLYAINLHNVTKYLRLPYPFSNKQVDKYLLRPLGPHGLLSKSVQLNGLTLKMVDDQTLPPLMEKPLRPGSSLGLPAFSYSFFVIRNAKVAACI

SEQ ID NO: 39249 - protein, 97 aa, Artificial Sequence
  derived and/or modified sequence
MLLLLGPLGPLSPGALPRPAQAQDVVDLDFFTQEPLHLVSPSFLSVTRPGKKVWLGETSSAYGGGAPLLSDTFAAGFMWLDKLGLSARMGIEVVMRQ

SEQ ID NO: 39250 - DNA, 1632 bp, Artificial Sequence
  derived and/or modified sequence
atgctgctgagaagcaagcccgccctgcccccccccctgatgctgctgctgctgggccccctgggccccctgagccccggcgccctgcccagacccgcccaggcccaggacgtggtggacctggacttcttcacccaggagcccctgcacctggtgagccccagcttcctgagcgtgaccatcgacgccaacctggccaccgaccccagattcctgatcctgctgggcagccccaagctgagaaccctggccagaggcctgagccccgcctacctgagattcggcggcaccaagaccgacttcctgatcttcgaccccaagaaggagagcaccttcgaggagagaagctactggcagagccaggtgaaccaggacatctgcaagtacggcagcatcccccccgacgtggaggagaagctgagactggagtggccctaccaggagcagctgctgctgagagagcactaccagaagaagttcaagaacagcacctacagcagaagcagcgtggacgtgctgtacaccttcgccaactgcagcggcctggacctgatcttcggcctgaacgccctgctgagaaccgccgacctgcagtggaacagcagcaacgcccagctgctgctggactactgcagcagcaagggctacaacatcagctgggagctgggcaacgagcccaacagcttcctgaagaaggccgacatcttcatcaacggcagccagctgggcgaggacttcatccagctgcacaagctgctgagaaagagcaccttcaagaacgccaagctgtacggccccgacgtgggccagcccagaagaaagaccgccaagatgctgaagagcttcctgaaggccggcggcgaggtgatcgacagcgtgacctggcaccactactacctgaacggcagaaccgccaccaaggaggacttcctgaaccccgacgtgctggacatcttcatcagcagcgtgcagaaggtgttccaggtggtggagagcaccagacccggcaagaaggtgtggctgggcgagaccagcagcgcctacggcggcggcgcccccctgctgagcgacaccttcgccgccggcttcatgtggctggacaagctgggcctgagcgccagaatgggcatcgaggtggtgatgagacaggtgttcttcggcgccggcaactaccacctggtggacgagaacttcgaccccctgcccgactactggctgagcctgctgttcaagaagctggtgggcaccaaggtgctgatggccagcgtgcagggcagcaagagaagaaagctgagagtgtacctgcactgcaccaacaccgacaaccccagatacaaggagggcgacctgaccctgtacgccatcaacctgcacaacgtgaccaagtacctgagactgccctaccccttcagcaacaagcaggtggacaagtacctgctgagacccctgggcccccacggcctgctgagcaagagcgtgcagctgaacggcctgaccctgaagatggtggacgaccagaccctgccccccctgatggagaagcccctgagacccggcagcagcctgggcctgcccgccttcagctacagcttcttcgtgatcagaaacgccaaggtggccgcctgcatctag

SEQ ID NO: 39251 - DNA, 1632 bp, Artificial Sequence
  derived and/or modified sequence
atgttactgcggtccaagccagctctaccaccgcctctgatgcttctgctgcttggacctctggggccactgagtcctggagccctgccaaggcctgcacaggcccaggatgtggtggacctcgacttctttactcaggagcctttgcacctagttagcccaagttttctcagtgtgaccatcgacgccaatctggctactgatcctcgctttttgattctgctgggctcccctaaactccggactctagctcgcggactcagcccagcctacctgcgttttggcgggacaaaaactgactttctcattttcgatccaaagaaggagagtaccttcgaagaacggtcttattggcagagtcaggtgaaccaggacatttgcaagtatggctccattcctccagacgtggaagaaaagctgcgcctcgaatggccctatcaggaacagttactgttgcgggaacactaccagaagaagttcaaaaatagcacctacagtagatcttcagttgacgtgctgtatacgtttgccaactgctccgggctggatttgatctttggcctaaatgccttactaagaactgccgacctccaatggaattcatcaaacgcacaactgctgcttgattattgctccagtaaagggtataatatttcatgggagctgggcaacgagcctaacagttttctgaagaaggctgatatcttcattaacggcagtcagcttggcgaggatttcatccaactgcataagctgctccgaaagagcactttcaaaaatgcaaaactctatggccctgacgtcggccagcctcggaggaaaacagccaaaatgcttaaatccttcctaaaggcgggcggcgaagtgattgattccgttacctggcaccactactatctcaatggacgcacagctacaaaagaagatttcctgaaccccgacgtgctagatattttcatttcatcagtccagaaagtattccaggtagttgagtccaccaggcctggcaagaaagtgtggcttggtgagacctccagtgcctatggcggtggcgcaccattgctctccgacacctttgcagccggtttcatgtggctggacaaactgggcttaagtgcgcgtatgggaatcgaggtcgtaatgcggcaagtattcttcggcgctggaaactatcacctggttgacgagaacttcgacccgcttcctgattattggctatccctgctgtttaaaaagttggttggaacaaaggtacttatggcatcagttcagggctcgaaaaggcgcaagcttagggtgtatctccactgtaccaacacagacaacccaagatacaaagaaggggacctcaccctgtacgctatcaacctgcacaatgtgacaaagtacttgcggctgccttatcctttttctaacaagcaggtggacaaatatctgcttcggcccctcggcccacacggcctgctatccaagtctgttcagcttaatggccttaccctgaagatggtcgacgaccagactctcccccctctcatggagaagccccttcgcccgggcagctcactaggccttcctgcatttagctatagctttttcgtgatcaggaacgccaaggtggccgcctgtatttag

SEQ ID NO: 39252 - DNA, 1632 bp, Artificial Sequence
  derived and/or modified sequence
atgctgctgagatctaagcccgccctgcctccccccttgatgttgctgttactgggacccctgggaccccttagcccaggcgccctgcctaggcccgcccaggcacaagatgttgttgatctcgattttttcacgcaggagccactccatctggtctctccttccttcctctctgtcacaatcgacgccaacctggcaactgatcccagattccttattctgttggggagtcctaagctgagaactctcgcacggggcttatccccggcgtacctacgcttcggtggtacaaaaacagactttttaatcttcgaccctaagaaggaaagtacttttgaggaaaggagctattggcaaagccaggtgaatcaggatatttgtaaatatggtagtatcccgcctgacgtggaagagaaactcagactggaatggccgtaccaggaacagctgctgctgagagagcactaccaaaagaaatttaaaaattctacatactctcgctcttccgtcgacgtcctctatacgtttgcgaattgtagcggcctggatttaatcttcggcctgaacgcactgttgagaaccgctgacctgcagtggaactcaagtaacgcacagctgctcctggactattgctcttctaagggttacaatatctcctgggagctcggcaacgaaccgaacagcttcttgaaaaaagctgatattttcattaacggaagtcaactaggggaagacttcatccagttgcataagctacttcggaaatccaccttcaaaaatgccaaattgtatggtcccgacgtgggacaacctcgccgtaagacagccaagatgctaaagtcctttctgaaggccggcggagaggtgatagatagcgttacatggcatcactactacctaaacggaagaaccgccaccaaagaggatttcctcaatcccgatgttctggatatttttataagctcagtccagaaggtgtttcaagtagtggaaagcaccaggcccggtaagaaagtttggctgggagagacctctagtgcgtatggaggaggcgcccccttgctgtctgataccttcgcggctggatttatgtggttggacaaattggggctctccgctcgcatgggaattgaggttgttatgcgccaagtgtttttcggagcaggcaactatcacctggtcgatgagaattttgatcccctgcctgactattggctctccctcttgtttaagaaattggttggaacaaaagtcctgatggcttctgtgcagggaagtaaaagacgcaaactccgtgtgtatctgcattgcacgaataccgataacccgagatataaggagggggatctgaccctctacgcgatcaacctgcataacgtaaccaaatatctcagactgccctacccattctcgaacaagcaggttgataaatacctgttgcgccctcttggaccacacggcttactgtccaagtctgtacagttgaacggtctgaccctgaagatggtggatgaccagaccctccctccactgatggaaaagcctctgcggccgggctcgtcacttggtcttcctgccttctcttattctttttttgtcatcagaaatgcaaaagttgcagcgtgtatctag

SEQ ID NO: 39253 - DNA, 4615 bp, Artificial Sequence
  derived and/or modified sequence
aaggagaaaagggcgctggggctcggcgggaggaagtgctagagctctcgactctccgctgcgcggcagctggcggggggagcagccaggtgagcccaagatgctgctgcgctcgaagcctgcgctgccgccgccgctgatgctgctgctcctggggccgctgggtcccctctcccctggcgccctgccccgacctgcgcaagcacaggacgtcgtggacctggacttcttcacccaggagccgctgcacctggtgagcccctcgttcctgtccgtcaccattgacgccaacctggccacggacccgcggttcctcatcctcctgggttctccaaagcttcgtaccttggccagaggcttgtctcctgcgtacctgaggtttggtggcaccaagacagacttcctaattttcgatcccaagaaggaatcaacctttgaagagagaagttactggcaatctcaagtcaaccaggatatttgcaaatatggatccatccctcctgatgtggaggagaagttacggttggaatggccctaccaggagcaattgctactccgagaacactaccagaaaaagttcaagaacagcacctactcaagaagctctgtagatgtgctatacacttttgcaaactgctcaggactggacttgatctttggcctaaatgcgttattaagaacagcagatttgcagtggaacagttctaatgctcagttgctcctggactactgctcttccaaggggtataacatttcttgggaactaggcaatgaacctaacagtttccttaagaaggctgatattttcatcaatgggtcgcagttaggagaagattttattcaattgcataaacttctaagaaagtccaccttcaaaaatgcaaaactctatggtcctgatgttggtcagcctcgaagaaagacggctaagatgctgaagagcttcctgaaggctggtggagaagtgattgattcagttacatggcatcactactatttgaatggacggactgctaccaaggaagattttctaaaccctgatgtattggacatttttatttcatctgtgcaaaaagttttccaggtggttgagagcaccaggcctggcaagaaggtctggttaggagaaacaagctctgcatatggaggcggagcgcccttgctatccgacacctttgcagctggctttatgtggctggataaattgggcctgtcagcccgaatgggaatagaagtggtgatgaggcaagtattctttggagcaggaaactaccatttagtggatgaaaacttcgatcctttacctgattattggctatctcttctgttcaagaaattggtgggcaccaaggtgttaatggcaagcgtgcaaggttcaaagagaaggaagcttcgagtataccttcattgcacaaacactgacaatccaaggtataaagaaggagatttaactctgtatgccataaacctccataatgtcaccaagtacttgcggttaccctatcctttttctaacaagcaagtggataaataccttctaagacctttgggacctcatggattactttccaaatctgtccaactcaatggtctaactctaaagatggtggatgatcaaaccttgccacctttaatggaaaaacctctccggccaggaagttcactgggcttgccagctttctcatatagtttttttgtgataagaaatgccaaagttgctgcttgcatctgaaaataaaatatactagtcctgacactgaatttttcaagtatactaagagtaaagcaactcaagttataggaaaggaagcagataccttgcaaagcaactagtgggtgcttgagagacactgggacactgtcagtgctagatttagcacagtattttgatctcgctaggtagaacactgctaataataatagctaataataccttgttccaaatactgcttagcattttgcatgttttacttttatctaaagttttgttttgttttattatttatttatttatttattttgagacagaatctctctctgtcacccaggctggagtgccatggtgcgatcttggctcactgcaactttaagcaattctcctgcctcagcttcctgagtagctgggattataggcgtgtgccaccacgcccagctactttctatattttttgtagagatggagtttcgccatattggccaagctggtctcgaactcctgtcctcgaactcctgtcctcaagtgatccacccgcctcagcctctcaaagtgctgggattacaggtgtgagccaccacacccagcagtgttttatttttgagacagggtatcattctgttgcccaggcttgagtgcagtggtgcaatcatagatcactgcagccttttaactcctgggctcaagtcatcctcctgcttagcctcccaagtagctaggaccacagacacatgccatcacacttggctatttttaaaaaattttttgtagagatggggtctcgctatgttacccaaactggtcctgaactcctggactcaattgatcctcccaccttggccttccaggtgctgggatttctttgggagtacagcatggtacagcaggagatcatttgatgttacctctgtgcagtgttgctagtcagcgaaagactataatacctgtggggacagcgattagccaccacaaccagtctttatttaaagttattaaaaatggctgggcgcagtggctcacacctgtaatcctagcactttgggaggccgaggcagatggatcacctgacgtgaggaatttgataccagcctggccaacatggtgaaaccccatctctactaaaaaatacaaaaattagctgggtgtggtcctgtagtcccagctacttgggaggctggggcaggagaattacttgaacccaggaggcagaggttgcagtgagccgagattgtgccactgcactccagcctgggtgacagagagagattccatctcaaaaaaacaagttattaaaaatgtatatgaatgctcctaatatggtcaggaagcaaggaagcgaaggatatattatgagttttaagaaggtgcttagctgtatatttatctttcaaaatgtattagaagattttagaattctttccttcatgtgccatctctacaggcacccatcagaaaaagcatactgccgttaccgtgaaactggttgtaaaagagaaactatctatttgcaccttaaaagacagctagattttgctgattttcttctttcggttttctttgtcagcaataatatgtgagaggacagattgttagatatgatagtataaaaaatggttaatgacaattcagaggcgaggagattctgtaaacttaaaattactataaatgaaattgatttgtcaagaggataaattttagaaaacacccaataccttataactgtctgttaatgcttgctttttctctacctttcttccttgtttcagttgggaagcttttggctgcaagtaacagaaactcctaattcaaatggcttaagcaataaggaaatgtatattcccacataactagacgttcaaacaggccaggctccagcacttcagtacgtcaccagggatctgggttcttcccagctctctgctctgccatctttagcgctggcttcattctcagactctggtagcatgatggctgtagctgtttcatgggccccttcaaacctcatagcaaccagaggaagaaaatgagccattttttgagtctccttcatagacttgaataactctttttcagagcttctcacagcaaacctctcctcatgtctcctcatgtcttattgttcagaaatgggtaatgtggccatttcaccagtcactgccaacaacaacgaggttcctataattgtctctgagtaaccctttggaatggagagggtgttggtcagtctacaaactgaacactgcagttctgcgctttttaccagtgaaaaaatgtaattattttcccctcttaaggattaatattcttcaaatgtatgcctgttatggatatagtatctttaaaattttttattttaatagctttaggggtacacactttttgcttacaggggtgaattgtgtagtggtgaagactcggcttttaatgtacttgtcacctgagtgatgtacattgtacccaataggtaatttttcatccattaccctccttccgccctcttcccttctgagtctccaacatcccttataccactgtgtatgttcttgtgtacctacagctaagcttccacttataagtgagaacatgcagtatttggttttccattcctgagttacttcccttaggataacagcccccagttccgtccaagttgctgcaaaatacattattcttctttatggctgagtaatagtccatggtacatatataccacattttctttatccacttatcagttgatggacacttaggttaattccattcaatttcattcaatttaagtatatttgtaaggagctaaagctgaaaattaaattttagatctttcaatactcttaaattttatatgtaagtggtttttatattttcacatttgaaataaagtaatttttataatcttga

SEQ ID NO: 39254 - DNA, 4652 bp, Artificial Sequence
  derived and/or modified sequence
ccagcgctgctccccgggcgctcctccccgggcgctcctccccaggcctcccgggcgcttggatcccggccatctccgcacccttcaagtgggtgtgggtgatttcctggcggggggagcagccaggtgagcccaagatgctgctgcgctcgaagcctgcgctgccgccgccgctgatgctgctgctcctggggccgctgggtcccctctcccctggcgccctgccccgacctgcgcaagcacaggacgtcgtggacctggacttcttcacccaggagccgctgcacctggtgagcccctcgttcctgtccgtcaccattgacgccaacctggccacggacccgcggttcctcatcctcctgggttctccaaagcttcgtaccttggccagaggcttgtctcctgcgtacctgaggtttggtggcaccaagacagacttcctaattttcgatcccaagaaggaatcaacctttgaagagagaagttactggcaatctcaagtcaaccaggatatttgcaaatatggatccatccctcctgatgtggaggagaagttacggttggaatggccctaccaggagcaattgctactccgagaacactaccagaaaaagttcaagaacagcacctactcaagaagctctgtagatgtgctatacacttttgcaaactgctcaggactggacttgatctttggcctaaatgcgttattaagaacagcagatttgcagtggaacagttctaatgctcagttgctcctggactactgctcttccaaggggtataacatttcttgggaactaggcaatgaacctaacagtttccttaagaaggctgatattttcatcaatgggtcgcagttaggagaagattttattcaattgcataaacttctaagaaagtccaccttcaaaaatgcaaaactctatggtcctgatgttggtcagcctcgaagaaagacggctaagatgctgaagagcttcctgaaggctggtggagaagtgattgattcagttacatggcatcactactatttgaatggacggactgctaccaaggaagattttctaaaccctgatgtattggacatttttatttcatctgtgcaaaaagttttccaggtggttgagagcaccaggcctggcaagaaggtctggttaggagaaacaagctctgcatatggaggcggagcgcccttgctatccgacacctttgcagctggctttatgtggctggataaattgggcctgtcagcccgaatgggaatagaagtggtgatgaggcaagtattctttggagcaggaaactaccatttagtggatgaaaacttcgatcctttacctgattattggctatctcttctgttcaagaaattggtgggcaccaaggtgttaatggcaagcgtgcaaggttcaaagagaaggaagcttcgagtataccttcattgcacaaacactgacaatccaaggtataaagaaggagatttaactctgtatgccataaacctccataatgtcaccaagtacttgcggttaccctatcctttttctaacaagcaagtggataaataccttctaagacctttgggacctcatggattactttccaaatctgtccaactcaatggtctaactctaaagatggtggatgatcaaaccttgccacctttaatggaaaaacctctccggccaggaagttcactgggcttgccagctttctcatatagtttttttgtgataagaaatgccaaagttgctgcttgcatctgaaaataaaatatactagtcctgacactgaatttttcaagtatactaagagtaaagcaactcaagttataggaaaggaagcagataccttgcaaagcaactagtgggtgcttgagagacactgggacactgtcagtgctagatttagcacagtattttgatctcgctaggtagaacactgctaataataatagctaataataccttgttccaaatactgcttagcattttgcatgttttacttttatctaaagttttgttttgttttattatttatttatttatttattttgagacagaatctctctctgtcacccaggctggagtgccatggtgcgatcttggctcactgcaactttaagcaattctcctgcctcagcttcctgagtagctgggattataggcgtgtgccaccacgcccagctactttctatattttttgtagagatggagtttcgccatattggccaagctggtctcgaactcctgtcctcgaactcctgtcctcaagtgatccacccgcctcagcctctcaaagtgctgggattacaggtgtgagccaccacacccagcagtgttttatttttgagacagggtatcattctgttgcccaggcttgagtgcagtggtgcaatcatagatcactgcagccttttaactcctgggctcaagtcatcctcctgcttagcctcccaagtagctaggaccacagacacatgccatcacacttggctatttttaaaaaattttttgtagagatggggtctcgctatgttacccaaactggtcctgaactcctggactcaattgatcctcccaccttggccttccaggtgctgggatttctttgggagtacagcatggtacagcaggagatcatttgatgttacctctgtgcagtgttgctagtcagcgaaagactataatacctgtggggacagcgattagccaccacaaccagtctttatttaaagttattaaaaatggctgggcgcagtggctcacacctgtaatcctagcactttgggaggccgaggcagatggatcacctgacgtgaggaatttgataccagcctggccaacatggtgaaaccccatctctactaaaaaatacaaaaattagctgggtgtggtcctgtagtcccagctacttgggaggctggggcaggagaattacttgaacccaggaggcagaggttgcagtgagccgagattgtgccactgcactccagcctgggtgacagagagagattccatctcaaaaaaacaagttattaaaaatgtatatgaatgctcctaatatggtcaggaagcaaggaagcgaaggatatattatgagttttaagaaggtgcttagctgtatatttatctttcaaaatgtattagaagattttagaattctttccttcatgtgccatctctacaggcacccatcagaaaaagcatactgccgttaccgtgaaactggttgtaaaagagaaactatctatttgcaccttaaaagacagctagattttgctgattttcttctttcggttttctttgtcagcaataatatgtgagaggacagattgttagatatgatagtataaaaaatggttaatgacaattcagaggcgaggagattctgtaaacttaaaattactataaatgaaattgatttgtcaagaggataaattttagaaaacacccaataccttataactgtctgttaatgcttgctttttctctacctttcttccttgtttcagttgggaagcttttggctgcaagtaacagaaactcctaattcaaatggcttaagcaataaggaaatgtatattcccacataactagacgttcaaacaggccaggctccagcacttcagtacgtcaccagggatctgggttcttcccagctctctgctctgccatctttagcgctggcttcattctcagactctggtagcatgatggctgtagctgtttcatgggccccttcaaacctcatagcaaccagaggaagaaaatgagccattttttgagtctccttcatagacttgaataactctttttcagagcttctcacagcaaacctctcctcatgtctcctcatgtcttattgttcagaaatgggtaatgtggccatttcaccagtcactgccaacaacaacgaggttcctataattgtctctgagtaaccctttggaatggagagggtgttggtcagtctacaaactgaacactgcagttctgcgctttttaccagtgaaaaaatgtaattattttcccctcttaaggattaatattcttcaaatgtatgcctgttatggatatagtatctttaaaattttttattttaatagctttaggggtacacactttttgcttacaggggtgaattgtgtagtggtgaagactcggcttttaatgtacttgtcacctgagtgatgtacattgtacccaataggtaatttttcatccattaccctccttccgccctcttcccttctgagtctccaacatcccttataccactgtgtatgttcttgtgtacctacagctaagcttccacttataagtgagaacatgcagtatttggttttccattcctgagttacttcccttaggataacagcccccagttccgtccaagttgctgcaaaatacattattcttctttatggctgagtaatagtccatggtacatatataccacattttctttatccacttatcagttgatggacacttaggttaattccattcaatttcattcaatttaagtatatttgtaaggagctaaagctgaaaattaaattttagatctttcaatactcttaaattttatatgtaagtggtttttatattttcacatttgaaataaagtaatttttataatcttga

SEQ ID NO: 39255 - DNA, 1632 bp, Artificial Sequence
  derived and/or modified sequence
atgctgctgcggagcaagccagccctgcccccacccctgatgctgctgctgctgggccccctgggccccctgagccctggggccctgcccaggcctgcccaggcccaggatgtggtggacctggacttcttcacccaggagcccctgcacctggtgagccccagcttcctgtctgtgaccattgatgccaacctggccacagacccccgcttcctgatcctgctgggcagccccaagctgcggaccctggcccggggcctgagccctgcctacctgcgctttggaggcaccaagacagacttcctgatctttgaccccaagaaggagagcacctttgaggagaggagctactggcagagccaggtgaaccaggacatctgcaagtatggcagcatccccccagatgtggaggagaagctgcggctggagtggccctaccaggagcagctgctgctgcgggagcactaccagaagaagttcaagaacagcacctacagccgcagctctgtggatgtgctgtacacctttgccaactgcagcggcctggacctgatcttcggcctgaatgccctgctgaggacagctgacctgcagtggaacagcagcaatgcccagctgctgctggactactgcagcagcaagggctacaacatctcctgggagctgggcaatgagcccaacagcttcctgaagaaggctgacatcttcatcaatggcagccagctgggggaggacttcatccagctgcacaagctgctgaggaagagcaccttcaagaatgccaagctgtatggcccagatgtgggccagcccaggaggaagacagccaagatgctgaagagcttcctgaaggccggcggggaggtgattgacagcgtgacctggcaccactactacctgaatggaagaacagccaccaaggaggacttcctgaacccagatgtgctggacatcttcatcagctctgtgcagaaggtgttccaggtggtggagagcaccaggcctgggaagaaggtgtggctgggggagaccagcagcgcctacggcggcggggcccccctgctgagtgacacctttgctgctggcttcatgtggctggacaagctgggcctgagcgccaggatgggcatcgaggtggtgatgaggcaggtgttcttcggggccggcaactaccacctggtggatgagaactttgaccccctgcctgactactggctgagcctgctcttcaagaagctggtgggcaccaaggtgctgatggcctctgtgcagggcagcaagaggaggaagctgcgggtgtacctgcactgcaccaacacagacaacccccgctacaaggagggggacctgaccctgtatgccatcaacctgcacaacgtgaccaagtacctgcggctgccctaccccttcagcaacaagcaggtggacaagtacctgctgcggcccctgggcccccacggcctgctgagcaagtctgtgcagctgaatggcctgaccctgaagatggtggatgaccagaccctgccccccctgatggagaagcccctgcggcccggcagcagcctgggcctgcctgccttctcctacagcttcttcgtcatcagaaatgccaaggtggccgcctgcatctag

SEQ ID NO: 39256 - DNA, 1632 bp, Artificial Sequence
  derived and/or modified sequence
atgctgctgcggagcaagcccgccctgcccccccccctgatgctgctgttgctagggcctctcgggccgttatctccaggggctcttcctcgcccggctcaggcccaagatgtcgtcgacctggatttctttacccaagagccattgcacctggtgagcccctcctttctgtccgtgacaatcgacgcaaacctggccacggatccgcgattcctcattcttctggggagccctaaacttcgcacgctggcgagagggctgagtcccgcctatctcaggttcggaggtaccaaaactgattttctgatatttgacccgaagaaagagtcaacattcgaggagcggtcctactggcagtctcaggttaaccaggacatttgcaagtatgggagtatccctcctgacgttgaagagaagttaaggctggaatggccataccaggaacagttgttgttaagggagcactatcagaagaagtttaagaactctacatattcgcgaagctctgtggacgtgctatatactttcgcaaattgttctggcctggatcttatcttcgggctgaacgccttgctccgcacagcagatctccaatggaatagctccaacgcgcaattgctcctcgattactgtagcagcaaaggatataacatttcttgggagctgggcaatgaacctaattcctttctcaagaaggcagatatattcatcaatggttcacagctcggcgaggacttcatccaactccataagttactgagaaagtccacgttcaagaatgcaaagctgtacggaccggatgtgggacagccacggcggaagaccgccaaaatgctcaaaagctttcttaaggccggcggggaagtaatagacagcgtaacttggcaccattattatctcaacgggcgcactgccacaaaagaagacttcctgaatcctgacgtcctagacatttttataagctcagtgcaaaaggtatttcaggtggtagaatccacgcggccagggaaaaaggtctggctcggcgagacatcctcggcctatggcggcggggcaccactgttgtctgacacatttgccgcaggcttcatgtggctggacaagctggggctctccgctaggatgggcatagaggttgttatgcgccaagtgttcttcggagcaggaaactaccacctggtcgatgaaaatttcgaccccctgcctgactattggctaagtttgctgtttaagaagctggtgggcactaaagtgctgatggcgtccgtgcaaggctctaagcgccggaagctgcgggtttatctgcactgcacaaataccgataacccgagatacaaagaaggggacctcactctctatgcaataaatctgcataacgtgaccaagtatctgaggttaccttaccctttcagcaacaaacaagtggacaagtacctcctgcgaccgctaggtccacatggcttgctgtctaaatccgtgcagctgaatggactgacactgaagatggtggatgaccagacactgccaccactgatggagaaaccgctccgccctggtagtagcctgggcctccctgctttctcctacagttttttcgtcatacgcaacgccaaagtagccgcttgcatttag

SEQ ID NO: 39257 - DNA, 1632 bp, Artificial Sequence
  derived and/or modified sequence
atgctgctgcggagcaagcccgccctgcccccccccctgatgctgttgcttttgggcccgctgggtcctttatcccctggagctctccctcgaccagcccaagctcaggatgttgtggacttagatttcttcacgcaggagcccctgcatttggtgagccccagcttcctgtctgtgactatcgatgcaaatttagctactgacccacgctttctgatactgctcggcagtccaaagttacggactctggcaagaggtctctcgccagcatatctgcggttcggcggcacaaaaacagatttcctcatattcgacccgaagaaagagtccacctttgaggagcgaagctattggcagagccaggtgaatcaggacatctgcaaatatgggagcatccccccggatgtggaggaaaagctccgtttggagtggccataccaggaacagctcttactgcgggagcactaccaaaagaagttcaaaaattccacttactctagatcatctgtcgatgtgttatacaccttcgcaaattgctccgggctggacctgatttttggcttaaatgcactccttcggaccgctgatctgcaatggaattcgtcgaacgcccagctcctgctcgactactgctcttctaagggttataatatcagctgggaactgggtaacgagcccaatagttttctgaagaaagctgacatcttcattaatggcagtcagctgggcgaggattttatccagcttcacaagctcctacgcaaaagtaccttcaaaaatgctaaattgtatggaccagatgtggggcagccacgtcggaaaacggccaaaatgttgaagtcatttctcaaggcaggtggagaagtgattgactcagtaacctggcaccactactatctgaatggtcgtacggccacgaaagaggatttcttgaatcctgacgttctcgacattttcatctcatcagtgcaaaaagtcttccaggtcgtggagagcacaagacctggcaagaaggtttggctcggcgaaacttcatcagcatatggtggcggggctccactactaagcgataccttcgccgccggttttatgtggcttgacaagctgggactttccgccagaatgggcatagaggttgttatgcggcaggtctttttcggagcagggaactaccacttggtggacgagaactttgatcctctacccgactattggctgagcctattatttaagaagttggtgggaactaaggtgctaatggcctcagtgcaaggctccaagagacgtaagctccgcgtgtacctccattgcaccaacacagacaatccgcgctataaagagggagacttgactctctatgctatcaatctgcacaatgtgaccaagtatttacgtttgccatatcccttttctaataagcaggtggacaagtaccttttgagaccactggggccacacgggctgctgtccaagagcgttcagctgaatgggttaactttaaaaatggttgatgaccagactctgccacctctcatggaaaagccattgagacctgggagtagtctcggattgcctgcctttagctattcgttttttgtcattagaaacgccaaggtagctgcttgtatatag

SEQ ID NO: 39258 - DNA, 1632 bp, Artificial Sequence
  derived and/or modified sequence
atgctacttcggtcaaagcctgctttgcccccacccctcatgcttctgctcctcggacccctcggccctctttcacctggtgccctgcctagacccgcacaggcccaggatgttgtagatctggattttttcactcaagagcccttgcaccttgtgtccccatcatttctgtcagtgaccatagatgcaaacctggcaacggacccacgttttctaattctcctcggttctccaaagctacgcaccttggccagggggctatctcccgcatatttgaggttcggaggaacgaaaaccgacttcctgattttcgaccctaagaaagaaagcaccttcgaggagcggagctattggcagtctcaagttaaccaggatatttgtaagtacggaagtatcccgccagacgtcgaggagaaactgaggctggagtggccatatcaggagcagttattgctgagagaacactatcagaaaaaatttaaaaactcaacttatagcagatccagtgtggacgtactttacaccttcgctaactgctcaggccttgacttgatattcggtctcaacgcgctcctgagaaccgctgacctgcagtggaactcatcaaatgcacagcttctcttggattactgtagcagtaagggttacaacatcagttgggaactgggcaacgaaccgaactcattcctgaagaaagctgacattttcattaatggaagtcagctcggcgaagacttcattcagctccacaagctccttcggaaatccacattcaagaacgctaagctttatgggccagacgttgggcaacctcggagaaaaaccgccaaaatgctaaaatcgttcctgaaagcgggaggtgaggtgatcgacagcgtgacctggcaccactactatctgaacggcaggacagccaccaaagaggatttcctcaacccagatgtcctagatatattcatatcatctgtgcaaaaagtgtttcaggtggttgagtcaacacgtccaggtaagaaagtatggttgggcgaaactagctcagcctacggaggaggggcacccctcttatcagacaccttcgctgccggttttatgtggctggacaaattggggcttagcgctaggatgggaattgaagtcgttatgaggcaggtattctttggtgccggaaattaccatctggtggacgagaacttcgacccattaccagactattggttatccctcctattcaagaagttggtaggaactaaagttctgatggccagtgtgcagggctcaaagagaagaaagctgcgtgtctacttgcactgtaccaataccgataatccacgatataaagaaggtgatctaactctatacgcgatcaacctgcataatgtgactaagtatctacggctcccatacccattctccaacaagcaggtagataaatacctactgaggcctttaggacctcacggattgcttagcaagtctgtccaactcaacggacttacccttaagatggtggacgatcagactctcccacctttgatggagaaaccattgaggcctggaagcagcctgggactaccagccttctcgtattcatttttcgtgattcggaacgcaaaggtggcagcgtgcatctag

SEQ ID NO: 39259 - DNA, 1632 bp, Artificial Sequence
  derived and/or modified sequence
atgctcctccggtccaagcccgctttgcctcctccacttatgctgctgctgctgggccctctgggccctttgtcccccggagctctgccaagaccagctcaggcacaggatgtcgtcgacttggattttttcacacaagagcctctccatctggtgtctccaagctttttatctgtcacgattgatgctaacctggctacagaccccaggttcctgatcctgctgggctctcccaagctgcgtaccctggcacgtgggctctccccagcatacctgaggttcggcggaaccaagaccgattttctgatttttgatcccaaaaaagaatccacctttgaggagcggtcttattggcaatctcaggtcaatcaggatatatgcaaatacggctcaatccctccggacgtcgaggagaaactgcggttagagtggccgtaccaggaacagctactcctacgggagcactaccagaaaaagttcaagaacagtacctactcaaggtcaagtgtggacgtactgtatacgttcgcgaattgctccggactggacctgatttttggattgaatgcgttgcttcgcaccgcagacctgcagtggaactcttcaaatgcccaactcctgctagattactgcagctccaaagggtacaatatctcctgggaattggggaatgagccaaactcctttctgaagaaagctgacatttttatcaacgggtcacagcttggggaggattttatccagctccacaaattactcagaaagtcaacctttaagaatgctaagttgtacggcccagacgtgggccaaccccgaagaaaaacagctaagatgttgaagtcctttttgaaggccggaggggaagtcatagattccgttacatggcaccattactatcttaatggcagaaccgctactaaggaagacttcttgaatccagatgttctcgacatctttattagcagtgtgcaaaaggtgtttcaggtggtggagtccacccgccctggcaagaaagtgtggttaggcgagactagctctgcatacggtggaggggctccgctcctcagcgataccttcgctgcgggattcatgtggctcgataagctgggtctgtccgcaagaatgggcattgaagttgtgatgcgccaggtcttttttggcgctggaaactaccaccttgtggatgagaacttcgatcctcttcctgactactggctgtccttgctgttcaaaaagttggtgggcaccaaagtgcttatggccagtgtccagggatcaaagcggagaaagctgagggtgtacctgcactgcacaaacacagacaatcccagatacaaggagggggatctgacgctgtatgccatcaatctgcacaatgtgacaaagtacctccgacttccctacccgttttctaacaagcaggttgacaagtatttgctgcggccactcggtccacacgggcttctgagtaaaagcgtgcaactgaatggactcactctgaagatggtggatgatcaaactctgccgcctttgatggagaagcctcttagacccggttcctcccttggcttacctgccttcagttatagcttctttgtaatccgcaacgccaaagtcgccgcttgcatctag

SEQ ID NO: 39260 - protein, 128 aa, Artificial Sequence
  derived and/or modified sequence
MAPAKKGGEKKKGRSAINEVVTREYTINIHKRIHGVGFKKRAPRALKEIRKFAMKEMGTPDVRIDTRLNKAVWAKGIRNVPYRIRVRLSRKRNEDEDSPNKLYTLVTYVPVTTFKISVLNSVTVAKSP

SEQ ID NO: 39261 - protein, 115 aa, Artificial Sequence
  derived and/or modified sequence
MAPAKKGGEKKKGRSAINEVVTREYTINIHKRIHGVGFKKRAPRALKEIRKFAMKEMGTPDVRIDTRLNKAVWAKGIRNVPYRIRVRLSRKRNEDEDSPNKLYTLVTYVPVTTFK

SEQ ID NO: 39262 - DNA, 387 bp, Artificial Sequence
  derived and/or modified sequence
atggcccccgccaagaagggcggcgagaagaagaagggcagaagcgccatcaacgaggtggtgaccagagagtacaccatcaacatccacaagagaatccacggcgtgggcttcaagaagagagcccccagagccctgaaggagatcagaaagttcgccatgaaggagatgggcacccccgacgtgagaatcgacaccagactgaacaaggccgtgtgggccaagggcatcagaaacgtgccctacagaatcagagtgagactgagcagaaagagaaacgaggacgaggacagccccaacaagctgtacaccctggtgacctacgtgcccgtgaccaccttcaagatcagcgtgctgaacagcgtgaccgtggccaagagcccctag

SEQ ID NO: 39263 - DNA, 387 bp, Artificial Sequence
  derived and/or modified sequence
atggccccggcaaaaaaaggaggtgagaagaaaaagggaagatcagctataaatgaagtagttacaagagaatatactatcaacatacacaagagaatccacggagtgggctttaagaaacgcgctccccgggccctgaaggagattaggaagttcgccatgaaggaaatgggtactccagatgtgagaatcgacacccgactgaataaggcagtctgggcaaagggaattaggaatgtcccctatagaattagggtgcgcctgagtagaaagcgcaatgaggatgaagactctcccaacaagttatacacactggtgacttatgttccagtgacgaccttcaagatctccgtgctcaatagcgtaactgtcgcgaaatcaccctag

SEQ ID NO: 39264 - DNA, 387 bp, Artificial Sequence
  derived and/or modified sequence
atggccccagccaagaagggcggggagaagaagaagggccgcagcgccatcaatgaggtggtgacccgggagtacaccatcaacatccacaagaggatccacggcgtgggcttcaagaagagggccccccgggccctgaaggagatcaggaagtttgccatgaaggagatgggcaccccagatgtgagaattgacacccggctgaacaaggctgtgtgggccaagggcatcagaaatgtgccctaccgcatccgggtgcggctgagcaggaagagaaatgaagatgaggacagccccaacaagctgtacaccctggtgacctacgtgcctgtgaccaccttcaagatctctgtgctgaacagcgtgacagtggccaagagcccctag

SEQ ID NO: 39265 - DNA, 387 bp, Artificial Sequence
  derived and/or modified sequence
atggcccccgccaagaagggcggcgagaagaagaagggccggagcgccattaacgaggtggtcacacgggagtacaccattaacatacacaagcggatccacggggtcgggttcaagaagcgcgcgcctagggccctcaaggagataagaaagttcgcgatgaaagaaatgggcactcccgatgtgagaatcgataccaggctcaacaaggccgtgtgggctaagggcatccgtaacgtgccatacagaattcgagtgcgattgagtcggaaacgaaatgaagacgaagattcacctaacaaattatatacgctcgttacatacgtgccagtgacaacattcaagataagcgttctgaactcagttaccgtggcaaagtctccctag

SEQ ID NO: 39266 - DNA, 998 bp, Artificial Sequence
  derived and/or modified sequence
cgcgctcttcctttccaacttggacgctgcagaatggctcccgcaaagaagggtggcgagaagaaaaagggccgttctgccatcaacgaagtggtaacccgagaatacaccatcaacattcacaagcgcatccatggagtgggcttcaagaagcgtgcacctcgggcactcaaagagattcggaaatttgccatgaaggagatgggaactccagatgtgcgcattgacaccaggctcaacaaagctgtctgggccaaaggaataaggaatgtgccataccgaatccgtgtgcggctgtccagaaaacgtaatgaggatgaagattcaccaaataagctatatactttggttacctatgtacctgttaccactttcaaaatttctgtgctaaacagtgttacagtcgccaagagcccataaagggagccctcctggaagtggatgaggccttgggtctcggctcttcattgcttcctgagctgcagcagatgcctttacaaccaagctcaccgaggacgtctgtctcccatattaccctggcagagggccaggcctgttctacacggccggggtttcaacaaggtactgatgtcttctgcccttgcctcttcgacaggcaagtaataagacttaagtgaagagaattctttaggcacacaaattcacatttgatgtaatctcattatacttcctgatctgtgattgaaaactttcatttcgtaactagtatgtctgtcccacctttaaaaagtttttcattatgaaagtaagtatttgttagaattaagtctatttaaatgaaaaaaacttagatatgagtctgcatggcctcaggaaaatgatgttttaaaatagagattttaggttgtctgcactctagcttttttgtcgttttcttaaggcttttttaactgcatcaaaaattcagatacgaaacatacactaaaaaataatacatcatatcttaatttccactgaacttgatttaaattcagagt

SEQ ID NO: 39267 - DNA, 387 bp, Artificial Sequence
  derived and/or modified sequence
atggcgcctgccaaaaaaggaggtgagaaaaaaaaaggacggagcgctataaatgaggtggtcacacgggagtacaccatcaatattcacaaacggatccacggtgtgggtttcaaaaagcgggcaccccgtgctttaaaagaaatccgcaaatttgcaatgaaggagatgggaaccccagatgttcgcattgatacaaggcttaataaggcagtctgggcaaagggcataaggaacgtgccctacaggattcgggtcaggttgagtcgtaaacgcaatgaggatgaagactctccaaataagctttacacactggtcacttatgttcccgtgactactttcaagattagcgtgctgaacagcgtgaccgtggcaaaaagcccttag

SEQ ID NO: 39268 - protein, 886 aa, Artificial Sequence
  derived and/or modified sequence
MGMDLTCPFGISPACGAQASWSIFGADAAEVPGTRGHSQQEAAMPHIPEDEEPPGEPQAAQSPAGQQGPPAAGVSCSPTPTIVLTGDATSPEGETDKNLANRVHSPHKRLSHRHLKVSTASLTSVDPAGHIIDLVNDQLPDISISEEDKKKNLALLEEAKLVSERFLTRRGRKSRSSPGDSPSAVSPNLSPSASPTSSRSNSLTVPTPPEGDEADVSSPHPGEPNVPKGLADRKQNDQRKVSQGRLAPRPPPVEKSKEIAIEQKENFDPLQYPETTPKGLAPVTNSSGKMALNSPQPGPVESELGKQLLKTGWEGSPLPRSPTQDAAGVGPPASQGRGPAGEPMGPEAGSKAELPPTVSRPPLLRGLSWDSGPEEPGPRLQKVLAKLPLAEEEKRFAGKAGGKLAKAPGLKDFQIQVQPVRMQKLTKLREEHILMRNQNLVGLKLPDLSEAAEQEKGLPSELSPAIEEEESKSGLDVMPNISDVLLRKLRVHRSLPGSAPPLTEKEVENVFVQLSLAFRNDSYTLESRINQAERERNLTEENTEKELENFKASITSSASLWHHCEHRETYQKLLEDIAVLHRLAARLSSRAEVVGAVRQEKRMSKATEVMMQYVENLKRTYEKDHAELMEFKKLANQNSSRSCGPSEDGVPRTARSMSLTLGKNMPRRRVSVAVVPKFNALNLPGQTPSSSSIPSLPALSESPNGKGSLPVTSALPALLENGKTNGDPDCEASAPALTLSCLEELSQETKARMEEEAYSKGFQEGLKKTKELQDLKEEEEEQKSESPEEPEEVEETEEEEKGPRSSKLEELVHFLQVMYPKLCQHWQVIWMMAAVMLVLTVVLGLYNSYNSCAEQADGPLGRSTCSAAQRDSWWSSGLQHEQPTEQ

SEQ ID NO: 39269 - protein, 885 aa, Artificial Sequence
  derived and/or modified sequence
MGMDLTCPFGISPACGAQASWSIFGADAAEVPGTRGHSQQEAAMPHIPEDEEPPGEPQAAQSPAGQGPPAAGVSCSPTPTIVLTGDATSPEGETDKNLANRVHSPHKRLSHRHLKVSTASLTSVDPAGHIIDLVNDQLPDISISEEDKKKNLALLEEAKLVSERFLTRRGRKSRSSPGDSPSAVSPNLSPSASPTSSRSNSLTVPTPPDGDEADVSSPHPGEPNVPKGLADRKQNDQRKVSQGRLAPRPPPVEKSKEIAIEQKENFDPLQYPETTPKGLAPVTNSSGKMALNSPQPGPVESELGKQLLKTGWEGSPLPRSPTQDAAGVGPPASQGRGPAGEPMGPEAGSKAELPPTVSRPPLLRGLSWDSGPEEPGPRLQKVLAKLPLAEEEKRFAGKAGGKLAKAPGLKDFQIQVQPVRMQKLTKLREEHILMRNQNLVGLKLPDLSEAAEQEKGLPSELSPAIEEEESKSGLDVMPNISDVLLRKLRVHRSLPGSAPPLTEKEVENVFVQLSLAFRNDSYTLESRINQAERERNLTEENTEKELENFKASITSSASLWHHCEHRETYQKLLEDIAVLHRLAARLSSRAEVVGAVRQEKRMSKATEVMMQYVENLKRTYEKDHAELMEFKKLANQNSSRSCGPSEDGVPRTARSMSLTLGKNMPRRRVSVAVVPKFNALNLPGQTPSSSSIPSLPALSESPNGKGSLPVTSALPALLENGKTNGDPDCEASAPALTLSCLEELSQETKARMEEEAYSKGFQEGLKKTKELQDLKEEEEEQKSESPEEPEEVEETEEEEKGPRSSKLEELVHFLQVMYPKLCQHWQVIWMMAAVMLVLTVVLGLYNSYNSCAEQADGPLGRSTCSAAQRDSWWSSGLQHEQPTEQ

SEQ ID NO: 39270 - protein, 904 aa, Artificial Sequence
  derived and/or modified sequence
MGMDLTCPFGISPACGAQASWSIFGADAAEVPGTRGHSQQEAAMPHIPEDEEPPGEPQAAQSPAGQGPPAAGVSCSPTPTIVLTGDATSPEGETDKNLANRVHSPHKRLSHRHLKVSTASLTSVDPAGHIIDLVNDQLPDISISEEDKKKNLALLEEAKLVSERFLTRRGRKSRSSPGDSPSAVSPNLSPSASPTSSRSNSLTVPTPPGLDVCSGPPSPLPGAPPQQKGDEADVSSPHPGEPNVPKGLADRKQNDQRKVSQGRLAPRPPPVEKSKEIAIEQKENFDPLQYPETTPKGLAPVTNSSGKMALNSPQPGPVESELGKQLLKTGWEGSPLPRSPTQDAAGVGPPASQGRGPAGEPMGPEAGSKAELPPTVSRPPLLRGLSWDSGPEEPGPRLQKVLAKLPLAEEEKRFAGKAGGKLAKAPGLKDFQIQVQPVRMQKLTKLREEHILMRNQNLVGLKLPDLSEAAEQEKGLPSELSPAIEEEESKSGLDVMPNISDVLLRKLRVHRSLPGSAPPLTEKEVENVFVQLSLAFRNDSYTLESRINQAERERNLTEENTEKELENFKASITSSASLWHHCEHRETYQKLLEDIAVLHRLAARLSSRAEVVGAVRQEKRMSKATEVMMQYVENLKRTYEKDHAELMEFKKLANQNSSRSCGPSEDGVPRTARSMSLTLGKNMPRRRVSVAVVPKFNALNLPGQTPSSSSIPSLPALSESPNGKGSLPVTSALPALLENGKTNGDPDCEASAPALTLSCLEELSQETKARMEEEAYSKGFQEGLKKTKELQDLKEEEEEQKSESPEEPEEVEETEEEEKGPRSSKLEELVHFLQVMYPKLCQHWQVIWMMAAVMLVLTVVLGLYNSYNSCAEQADGPLGRSTCSAAQRDSWWSSGLQHEQPTEQ

SEQ ID NO: 39271 - DNA, 2661 bp, Artificial Sequence
  derived and/or modified sequence
atgggcatggacctgacctgccccttcggcatcagccccgcctgcggcgcccaggccagctggagcatcttcggcgccgacgccgccgaggtgcccggcaccagaggccacagccagcaggaggccgccatgccccacatccccgaggacgaggagccccccggcgagccccaggccgcccagagccccgccggccagcagggcccccccgccgccggcgtgagctgcagccccacccccaccatcgtgctgaccggcgacgccaccagccccgagggcgagaccgacaagaacctggccaacagagtgcacagcccccacaagagactgagccacagacacctgaaggtgagcaccgccagcctgaccagcgtggaccccgccggccacatcatcgacctggtgaacgaccagctgcccgacatcagcatcagcgaggaggacaagaagaagaacctggccctgctggaggaggccaagctggtgagcgagagattcctgaccagaagaggcagaaagagcagaagcagccccggcgacagccccagcgccgtgagccccaacctgagccccagcgccagccccaccagcagcagaagcaacagcctgaccgtgcccaccccccccgagggcgacgaggccgacgtgagcagcccccaccccggcgagcccaacgtgcccaagggcctggccgacagaaagcagaacgaccagagaaaggtgagccagggcagactggcccccagacccccccccgtggagaagagcaaggagatcgccatcgagcagaaggagaacttcgaccccctgcagtaccccgagaccacccccaagggcctggcccccgtgaccaacagcagcggcaagatggccctgaacagcccccagcccggccccgtggagagcgagctgggcaagcagctgctgaagaccggctgggagggcagccccctgcccagaagccccacccaggacgccgccggcgtgggcccccccgccagccagggcagaggccccgccggcgagcccatgggccccgaggccggcagcaaggccgagctgccccccaccgtgagcagaccccccctgctgagaggcctgagctgggacagcggccccgaggagcccggccccagactgcagaaggtgctggccaagctgcccctggccgaggaggagaagagattcgccggcaaggccggcggcaagctggccaaggcccccggcctgaaggacttccagatccaggtgcagcccgtgagaatgcagaagctgaccaagctgagagaggagcacatcctgatgagaaaccagaacctggtgggcctgaagctgcccgacctgagcgaggccgccgagcaggagaagggcctgcccagcgagctgagccccgccatcgaggaggaggagagcaagagcggcctggacgtgatgcccaacatcagcgacgtgctgctgagaaagctgagagtgcacagaagcctgcccggcagcgccccccccctgaccgagaaggaggtggagaacgtgttcgtgcagctgagcctggccttcagaaacgacagctacaccctggagagcagaatcaaccaggccgagagagagagaaacctgaccgaggagaacaccgagaaggagctggagaacttcaaggccagcatcaccagcagcgccagcctgtggcaccactgcgagcacagagagacctaccagaagctgctggaggacatcgccgtgctgcacagactggccgccagactgagcagcagagccgaggtggtgggcgccgtgagacaggagaagagaatgagcaaggccaccgaggtgatgatgcagtacgtggagaacctgaagagaacctacgagaaggaccacgccgagctgatggagttcaagaagctggccaaccagaacagcagcagaagctgcggccccagcgaggacggcgtgcccagaaccgccagaagcatgagcctgaccctgggcaagaacatgcccagaagaagagtgagcgtggccgtggtgcccaagttcaacgccctgaacctgcccggccagacccccagcagcagcagcatccccagcctgcccgccctgagcgagagccccaacggcaagggcagcctgcccgtgaccagcgccctgcccgccctgctggagaacggcaagaccaacggcgaccccgactgcgaggccagcgcccccgccctgaccctgagctgcctggaggagctgagccaggagaccaaggccagaatggaggaggaggcctacagcaagggcttccaggagggcctgaagaagaccaaggagctgcaggacctgaaggaggaggaggaggagcagaagagcgagagccccgaggagcccgaggaggtggaggagaccgaggaggaggagaagggccccagaagcagcaagctggaggagctggtgcacttcctgcaggtgatgtaccccaagctgtgccagcactggcaggtgatctggatgatggccgccgtgatgctggtgctgaccgtggtgctgggcctgtacaacagctacaacagctgcgccgagcaggccgacggccccctgggcagaagcacctgcagcgccgcccagagagacagctggtggagcagcggcctgcagcacgagcagcccaccgagcagtag

SEQ ID NO: 39272 - DNA, 2712 bp, Artificial Sequence
  derived and/or modified sequence
atgggcatggacctgacctgccccttcggcatcagccccgcctgcggcgcccaggccagctggagcatcttcggcgccgacgccgccgaggtgcccggcaccagaggccacagccagcaggaggccgccatgccccacatccccgaggacgaggagccccccggcgagccccaggccgcccagagccccgccggccagggcccccccgccgccggcgtgagctgcagccccacccccaccatcgtgctgaccggcgacgccaccagccccgagggcgagaccgacaagaacctggccaacagagtgcacagcccccacaagagactgagccacagacacctgaaggtgagcaccgccagcctgaccagcgtggaccccgccggccacatcatcgacctggtgaacgaccagctgcccgacatcagcatcagcgaggaggacaagaagaagaacctggccctgctggaggaggccaagctggtgagcgagagattcctgaccagaagaggcagaaagagcagaagcagccccggcgacagccccagcgccgtgagccccaacctgagccccagcgccagccccaccagcagcagaagcaacagcctgaccgtgcccaccccccccggcctggacgtgtgcagcggcccccccagccccctgcccggcgcccccccccagaagggcgacgaggccgacgtgagcagcccccaccccggcgagcccaacgtgcccaagggcctggccgacagaaagcagaacgaccagagaaaggtgagccagggcagactggcccccagacccccccccgtggagaagagcaaggagatcgccatcgagcagaaggagaacttcgaccccctgcagtaccccgagaccacccccaagggcctggcccccgtgaccaacagcagcggcaagatggccctgaacagcccccagcccggccccgtggagagcgagctgggcaagcagctgctgaagaccggctgggagggcagccccctgcccagaagccccacccaggacgccgccggcgtgggcccccccgccagccagggcagaggccccgccggcgagcccatgggccccgaggccggcagcaaggccgagctgccccccaccgtgagcagaccccccctgctgagaggcctgagctgggacagcggccccgaggagcccggccccagactgcagaaggtgctggccaagctgcccctggccgaggaggagaagagattcgccggcaaggccggcggcaagctggccaaggcccccggcctgaaggacttccagatccaggtgcagcccgtgagaatgcagaagctgaccaagctgagagaggagcacatcctgatgagaaaccagaacctggtgggcctgaagctgcccgacctgagcgaggccgccgagcaggagaagggcctgcccagcgagctgagccccgccatcgaggaggaggagagcaagagcggcctggacgtgatgcccaacatcagcgacgtgctgctgagaaagctgagagtgcacagaagcctgcccggcagcgccccccccctgaccgagaaggaggtggagaacgtgttcgtgcagctgagcctggccttcagaaacgacagctacaccctggagagcagaatcaaccaggccgagagagagagaaacctgaccgaggagaacaccgagaaggagctggagaacttcaaggccagcatcaccagcagcgccagcctgtggcaccactgcgagcacagagagacctaccagaagctgctggaggacatcgccgtgctgcacagactggccgccagactgagcagcagagccgaggtggtgggcgccgtgagacaggagaagagaatgagcaaggccaccgaggtgatgatgcagtacgtggagaacctgaagagaacctacgagaaggaccacgccgagctgatggagttcaagaagctggccaaccagaacagcagcagaagctgcggccccagcgaggacggcgtgcccagaaccgccagaagcatgagcctgaccctgggcaagaacatgcccagaagaagagtgagcgtggccgtggtgcccaagttcaacgccctgaacctgcccggccagacccccagcagcagcagcatccccagcctgcccgccctgagcgagagccccaacggcaagggcagcctgcccgtgaccagcgccctgcccgccctgctggagaacggcaagaccaacggcgaccccgactgcgaggccagcgcccccgccctgaccctgagctgcctggaggagctgagccaggagaccaaggccagaatggaggaggaggcctacagcaagggcttccaggagggcctgaagaagaccaaggagctgcaggacctgaaggaggaggaggaggagcagaagagcgagagccccgaggagcccgaggaggtggaggagaccgaggaggaggagaagggccccagaagcagcaagctggaggagctggtgcacttcctgcaggtgatgtaccccaagctgtgccagcactggcaggtgatctggatgatggccgccgtgatgctggtgctgaccgtggtgctgggcctgtacaacagctacaacagctgcgccgagcaggccgacggccccctgggcagaagcacctgcagcgccgcccagagagacagctggtggagcagcggcctgcagcacgagcagcccaccgagcagtag

SEQ ID NO: 39273 - DNA, 2658 bp, Artificial Sequence
  derived and/or modified sequence
atgggcatggacctgacctgccccttcggcatcagccccgcctgcggcgcccaggccagctggagcatcttcggcgccgacgccgccgaggtgcccggcaccagaggccacagccagcaggaggccgccatgccccacatccccgaggacgaggagccccccggcgagccccaggccgcccagagccccgccggccagggcccccccgccgccggcgtgagctgcagccccacccccaccatcgtgctgaccggcgacgccaccagccccgagggcgagaccgacaagaacctggccaacagagtgcacagcccccacaagagactgagccacagacacctgaaggtgagcaccgccagcctgaccagcgtggaccccgccggccacatcatcgacctggtgaacgaccagctgcccgacatcagcatcagcgaggaggacaagaagaagaacctggccctgctggaggaggccaagctggtgagcgagagattcctgaccagaagaggcagaaagagcagaagcagccccggcgacagccccagcgccgtgagccccaacctgagccccagcgccagccccaccagcagcagaagcaacagcctgaccgtgcccaccccccccgacggcgacgaggccgacgtgagcagcccccaccccggcgagcccaacgtgcccaagggcctggccgacagaaagcagaacgaccagagaaaggtgagccagggcagactggcccccagacccccccccgtggagaagagcaaggagatcgccatcgagcagaaggagaacttcgaccccctgcagtaccccgagaccacccccaagggcctggcccccgtgaccaacagcagcggcaagatggccctgaacagcccccagcccggccccgtggagagcgagctgggcaagcagctgctgaagaccggctgggagggcagccccctgcccagaagccccacccaggacgccgccggcgtgggcccccccgccagccagggcagaggccccgccggcgagcccatgggccccgaggccggcagcaaggccgagctgccccccaccgtgagcagaccccccctgctgagaggcctgagctgggacagcggccccgaggagcccggccccagactgcagaaggtgctggccaagctgcccctggccgaggaggagaagagattcgccggcaaggccggcggcaagctggccaaggcccccggcctgaaggacttccagatccaggtgcagcccgtgagaatgcagaagctgaccaagctgagagaggagcacatcctgatgagaaaccagaacctggtgggcctgaagctgcccgacctgagcgaggccgccgagcaggagaagggcctgcccagcgagctgagccccgccatcgaggaggaggagagcaagagcggcctggacgtgatgcccaacatcagcgacgtgctgctgagaaagctgagagtgcacagaagcctgcccggcagcgccccccccctgaccgagaaggaggtggagaacgtgttcgtgcagctgagcctggccttcagaaacgacagctacaccctggagagcagaatcaaccaggccgagagagagagaaacctgaccgaggagaacaccgagaaggagctggagaacttcaaggccagcatcaccagcagcgccagcctgtggcaccactgcgagcacagagagacctaccagaagctgctggaggacatcgccgtgctgcacagactggccgccagactgagcagcagagccgaggtggtgggcgccgtgagacaggagaagagaatgagcaaggccaccgaggtgatgatgcagtacgtggagaacctgaagagaacctacgagaaggaccacgccgagctgatggagttcaagaagctggccaaccagaacagcagcagaagctgcggccccagcgaggacggcgtgcccagaaccgccagaagcatgagcctgaccctgggcaagaacatgcccagaagaagagtgagcgtggccgtggtgcccaagttcaacgccctgaacctgcccggccagacccccagcagcagcagcatccccagcctgcccgccctgagcgagagccccaacggcaagggcagcctgcccgtgaccagcgccctgcccgccctgctggagaacggcaagaccaacggcgaccccgactgcgaggccagcgcccccgccctgaccctgagctgcctggaggagctgagccaggagaccaaggccagaatggaggaggaggcctacagcaagggcttccaggagggcctgaagaagaccaaggagctgcaggacctgaaggaggaggaggaggagcagaagagcgagagccccgaggagcccgaggaggtggaggagaccgaggaggaggagaagggccccagaagcagcaagctggaggagctggtgcacttcctgcaggtgatgtaccccaagctgtgccagcactggcaggtgatctggatgatggccgccgtgatgctggtgctgaccgtggtgctgggcctgtacaacagctacaacagctgcgccgagcaggccgacggccccctgggcagaagcacctgcagcgccgcccagagagacagctggtggagcagcggcctgcagcacgagcagcccaccgagcagtag

SEQ ID NO: 39274 - DNA, 2715 bp, Artificial Sequence
  derived and/or modified sequence
atgggcatggacctgacctgccccttcggcatcagccccgcctgcggcgcccaggccagctggagcatcttcggcgccgacgccgccgaggtgcccggcaccagaggccacagccagcaggaggccgccatgccccacatccccgaggacgaggagccccccggcgagccccaggccgcccagagccccgccggccagggcccccccgccgccggcgtgagctgcagccccacccccaccatcgtgctgaccggcgacgccaccagccccgagggcgagaccgacaagaacctggccaacagagtgcacagcccccacaagagactgagccacagacacctgaaggtgagcaccgccagcctgaccagcgtggaccccgccggccacatcatcgacctggtgaacgaccagctgcccgacatcagcatcagcgaggaggacaagaagaagaacctggccctgctggaggaggccaagctggtgagcgagagattcctgaccagaagaggcagaaagagcagaagcagccccggcgacagccccagcgccgtgagccccaacctgagccccagcgccagccccaccagcagcagaagcaacagcctgaccgtgcccaccccccccggcctggacgtgtgcagcggcccccccagccccctgcccggcgcccccccccagcagaagggcgacgaggccgacgtgagcagcccccaccccggcgagcccaacgtgcccaagggcctggccgacagaaagcagaacgaccagagaaaggtgagccagggcagactggcccccagacccccccccgtggagaagagcaaggagatcgccatcgagcagaaggagaacttcgaccccctgcagtaccccgagaccacccccaagggcctggcccccgtgaccaacagcagcggcaagatggccctgaacagcccccagcccggccccgtggagagcgagctgggcaagcagctgctgaagaccggctgggagggcagccccctgcccagaagccccacccaggacgccgccggcgtgggcccccccgccagccagggcagaggccccgccggcgagcccatgggccccgaggccggcagcaaggccgagctgccccccaccgtgagcagaccccccctgctgagaggcctgagctgggacagcggccccgaggagcccggccccagactgcagaaggtgctggccaagctgcccctggccgaggaggagaagagattcgccggcaaggccggcggcaagctggccaaggcccccggcctgaaggacttccagatccaggtgcagcccgtgagaatgcagaagctgaccaagctgagagaggagcacatcctgatgagaaaccagaacctggtgggcctgaagctgcccgacctgagcgaggccgccgagcaggagaagggcctgcccagcgagctgagccccgccatcgaggaggaggagagcaagagcggcctggacgtgatgcccaacatcagcgacgtgctgctgagaaagctgagagtgcacagaagcctgcccggcagcgccccccccctgaccgagaaggaggtggagaacgtgttcgtgcagctgagcctggccttcagaaacgacagctacaccctggagagcagaatcaaccaggccgagagagagagaaacctgaccgaggagaacaccgagaaggagctggagaacttcaaggccagcatcaccagcagcgccagcctgtggcaccactgcgagcacagagagacctaccagaagctgctggaggacatcgccgtgctgcacagactggccgccagactgagcagcagagccgaggtggtgggcgccgtgagacaggagaagagaatgagcaaggccaccgaggtgatgatgcagtacgtggagaacctgaagagaacctacgagaaggaccacgccgagctgatggagttcaagaagctggccaaccagaacagcagcagaagctgcggccccagcgaggacggcgtgcccagaaccgccagaagcatgagcctgaccctgggcaagaacatgcccagaagaagagtgagcgtggccgtggtgcccaagttcaacgccctgaacctgcccggccagacccccagcagcagcagcatccccagcctgcccgccctgagcgagagccccaacggcaagggcagcctgcccgtgaccagcgccctgcccgccctgctggagaacggcaagaccaacggcgaccccgactgcgaggccagcgcccccgccctgaccctgagctgcctggaggagctgagccaggagaccaaggccagaatggaggaggaggcctacagcaagggcttccaggagggcctgaagaagaccaaggagctgcaggacctgaaggaggaggaggaggagcagaagagcgagagccccgaggagcccgaggaggtggaggagaccgaggaggaggagaagggccccagaagcagcaagctggaggagctggtgcacttcctgcaggtgatgtaccccaagctgtgccagcactggcaggtgatctggatgatggccgccgtgatgctggtgctgaccgtggtgctgggcctgtacaacagctacaacagctgcgccgagcaggccgacggccccctgggcagaagcacctgcagcgccgcccagagagacagctggtggagcagcggcctgcagcacgagcagcccaccgagcagtag

SEQ ID NO: 39275 - DNA, 2661 bp, Artificial Sequence
  derived and/or modified sequence
atggggatggatctcacgtgcccgttcggcatctctcctgcctgcggggctcaagcgtcctggagcattttcggcgcagatgctgccgaagtgcccgggactagaggccactcccagcaggaagcagcaatgcctcacatccccgaagatgaggagcccccgggagaacctcaggcagcccagagccccgctggacagcaaggccctcccgccgcaggcgtgagttgtagccctacgcccaccatcgtgctgaccggcgatgctactagcccagaaggggagaccgataagaatttggctaaccgagtgcattcgccgcataagagactctcgcacagacacttaaaagtatcaactgcttcactcacttctgtcgatcccgccggtcacataattgacctggttaacgaccagcttccagatatctccatatctgaggaggacaaaaaaaagaatctcgcactgcttgaagaggccaaacttgtgagtgagagatttctgacacggcgcgggcgcaagagcagaagctccccaggagattcccctagtgcggttagtcctaatctgagcccttcagcttcacccactagtagtagaagtaacagcctgaccgtacctaccccacccgagggggacgaagccgatgtttcgtcacctcatccgggcgagcccaacgtcccgaaaggattggcagatcggaaacagaatgatcagcggaaggtgtcacaaggacggctcgctccccggccaccccccgttgagaaaagcaaggagattgcgatcgagcagaaagaaaattttgatccactgcagtaccccgagaccaccccaaagggtctggcccccgtgacgaatagtagcggtaagatggcgctcaattcacctcagccaggacctgtcgaaagtgagttaggcaaacagctgttaaagactgggtgggagggctctcctctcccgcgttctcccacgcaggacgcagccggcgtcggacctcccgcctcacaaggaagagggcctgccggggagccaatgggccctgaagccggctccaaggccgaactgcccccaacggtgtctagaccccccttgctgcgcggcctctcttgggattcaggcccagaagagcccggaccccggcttcagaaggtcttggccaaactgccgcttgccgaagaggagaagcggttcgcaggcaaagcaggtggcaagttagctaaggcgccggggctgaaggattttcaaatacaggtgcagccagtaagaatgcaaaagctgactaaactgcgtgaagagcacattcttatgaggaaccagaatttagtcggattaaaattgcccgacctgtccgaagcggccgagcaggagaaggggctgccctccgagctgtcaccagcaattgaagaggaagaatctaaaagcgggcttgacgtaatgccaaacatctccgatgtacttttgcgcaaattaagagtgcaccggtcgctgcctgggtcagcccccccattgactgaaaaagaggttgagaatgtgttcgtccagttgtctctcgcattccggaatgacagttatacgctggagtccagaatcaatcaggccgaacgggaaaggaatcttactgaggagaatacagagaaagaacttgaaaactttaaggcgtccattacatcttctgcttctttgtggcaccattgcgaacacagggaaacttaccagaaactgctggaggacatagccgtgctgcaccgcctagcagcacgcctctcttcacgagccgaggtggttggcgcagtgaggcaagagaagcgcatgtcgaaggcaaccgaagtcatgatgcagtacgtggagaatctcaaacggacctacgagaaagaccacgcagagctgatggagtttaagaaactcgccaaccagaattcgagccgatcctgcggcccatcagaggacggcgtaccgaggactgcacgcagcatgtcgttgactctgggcaagaacatgcctcgccgaagggtaagcgtcgccgttgtccccaagttcaatgcgctcaatcttcctggccaaacgccctcatcaagctccataccaagcttgcctgcactaagcgagtcacccaatgggaaaggcagcctccccgttacctcagccctccctgcactcctggagaatggcaagacaaatggcgaccctgactgtgaggcctccgctcctgccttgaccctgtcatgcttggaggaactgtctcaggaaacaaaggcacgcatggaagaggaggcttacagcaaagggttccaggagggtctgaaaaagaccaaagaactgcaggacctgaaagaggaagaggaggagcagaagagtgagtcccctgaagaaccagaggaagtggaagaaactgaagaggaagaaaaaggcccacgttcatccaagctggaggaactggtgcacttcctgcaggtgatgtatccgaagctttgccagcactggcaggtgatctggatgatggccgccgtcatgctggtattgactgtcgtgttagggttgtacaatagctataattcctgtgctgaacaggccgacggtcccctcggccgttcaacatgctccgcggcccagcgagatagctggtggtcttcgggtctgcagcatgagcagcctacagaacagtag

SEQ ID NO: 39276 - DNA, 2712 bp, Artificial Sequence
  derived and/or modified sequence
atgggcatggacctgacatgtccttttggcataagtcccgcctgtggagcacaggcttcctggtccatatttggggcagatgcggctgaagtacccggcacacggggacattcacagcaagaagccgctatgccgcacatccccgaagatgaagagccaccgggtgagccccaggccgcccaaagccccgctggccagggaccaccggccgctggcgtgtcttgcagtcccacacccaccattgtactgactggtgacgccaccagtccggagggagaaaccgataagaacctggctaacagagtgcacagtccccacaaacgtctcagccaccgccatttgaaagtttctacggcgtcgctgacaagcgttgatcccgcaggccacatcattgatttggtcaacgatcagctcccagacatatccattagcgaggaggataaaaagaaaaatctggccttactggaggaagctaaactcgtgagcgaacggtttctgactcggcgcgggcgcaagagtcgatcctctcccggcgatagtccaagtgctgtgagccctaacctgagccctagcgcctctcctacaagcagcaggtctaatagcctcactgttccaaccccccccgggctagatgtgtgctctggtcctccttcaccactgcccggggcaccaccacagaagggtgatgaagctgacgtctcttctccacatccaggcgagcctaacgtgccaaaaggtctggccgacaggaagcagaatgatcagcgcaaagttagccagggtagactggcccctcggcctcctccagttgaaaagtctaaagaaatcgcaatcgagcagaaggagaacttcgatcctctgcagtaccctgagactacgccgaaaggtcttgcaccagtgactaactctagcgggaagatggctctgaatagcccccaacccgggcctgtggaatccgaactcggaaagcagttgctcaaaacaggctgggaggggtctcccttgcctagatcgcccacccaggatgccgccggagtgggccccccagcaagccagggccgggggcccgccggcgagccgatgggacctgaggcgggtagcaaagcagagttacctccaacagtgtcacggccgcctcttctgcgcggtctgagctgggattctgggccggaagaacccggaccacgcctccaaaaggtgctggccaaactgccactcgctgaagaagaaaagaggtttgcgggtaaggccggcggtaaactggcaaaagcccctgggctcaaggactttcagatccaggtacagcctgtacgcatgcagaagctgaccaaactgcgggaagagcacattctaatgaggaatcagaacctggtcggtctcaaactgccagatttgagcgaagccgcggagcaggagaaaggtttaccttcagaactttcccctgccatcgaggaagaggaatctaaatcaggcttggatgttatgccaaacatcagcgacgtgctgctccggaagctaagagtgcatcggtcattaccggggtcagcacctcctctcacagagaaagaggttgagaatgtattcgtgcagctgtctctggcgttccgaaacgattcctatacgctcgagagtcgaattaatcaggctgaacgtgaaaggaatctcacagaagaaaacacagagaaggagctcgaaaactttaaggccagcataacttcttctgcttcgctctggcatcattgtgagcatagggagacatatcagaagctgctggaagacatcgcagtgctgcaccgtctggccgcacggctgagttctcgtgctgaagtcgtcggcgctgttagacaggagaaaagaatgtctaaggctaccgaggtcatgatgcagtatgtcgaaaatttaaagagaacctacgaaaaagaccatgctgagcttatggaattcaagaaattagccaatcagaactcatctcgatcgtgcggaccttctgaagatggagttcccaggactgctcggagcatgtccctgaccttgggcaaaaacatgcctcgacgccgggtgagtgtcgccgtcgttccaaaattcaatgccctcaacctcccaggacagacgccctcctctagtagtatccctagcttacctgcactgtctgagagccctaacgggaagggatcattgccagtgacttctgcgcttcccgcgctcctcgaaaatggaaaaactaatggcgaccccgattgtgaggcctccgctcctgctctgactttgagttgcctggaagagttgtcacaagagaccaaggccagaatggaggaggaggcttactctaaaggatttcaagaaggccttaaaaaaacgaaagagttgcaggatttgaaggaggaagaggaggagcagaagtctgagagtcctgaggaaccagaggaggtggaggagacggaagaagaagagaagggaccgaggtcttccaaacttgaggagctggtccatttcctccaagtcatgtatcccaagttgtgccagcactggcaggtgatttggatgatggccgcagtgatgctggtgctgacagtggtgctgggtctgtataatagttataactcctgtgccgagcaggctgacgggcctctcggccggagcacctgcagcgccgctcagcgggacagctggtggagctcaggcctgcagcatgagcaacccacagagcagtag

SEQ ID NO: 39277 - DNA, 2658 bp, Artificial Sequence
  derived and/or modified sequence
atgggcatggacctcacctgtccgttcggaataagccctgcttgcggagcgcaggccagttggtcaatcttcggtgccgacgctgccgaggtcccaggcacccgtgggcactctcagcaggaggctgctatgccccatatccctgaagacgaggaacctcccggggagcctcaggctgcccaatctcccgccggacaaggaccacccgccgcgggcgtgtcttgcagccctacccctacgatcgtgctgacaggggatgctacgagccccgaaggggaaactgataagaacttggccaatagagtgcatagccctcataagagattatcgcatcgccatcttaaagtgtccactgcttcactcacgtctgttgacccagccgggcatatcattgacttggtaaacgaccaacttcccgacattagtatttccgaggaagacaagaagaaaaatctcgcacttttggaagaagccaaactggtctccgagcgttttttgaccaggcggggaagaaaaagtcgaagctcacccggagactcacctagcgctgtctcccccaatttgtctcctagtgcctccccaacaagcagtcgttccaatagcctcaccgtcccaacgccacccgacggggatgaagcagatgtaagtagtcctcatcccggagagccaaacgtgcccaaaggcctggccgatagaaagcagaacgatcagcggaaggtatcacagggtaggctggctccccgaccacctcccgtcgagaaatccaaggagattgccatcgagcagaaggagaactttgacccactccagtaccctgaaacgacacctaaggggctcgcgcccgtaaccaatagttccgggaaaatggctctcaactccccacagcctggcccggtggaatccgaattgggcaagcaactgctgaaaaccggttgggaggggtcaccattgcctcgatcccccacccaggacgctgcaggcgtcggcccccctgcatcacagggcaggggccccgccggagagcccatgggcccagaggccggctccaaagctgaactcccacctacggtgagccggccaccactgctgcgcgggctcagttgggattccggtcccgaagaaccagggccgaggcttcaaaaggtgctggcaaagctgcctctggcggaggaagagaagcgttttgctggcaaggcaggcgggaaactggccaaagcccccggcttgaaagattttcaaatccaggtacagcccgtgagaatgcagaagctgactaagcttagggaagagcacatcctcatgcgtaatcagaatctggtgggtctgaagttacccgatctctccgaagctgctgaacaggagaaaggtctacccagcgaactgtcaccagccattgaagaggaagagagcaaaagtggattggacgtgatgccgaacatctccgacgtgttattacggaaacttagagttcaccggagcctgccaggaagcgcaccacctctcaccgaaaaagaggttgagaatgtctttgtacagctgtccctggcatttaggaacgatagttataccctagagagcaggatcaaccaggccgaaagggaacgcaatctgactgaagaaaacacagaaaaagaactggaaaactttaaagcctcgataacttcaagcgcttcattatggcaccattgcgagcaccgcgagacatatcaaaagctgctcgaagatattgccgtgctgcatagactcgcagcgaggctgtctagtagggcagaagttgtaggcgccgtccggcaggagaagcggatgtctaaggcaacagaagtgatgatgcagtacgttgaaaacctcaaaagaacctatgagaaggaccatgcggaactgatggagttcaaaaagcttgctaatcagaattctagcaggagctgcggccccagtgaggacggtgtgcctaggaccgcccgcagcatgtccctgactctgggaaaaaacatgccccgtagaagagtgagcgtggctgtggttcccaaattcaacgccttgaaccttccaggccaaaccccctcgagcagttccatcccgagtctcccggcattgagcgaatcccctaacggtaagggatctcttccagtgaccagcgccctccctgccctactcgaaaacgggaaaaccaacggtgacccagactgcgaggcgtctgctccagcccttacattatcatgcttggaggaactatcacaagaaacgaaagcacggatggaagaagaagcttatagtaagggcttccaggagggcctcaaaaaaacaaaggagctgcaagacctgaaggaagaagaggaagagcaaaagagcgagtctccagaggagccagaggaagtcgaggaaaccgaagaggaggagaaaggcccacggtcatctaaactggaggagctcgtgcactttctccaggttatgtacccaaagctgtgccaacattggcaagtgatctggatgatggcagccgtaatgctggtgctcacagtcgttctcgggctctacaacagctataactcctgcgccgagcaggctgacggtccgctgggacggagtacctgtagtgccgcacagagagactcatggtggagttcagggcttcagcatgaacaacccacagaacagtag

SEQ ID NO: 39278 - DNA, 2715 bp, Artificial Sequence
  derived and/or modified sequence
atggggatggatttgacatgcccgtttggcatcagtccagcttgcggcgctcaggcctcatggagcattttcggcgcagatgctgctgaggtgccaggtacccgtgggcacagccagcaagaggcagctatgccccatatccctgaagacgaagagcctccaggcgagccccaggccgctcaatcacccgccggccagggtccaccagccgcaggcgtctcctgttctcccacaccaaccattgtcctgacaggtgatgccacaagcccagaaggggaaacagacaaaaacctcgcaaatagagtgcactctccacacaaacggctcagccatcgccacctgaaggtgtcgaccgcttctctgaccagcgtcgatcccgcaggtcacatcatagacttagtaaatgaccagctccctgatatctctatttcggaggaggacaagaagaagaatcttgccctcctcgaggaagcaaagttagtaagcgaacgcttcctgacccgccgcgggcggaaatctaggtcttctcctggagacagccctagcgccgtttcacctaatcttagtccctctgcaagcccaacttctagtcggagcaattcacttaccgtgccaacaccgccaggcctcgatgtctgttccgggccacctagcccccttcccggagcacccccccaacagaagggggatgaggcagacgtcagcagtccacatccaggagagccaaatgtacccaaggggttagcagaccgaaaacagaacgaccaacgcaaggtgagtcagggcagactggcgccaagaccgccccctgttgaaaagtcaaaggagatagccatcgagcagaaggaaaatttcgatccactacagtacccagaaactacccctaagggcctggctcccgttaccaattcttcaggcaaaatggctctcaattcccctcagccaggtcctgttgagtcagaactgggaaaacagctgctgaaaacgggctgggaaggctccccactgcccaggtcgcctactcaggatgccgcaggtgtgggtcccccagcatcccagggcagaggtcccgctggcgagcccatgggacccgaggctggttcaaaggccgagctgccacccaccgtgtctcgtccaccactcctgcgagggctctcttgggattctgggccagaggagccaggtccgcgcctccagaaggtcttggccaaattaccactggctgaagaagaaaagaggttcgccggaaaagctggtggtaaactagcaaaggctcctgggctgaaggatttccagatccaggtacagccagtgaggatgcagaagctgacgaaactacgggaggaacacatcctgatgaggaatcaaaaccttgttggcctgaagctccctgacctatcagaagccgccgagcaggagaaagggctaccctcagaattatctcccgcgatcgaggaagaagagagcaaatcgggcctggatgtgatgcccaatattagtgacgttttgttgaggaagctacgcgtacacagatcccttccgggttcggctcctcctctcaccgagaaagaggtcgaaaatgtgtttgttcagctatctctagcatttcgcaatgatagttatacgcttgagagtcgcatcaatcaggccgagcgggagaggaatttgaccgaggagaataccgagaaggagctggaaaacttcaaggccagtattacctcctcggcctccctttggcaccactgtgagcacagagagacctatcagaagctgctcgaggatattgctgtgcttcatcggctggccgcgcgtctcagttctagggcagaggtggtaggcgcagtgcggcaggaaaagaggatgtcaaaggctactgaggtgatgatgcagtatgtcgagaacttaaaaaggacatacgagaaggaccacgctgaactgatggaattcaaaaaacttgcaaaccagaactcctccaggtcgtgcggcccaagcgaggacggcgtcccacgcaccgcccgttcaatgtccctgacactaggtaaaaacatgcctcggcggcgcgtgagcgtggcagtagtgccgaagtttaacgctctcaatctgcccggacagactcctagcagttcatccataccaagcctgccagccctaagcgaaagcccaaatggcaagggctccctgcctgttaccagtgctctgccagccctccttgaaaacggaaaaacaaacggagacccagactgtgaggcgtcagcgcctgctctgactttgagctgcctagaggaactgtcacaggagactaaagcacgtatggaggaggaggcttactccaaagggttccaggagggcctcaaaaaaacaaaagagttacaggacctgaaagaagaagaagaagaacaaaaatcagagagccccgaggagccagaagaagtggaggagaccgaagaggaagaaaagggaccgcgcagcagcaagctggaagaactggttcattttctgcaggtgatgtaccctaagttgtgtcaacactggcaagtcatctggatgatggcggccgttatgcttgtgctgacggtagtccttggcctgtacaactcatataacagctgcgcagagcaggctgacggtcccctgggcaggtcaacctgcagcgcagcccaaagagacagctggtggtcttccgggttgcaacatgagcagccaacagagcagtag

SEQ ID NO: 39279 - DNA, 2661 bp, Artificial Sequence
  derived and/or modified sequence
atgggcatggacctgacctgccccttcggcatcagccctgcctgtggggcccaggcctcctggagcatctttggagcagatgctgctgaggtgcccggcacccggggccacagccagcaggaggccgccatgccccacatcccagaagatgaggagcccccaggagagccccaggccgcccagagccctgctggccagcagggccccccagctgctggggtgtcctgcagccccacccccaccatcgtgctgactggagatgccaccagccctgagggggagacagacaagaacctggccaacagagtgcacagcccccacaagaggctgagccaccgccacctgaaggtgtccacagccagcctgacctctgtggaccctgctggccacatcatcgacctggtgaatgaccagctgcctgacatcagcatcagcgaggaggacaagaagaagaacctggccctgctggaggaggccaagctggtgtctgagcgcttcctgacccggcggggcaggaagagccgcagcagccctggggacagccccagcgctgtgagccccaacctgagccccagcgccagccccaccagcagccgcagcaacagcctgactgtgcccaccccaccagaaggagatgaagcagatgtgagcagcccccaccctggagagcccaacgtgcccaagggcctggccgacaggaagcagaatgaccagaggaaggtgtcccagggccgcctggccccccggcccccacctgtggagaagagcaaggagatcgccatcgagcagaaggaaaattttgaccccctgcagtacccagagaccacccccaagggcctggcccctgtgaccaacagcagcggcaagatggccctgaacagcccccagcccggccctgtggagagcgagctgggcaagcagctgctgaagacaggctgggagggcagccccctgcccaggagccccacccaggatgctgctggggtgggccccccagccagccagggccggggccctgctggggagcccatgggccctgaggccggcagcaaggccgagctgcccccaacagtgtccaggcctcccctgctgcggggcctgtcctgggacagcggccctgaggagcccggcccccggctgcagaaggtgctggccaagctgcccctggccgaggaggagaagagatttgctgggaaggccggcggcaagctggccaaggcccctggcctgaaggacttccagatccaggtgcagcctgtgaggatgcagaagctgaccaagctgcgggaggagcacatcctgatgaggaaccagaacctggtgggcctgaagctgcctgacctgtctgaggccgctgagcaggagaagggcctgcccagcgagctgagccctgccatcgaggaggaggagagcaagagcggcctggatgtgatgcccaacatcagtgatgtgctgctgaggaagctgcgggtgcacaggagcctgcccggcagcgccccacccctgacagagaaggaggtggagaatgtgtttgtgcagctgagcctggccttcagaaatgacagctacaccctggagagccgcatcaaccaggccgagcgggagaggaacctgacagaagaaaatacagagaaggagctggagaacttcaaggccagcatcaccagcagcgccagcctgtggcaccactgtgagcaccgggagacctaccagaagctgctggaggacattgctgtgctgcaccggctggccgcccggctgagcagcagagctgaggtggtgggcgctgtgcggcaggagaagaggatgagcaaggccacagaggtgatgatgcagtatgtggagaacctgaagaggacctatgagaaggaccacgccgagctgatggagttcaagaagctggccaaccagaacagcagccgcagctgtggccccagtgaagatggagtgcccaggacagcccgctccatgagcctgaccctgggcaagaacatgccccggcggcgggtgtctgtggccgtggtgcccaagttcaatgccctgaacctgcccggccagacccccagcagcagcagcatccccagcctgcctgccctgtctgagagccccaacgggaagggcagcctgcctgtgaccagcgccctgcctgccctgctggagaatggcaagaccaatggagaccctgactgtgaggccagcgccccagccctgaccctgagctgcctggaggagctgagccaggagaccaaggccaggatggaggaggaggcctacagcaagggcttccaggagggcctgaagaagaccaaggagctgcaggacctgaaggaggaggaggaggagcagaagtctgagagccctgaggagcctgaggaggtggaggagacagaggaggaggagaagggccccaggagcagcaagctggaggagctggtgcacttcctgcaggtgatgtaccccaagctgtgccagcactggcaggtgatctggatgatggctgctgtgatgctggtgctgactgtggtgctgggcctgtacaacagctacaacagctgtgccgagcaggctgatggccccctgggccgcagcacctgcagcgctgcccagagggacagctggtggagcagcggcctgcagcacgagcagcccacagagcagtag

SEQ ID NO: 39280 - DNA, 2712 bp, Artificial Sequence
  derived and/or modified sequence
atgggcatggacctgacctgccccttcggcatcagccctgcctgtggggcccaggcctcctggagcatctttggagcagatgctgctgaggtgcccggcacccggggccacagccagcaggaggccgccatgccccacatcccagaagatgaggagcccccaggagagccccaggccgcccagagccctgctggccagggccccccagctgctggggtgtcctgcagccccacccccaccatcgtgctgactggagatgccaccagccctgagggggagacagacaagaacctggccaacagagtgcacagcccccacaagaggctgagccaccgccacctgaaggtgtccacagccagcctgacctctgtggaccctgctggccacatcatcgacctggtgaatgaccagctgcctgacatcagcatcagcgaggaggacaagaagaagaacctggccctgctggaggaggccaagctggtgtctgagcgcttcctgacccggcggggcaggaagagccgcagcagccctggggacagccccagcgctgtgagccccaacctgagccccagcgccagccccaccagcagccgcagcaacagcctgactgtgcccaccccacctggcctggatgtgtgcagcggcccccccagccccctgcccggggccccaccccagaagggagatgaagcagatgtgagcagcccccaccctggagagcccaacgtgcccaagggcctggccgacaggaagcagaatgaccagaggaaggtgtcccagggccgcctggcccccaggcctcctcctgtggagaagagcaaggagatcgccatcgagcagaaggagaactttgaccccctgcagtacccagagaccacccccaagggcctggcccctgtgaccaacagcagcggcaagatggccctgaacagcccccagcccggccctgtggagagcgagctgggcaagcagctgctgaagacaggctgggagggcagccccctgcccaggagccccacccaggatgctgctggggtgggccccccagccagccagggccggggccctgctggggagcccatgggccctgaggccggcagcaaggccgagctgccccccaccgtgtcccggccccccctgctgcggggcctgtcctgggacagcggccctgaggagcccggcccccggctgcagaaggtgctggccaagctgcccctggccgaggaggagaagagatttgctgggaaggccggcggcaagctggccaaggcccctggcctgaaggacttccagatccaggtgcagcctgtgaggatgcagaagctgaccaagctgcgggaggagcacatcctgatgaggaaccagaacctggtgggcctgaagctgcctgacctgtctgaggccgctgagcaggagaagggcctgcccagcgagctgagccctgccatcgaggaggaggagagcaagagcggcctggatgtgatgcccaacatcagtgatgtgctgctgaggaagctgcgggtgcacaggagcctgcccggcagcgccccacccctgacagagaaggaggtggagaatgtgtttgtgcagctgagcctggccttcagaaatgacagctacaccctggagagccgcatcaaccaggccgagcgggagaggaacctgacagaggagaacacagagaaggagctggagaacttcaaggccagcatcaccagcagcgccagcctgtggcaccactgtgagcaccgggagacctaccagaagctgctggaggacattgctgtgctgcaccggctggccgcccggctgagcagcagagctgaggtggtgggcgctgtgcggcaggagaagaggatgagcaaggccacagaggtgatgatgcagtatgtggagaacctgaagaggacctatgagaaggaccatgctgagctgatggagttcaagaagctggccaaccagaacagcagccgcagctgtggccccagtgaagatggagtgcccaggacagcccgctccatgagcctgaccctgggcaagaacatgcccaggagaagagtgtctgtggccgtggtgcccaagttcaatgccctgaacctgcccggccagacccccagcagcagcagcatccccagcctgcctgccctgtctgagagccccaacgggaagggcagcctgcctgtgaccagcgccctgcctgccctgctggagaatggcaagaccaacggggaccctgactgtgaggccagcgccccagccctgaccctgagctgcctggaggagctgagccaggagaccaaggccaggatggaggaggaggcctacagcaagggcttccaggagggcctgaagaagaccaaggagctgcaggacctgaaggaggaggaggaggagcagaagtctgagagccctgaggagcctgaggaggtggaggagacagaggaggaggagaagggccccaggagcagcaagctggaggagctggtgcacttcctgcaggtgatgtaccccaagctgtgccagcactggcaggtgatctggatgatggctgctgtgatgctggtgctgactgtggtgctgggcctgtacaacagctacaacagctgtgccgagcaggctgatggccccctgggccgcagcacctgcagcgctgcccagagggacagctggtggagcagcggcctgcagcacgagcagcccacagagcagtag

SEQ ID NO: 39281 - DNA, 2658 bp, Artificial Sequence
  derived and/or modified sequence
atgggcatggacctgacctgccccttcggcatcagccctgcctgtggggcccaggcctcctggagcatctttggagcagatgctgctgaggtgcccggcacccggggccacagccagcaggaggccgccatgccccacatcccagaagatgaggagcccccaggagagccccaggccgcccagagccctgctggccagggccccccagctgctggggtgtcctgcagccccacccccaccatcgtgctgactggagatgccaccagccctgagggggagacagacaagaacctggccaacagagtgcacagcccccacaagaggctgagccaccgccacctgaaggtgtccacagccagcctgacctctgtggaccctgctggccacatcatcgacctggtgaatgaccagctgcctgacatcagcatcagcgaggaggacaagaagaagaacctggccctgctggaggaggccaagctggtgtctgagcgcttcctgacccggcggggcaggaagagccgcagcagccctggggacagccccagcgctgtgagccccaacctgagccccagcgccagccccaccagcagccgcagcaacagcctgactgtgcccaccccaccagatggagatgaagcagatgtgagcagcccccaccctggagagcccaacgtgcccaagggcctggccgacaggaagcagaatgaccagaggaaggtgtcccagggccgcctggcccccaggcctcctcctgtggagaagagcaaggagatcgccatcgagcagaaggagaactttgaccccctgcagtacccagagaccacccccaagggcctggcccctgtgaccaacagcagcggcaagatggccctgaacagcccccagcccggccctgtggagagcgagctgggcaagcagctgctgaagacaggctgggagggcagccccctgcccaggagccccacccaggatgctgctggggtgggccccccagccagccagggccggggccctgctggggagcccatgggccctgaggccggcagcaaggccgagctgccccccaccgtgtcccggccccccctgctgcggggcctgtcctgggacagcggccctgaggagcccggcccccggctgcagaaggtgctggccaagctgcccctggccgaggaggagaagagatttgctgggaaggccggcggcaagctggccaaggcccctggcctgaaggacttccagatccaggtgcagcctgtgaggatgcagaagctgaccaagctgcgggaggagcacatcctgatgaggaaccagaacctggtgggcctgaagctgcctgacctgtctgaggccgctgagcaggagaagggcctgcccagcgagctgagccctgccatcgaggaggaggagagcaagagcggcctggatgtgatgcccaacatcagtgatgtgctgctgaggaagctgcgggtgcacaggagcctgcccggcagcgccccacccctgacagagaaggaggtggagaatgtgtttgtgcagctgagcctggccttcagaaatgacagctacaccctggagagccgcatcaaccaggccgagcgggagaggaacctgacagaggagaacacagagaaggagctggagaacttcaaggccagcatcaccagcagcgccagcctgtggcaccactgtgagcaccgggagacctaccagaagctgctggaggacattgctgtgctgcaccggctggccgcccggctgagcagcagagctgaggtggtgggcgctgtgcggcaggagaagaggatgagcaaggccacagaggtgatgatgcagtatgtggagaacctgaagaggacctatgagaaggaccatgctgagctgatggagttcaagaagctggccaaccagaacagcagccgcagctgtggccccagtgaagatggagtgcccaggacagcccgctccatgagcctgaccctgggcaagaacatgcccaggagaagagtgtctgtggccgtggtgcccaagttcaatgccctgaacctgcccggccagacccccagcagcagcagcatccccagcctgcctgccctgtctgagagccccaacgggaagggcagcctgcctgtgaccagcgccctgcctgccctgctggagaatggcaagaccaacggggaccctgactgtgaggccagcgccccagccctgaccctgagctgcctggaggagctgagccaggagaccaaggccaggatggaggaggaggcctacagcaagggcttccaggagggcctgaagaagaccaaggagctgcaggacctgaaggaggaggaggaggagcagaagtctgagagccctgaggagcctgaggaggtggaggagacagaggaggaggagaagggccccaggagcagcaagctggaggagctggtgcacttcctgcaggtgatgtaccccaagctgtgccagcactggcaggtgatctggatgatggctgctgtgatgctggtgctgactgtggtgctgggcctgtacaacagctacaacagctgtgccgagcaggctgatggccccctgggccgcagcacctgcagcgctgcccagagggacagctggtggagcagcggcctgcagcacgagcagcccacagagcagtag

SEQ ID NO: 39282 - DNA, 2715 bp, Artificial Sequence
  derived and/or modified sequence
atgggcatggacctgacctgccccttcggcatcagccctgcctgtggggcccaggcctcctggagcatctttggagcagatgctgctgaggtgcccggcacccggggccacagccagcaggaggccgccatgccccacatcccagaagatgaggagcccccaggagagccccaggccgcccagagccctgctggccagggccccccagctgctggggtgtcctgcagccccacccccaccatcgtgctgactggagatgccaccagccctgagggggagacagacaagaacctggccaacagagtgcacagcccccacaagaggctgagccaccgccacctgaaggtgtccacagccagcctgacctctgtggaccctgctggccacatcatcgacctggtgaatgaccagctgcctgacatcagcatcagcgaggaggacaagaagaagaacctggccctgctggaggaggccaagctggtgtctgagcgcttcctgacccggcggggcaggaagagccgcagcagccctggggacagccccagcgctgtgagccccaacctgagccccagcgccagccccaccagcagccgcagcaacagcctgactgtgcccaccccacctggcctggatgtgtgcagcggcccccccagccccctgcccggggccccaccccagcagaagggagatgaagcagatgtgagcagcccccaccctggagagcccaacgtgcccaagggcctggccgacaggaagcagaatgaccagaggaaggtgtcccagggccgcctggccccccggcccccacctgtggagaagagcaaggagatcgccatcgagcagaaggaaaattttgaccccctgcagtacccagagaccacccccaagggcctggcccctgtgaccaacagcagcggcaagatggccctgaacagcccccagcccggccctgtggagagcgagctgggcaagcagctgctgaagacaggctgggagggcagccccctgcccaggagccccacccaggatgctgctggggtgggccccccagccagccagggccggggccctgctggggagcccatgggccctgaggccggcagcaaggccgagctgcccccaacagtgtccaggcctcccctgctgcggggcctgtcctgggacagcggccctgaggagcccggcccccggctgcagaaggtgctggccaagctgcccctggccgaggaggagaagagatttgctgggaaggccggcggcaagctggccaaggcccctggcctgaaggacttccagatccaggtgcagcctgtgaggatgcagaagctgaccaagctgcgggaggagcacatcctgatgaggaaccagaacctggtgggcctgaagctgcctgacctgtctgaggccgctgagcaggagaagggcctgcccagcgagctgagccctgccatcgaggaggaggagagcaagagcggcctggatgtgatgcccaacatcagtgatgtgctgctgaggaagctgcgggtgcacaggagcctgcccggcagcgccccacccctgacagagaaggaggtggagaatgtgtttgtgcagctgagcctggccttcagaaatgacagctacaccctggagagccgcatcaaccaggccgagcgggagaggaacctgacagaagaaaatacagagaaggagctggagaacttcaaggccagcatcaccagcagcgccagcctgtggcaccactgtgagcaccgggagacctaccagaagctgctggaggacattgctgtgctgcaccggctggccgcccggctgagcagcagagctgaggtggtgggcgctgtgcggcaggagaagaggatgagcaaggccacagaggtgatgatgcagtatgtggagaacctgaagaggacctatgagaaggaccacgccgagctgatggagttcaagaagctggccaaccagaacagcagccgcagctgtggccccagtgaagatggagtgcccaggacagcccgctccatgagcctgaccctgggcaagaacatgccccggcggcgggtgtctgtggccgtggtgcccaagttcaatgccctgaacctgcccggccagacccccagcagcagcagcatccccagcctgcctgccctgtctgagagccccaacgggaagggcagcctgcctgtgaccagcgccctgcctgccctgctggagaatggcaagaccaatggagaccctgactgtgaggccagcgccccagccctgaccctgagctgcctggaggagctgagccaggagaccaaggccaggatggaggaggaggcctacagcaagggcttccaggagggcctgaagaagaccaaggagctgcaggacctgaaggaggaggaggaggagcagaagtctgagagccctgaggagcctgaggaggtggaggagacagaggaggaggagaagggccccaggagcagcaagctggaggagctggtgcacttcctgcaggtgatgtaccccaagctgtgccagcactggcaggtgatctggatgatggctgctgtgatgctggtgctgactgtggtgctgggcctgtacaacagctacaacagctgtgccgagcaggctgatggccccctgggccgcagcacctgcagcgctgcccagagggacagctggtggagcagcggcctgcagcacgagcagcccacagagcagtag

SEQ ID NO: 39283 - DNA, 5981 bp, Artificial Sequence
  derived and/or modified sequence
ctccggtgttgatgcaaactcaagccggctctcactgtggcttgtggctccgggaaatggaacccagcttgggacagggatgggaatggatttgacttgtccttttggcatctccccagcctgtggagcccaggcctcttggagcatctttggggctgacgcagcggaggttccgggcacacgtggccactcccagcaggaggctgccatgccccacattcccgaggacgaggagccccccggagagccacaggcagcccagagccctgccggccaacagggtcctcctgccgcaggagtatcttgcagtccaactcccacgattgtcctgactggggatgccacttcaccagaaggagaaaccgacaaaaacctggccaacagagttcacagtccccacaagaggctttctcaccgacacttgaaggtgtccactgcctccctgacatctgtggaccccgcggggcacatcattgacctggtgaatgaccagctgccagacatcagcatctcagaggaggacaagaagaaaaacctggcgctgctggaagaagccaagttggtgagtgagcgattcctgacccgccgtgggaggaagtccaggagcagccccggagactccccatcagctgtttccccgaacctcagccccagcgcttctcctacatcctctcggagcaactcacttacagtccccaccccgccagagggggatgaggccgacgtctcttcacctcaccctggcgagcctaacgtccccaaagggctagctgacaggaagcagaatgaccagaggaaagtgtctcagggcaggctggctcctcgtcctcctccagttgagaagtccaaagagattgcaatagaacaaaaggaaaacttcgatcccctccagtaccccgagaccacacccaaaggcctagctcctgttacaaacagcagtgggaaaatggccctgaacagccctcagcctggccccgtggagagcgagctggggaagcagctcttgaaaacgggctgggagggcagccctctgccgagaagtccaacccaggatgcggcaggagtgggtcccccagcctcccaggggagaggcccagctggagagccgatggggcccgaggctggctccaaagctgagcttccacccactgtgtcccggcccccgctgctgcgagggctctcctgggacagtggccctgaagaacctggcccccggctgcagaaagtgcttgccaagctgccactggcagaggaagaaaagcgttttgcaggcaaggccggcggcaagctggccaaggcccctggtctcaaagactttcagatacaagtgcagcccgtgcggatgcagaaactgaccaagctccgagaggagcacatcctgatgagaaatcagaacttagtggggctcaagcttccagaccttagtgaagcagctgagcaggaaaaagggcttccttctgaactctccccagctattgaggaagaagagtcaaagagtggcttagatgtcatgcctaatatttctgatgtgctgctgcgcaaactgcgggtccacaggagtctccctggaagtgcccctccactcactgaaaaggaagttgagaacgtgtttgtgcaactgtccttggcctttagaaatgacagctacactctggaatctagaattaaccaggctgaaagggaacgcaacctgacagaggagaacactgagaaagaactggaaaacttcaaagcttccattacgtcctcagcttcactctggcaccactgtgagcaccgggaaacctaccagaagttgctggaggacatcgctgtcctgcaccgcctggctgcccgcctctccagccgagctgaggtggtaggcgccgtccgccaggaaaagcgcatgtcgaaagcaacggaagtgatgatgcagtatgtggagaatctaaagaggacgtatgagaaggaccatgcggagctcatggagtttaaaaagcttgcaaatcagaattcaagccgcagctgtggcccctctgaagatggggtccctcgcacggcacggtccatgtccctcacgctgggaaagaatatgcctcgccggagggtcagcgttgctgtggttcctaagtttaatgccctgaatctgcctggccaaactcccagctcatcatccattccctccttaccagccttgtcggaatcacccaatgggaaaggcagcctacctgtcacttcagcactgcctgcacttttggaaaatggaaagacaaatggggacccagattgtgaagcctctgctcctgcgctgaccctgagctgcctggaggagcttagtcaggagaccaaggccaggatggaggaagaagcctacagcaagggattccaagaaggtctaaagaagaccaaagaacttcaagacctgaaggaggaggaggaagaacagaagagtgagagtcctgaggaacctgaagaggtagaagaaactgaggaagaggaaaagggcccaagaagcagcaaacttgaagaattggtccatttcttacaagtcatgtatcccaaactgtgtcagcactggcaagtgatctggatgatggctgcagtgatgctggtcttgactgttgtgctggggctctacaattcctataactcttgtgcagagcaggctgatgggccccttggaagatccacttgctcggcagcccagagggactcctggtggagctcaggactccagcatgagcagcctacagagcagtaggaaacctcacacctagccagtgccctgctctgagacactcagactaccaccctttccccaagtataacgtcaggcccaagtgtggacacactgccgcccatcccatcaggtcatgaggaagggttcttttaacactcggcacttctgtgggagctattcatacacagtgacttgatgttcttggaggatcaacaaaactgccctgggaaagcatccagtggatgaagaagtcaccttcaccaaggaactctattggaagggaaggtctcctgcccctagctcaggtggctggggagaactaaaacaccttcactggtggttgggggtaaggagcggggcacgggggaggaggaggtagggggcagtaaaaaacttactctcttttttcctctctgtaattggttatcaggaagaatttgcttaatgactaacaccctaagcatcagacctggaatttggagttgcaaagtgactatcttcccatttcccatctcattttcaataacttcagcctcccattctttcctttggaatgagagtttctttttacagaagtaggaaaggcttctcagaaaaaaaaaaaaaagtataggctgaatttagctcagtgcttgaaatgggaagatatgaattattatatacgcatctgtccacacatacacacatactgttgtgtacacacacacaacatgcctgtgcacagagccaacaacccttcaaaagtgtgctctgggtgtgtacctctggataaataagatgcatgccaagccaacccacagattttcaccagtgtggggcagtcaccaggcacctgttcaatgagctgtccacatggattgaagatgttttaaaaacacagaaaactcatggcttcaatggcagacttactagtctccatttcaaatgccaactctgagctgctgtacagcacaatctattccctattctctctttgaaaacagttaacccacctcacaggtgaatgaggagagaagatgtgctttctgcttcagtctcttactctgtgtgtgaccacatgcaagagtaaacttgcacctcagtgcttcagttcaaatggggtttccaaccccagtataattaggggtgtttcagagcatccccagttatttagcacaacactgaaggagcacatcccctctccattttgacttctctccccacttttacagccactgccttcatcagttttgtagaggtttgatttccatgtgggttttgttgtcattgttttgcatttttgttttgttattgatattgtttgctttcattgctaaaactcatatacgacttactatgagccaagcactgttctcagtattacataggtatgaattcatttaagtcctgaagaaaaagaaaaaaaaatacgaagtggatattacccttcccattttcaaataaggaaactgaagcacaaaaagaacaagtaacttgacaaggacaccccggtagtaaatcatggggctggagctcaaccccagggtaggctggctccagagctgtgctctccttgactcttctgatggtctcctagctggaagcctcacatttcagtctcattcccccaagtggcccatcagctactccatctctggctccccaactaaacagtttctctcatagtgctggacctccactcactagttttttttccagctgttcttctcttttcttcaggtcactcttctcgaccgagtgcaaaaattatcccctccataccagctttgatgaccttccttccatactcctcaccagacacaacataataggtcacacactcctctgtgctttctggcacgttttaaacattattattattgacctttacctatagtataccatggcctatttatgtatccatctcccctagcatttttcctcaaagacaagaaccatgtcttacccatctcttgggtaagtgcctagcatggtggctgacgcttgggagggtgtcattaaatgttgctcaaaagaacaagcaaacatttaaggtggtggagagcagcctggggacagctgacatgctgcatgcttctcagtaccagcaccatcacaatgcaaaaagcaacatctttcttaacctcagcttattctgtttttcagtctactctgtgagagagcaggaatgagaccagactagcaacaccattgccaagctcaaggactgggctcaatgcagtcactccttcagagagaccccccaccccaagcatgccccactttaaaatagcatgtttattgaagggggcatcctttacagtagctagaaaatgactgaggcccaagccagggttgatcaaggatgtgccattaaggtaaagagttacagagcagggcagagggactctgggggcagaagtggatgatttgcccggcctcttccagggggtctggatacaactgaaggagctttagctacatgaggccctcagagccaaagacaggatgcaaatagagttctagagagtggccgtggaagcagaactccaggtggggaatgttcaatctctgcctcccttaaagcagggccaggctcagctggccccattgttcacttggtcacaagtttcctacctttgtttctggatgagtcaaaggccaggaaggcagttatggagagctcctgcacctccagctgccccacagaaaagcctgcaagagtacttccaggcacaggccctctcccaccctattccatttgtaagcaagggaggtcgaggaaaaggacatctccaaaagggagcataagaatagccatatatacaggggctgaaaaagtgctcatgagtccatcttttctggaaagcaaagaccagcctgaagcagtgggagctgctgcccaagcggtagtgaactggagagaaacaggccctggattttcagtgaggatgtggatctgaagagtcccccaaatgcctctgaagtctgacatctctgcttagccctaggagtctggttccctgccttcagttgcagagtgatgtgtttgtgtcattgttgatgtcacctcctaaaaagaccttcactttctggctgccacaaagccatatgtgttgctccccatatacagcctgacagagtaaatggagaggaagtgctggatttgtgtatcactggctatcagttcctcatgttgttaagcctcacacaggtgtgctagcattgaactgtagagtgtcacatacctgagtttgaaaataaaagcacatttccaaacctc

SEQ ID NO: 39284 - DNA, 6032 bp, Artificial Sequence
  derived and/or modified sequence
ctccggtgttgatgcaaactcaagccggctctcactgtggcttgtggctccgggaaatggaacccagcttgggacagggatgggaatggatttgacttgtccttttggcatctccccagcctgtggagcccaggcctcttggagcatctttggggctgacgcagcggaggttccgggcacacgtggccactcccagcaggaggctgccatgccccacattcccgaggacgaggagccccccggagagccacaggcagcccagagccctgccggccaaggtcctcctgccgcaggagtatcttgcagtccaactcccacgattgtcctgactggggatgccacttcaccagaaggagaaaccgacaaaaacctggccaacagagttcacagtccccacaagaggctttctcaccgacacttgaaggtgtccactgcctccctgacatctgtggaccccgcggggcacatcattgacctggtgaatgaccagctgccagacatcagcatctcagaggaggacaagaagaaaaacctggcgctgctggaagaagccaagttggtgagtgagcgattcctgacccgccgtgggaggaagtccaggagcagccccggagactccccatcagctgtttccccgaacctcagccccagcgcttctcctacatcctctcggagcaactcacttacagtccccaccccgccaggtttggatgtgtgcagtggcccgccatcccctctgcctggagcaccaccacagaagggggatgaggccgacgtctcttcacctcaccctggcgagcctaacgtccccaaagggctagctgacaggaagcagaatgaccagaggaaagtgtctcagggcaggctggctcctcgtcctcctccagttgagaagtccaaagagattgcaatagaacaaaaggaaaacttcgatcccctccagtaccccgagaccacacccaaaggcctagctcctgttacaaacagcagtgggaaaatggccctgaacagccctcagcctggccccgtggagagcgagctggggaagcagctcttgaaaacgggctgggagggcagccctctgccgagaagtccaacccaggatgcggcaggagtgggtcccccagcctcccaggggagaggcccagctggagagccgatggggcccgaggctggctccaaagctgagcttccacccactgtgtcccggcccccgctgctgcgagggctctcctgggacagtggccctgaagaacctggcccccggctgcagaaagtgcttgccaagctgccactggcagaggaagaaaagcgttttgcaggcaaggccggcggcaagctggccaaggcccctggtctcaaagactttcagatacaagtgcagcccgtgcggatgcagaaactgaccaagctccgagaggagcacatcctgatgagaaatcagaacttagtggggctcaagcttccagaccttagtgaagcagctgagcaggaaaaagggcttccttctgaactctccccagctattgaggaagaagagtcaaagagtggcttagatgtcatgcctaatatttctgatgtgctgctgcgcaaactgcgggtccacaggagtctccctggaagtgcccctccactcactgaaaaggaagttgagaacgtgtttgtgcaactgtccttggcctttagaaatgacagctacactctggaatctagaattaaccaggctgaaagggaacgcaacctgacagaggagaacactgagaaagaactggaaaacttcaaagcttccattacgtcctcagcttcactctggcaccactgtgagcaccgggaaacctaccagaagttgctggaggacatcgctgtcctgcaccgcctggctgcccgcctctccagccgagctgaggtggtaggcgccgtccgccaggaaaagcgcatgtcgaaagcaacggaagtgatgatgcagtatgtggagaatctaaagaggacgtatgagaaggaccatgcggagctcatggagtttaaaaagcttgcaaatcagaattcaagccgcagctgtggcccctctgaagatggggtccctcgcacggcacggtccatgtccctcacgctgggaaagaatatgcctcgccggagggtcagcgttgctgtggttcctaagtttaatgccctgaatctgcctggccaaactcccagctcatcatccattccctccttaccagccttgtcggaatcacccaatgggaaaggcagcctacctgtcacttcagcactgcctgcacttttggaaaatggaaagacaaatggggacccagattgtgaagcctctgctcctgcgctgaccctgagctgcctggaggagcttagtcaggagaccaaggccaggatggaggaagaagcctacagcaagggattccaagaaggtctaaagaagaccaaagaacttcaagacctgaaggaggaggaggaagaacagaagagtgagagtcctgaggaacctgaagaggtagaagaaactgaggaagaggaaaagggcccaagaagcagcaaacttgaagaattggtccatttcttacaagtcatgtatcccaaactgtgtcagcactggcaagtgatctggatgatggctgcagtgatgctggtcttgactgttgtgctggggctctacaattcctataactcttgtgcagagcaggctgatgggccccttggaagatccacttgctcggcagcccagagggactcctggtggagctcaggactccagcatgagcagcctacagagcagtaggaaacctcacacctagccagtgccctgctctgagacactcagactaccaccctttccccaagtataacgtcaggcccaagtgtggacacactgccgcccatcccatcaggtcatgaggaagggttcttttaacactcggcacttctgtgggagctattcatacacagtgacttgatgttcttggaggatcaacaaaactgccctgggaaagcatccagtggatgaagaagtcaccttcaccaaggaactctattggaagggaaggtctcctgcccctagctcaggtggctggggagaactaaaacaccttcactggtggttgggggtaaggagcggggcacgggggaggaggaggtagggggcagtaaaaaacttactctcttttttcctctctgtaattggttatcaggaagaatttgcttaatgactaacaccctaagcatcagacctggaatttggagttgcaaagtgactatcttcccatttcccatctcattttcaataacttcagcctcccattctttcctttggaatgagagtttctttttacagaagtaggaaaggcttctcagaaaaaaaaaaaaaagtataggctgaatttagctcagtgcttgaaatgggaagatatgaattattatatacgcatctgtccacacatacacacatactgttgtgtacacacacacaacatgcctgtgcacagagccaacaacccttcaaaagtgtgctctgggtgtgtacctctggataaataagatgcatgccaagccaacccacagattttcaccagtgtggggcagtcaccaggcacctgttcaatgagctgtccacatggattgaagatgttttaaaaacacagaaaactcatggcttcaatggcagacttactagtctccatttcaaatgccaactctgagctgctgtacagcacaatctattccctattctctctttgaaaacagttaacccacctcacaggtgaatgaggagagaagatgtgctttctgcttcagtctcttactctgtgtgtgaccacatgcaagagtaaacttgcacctcagtgcttcagttcaaatggggtttccaaccccagtataattaggggtgtttcagagcatccccagttatttagcacaacactgaaggagcacatcccctctccattttgacttctctccccacttttacagccactgccttcatcagttttgtagaggtttgatttccatgtgggttttgttgtcattgttttgcatttttgttttgttattgatattgtttgctttcattgctaaaactcatatacgacttactatgagccaagcactgttctcagtattacataggtatgaattcatttaagtcctgaagaaaaagaaaaaaaaatacgaagtggatattacccttcccattttcaaataaggaaactgaagcacaaaaagaacaagtaacttgacaaggacaccccggtagtaaatcatggggctggagctcaaccccagggtaggctggctccagagctgtgctctccttgactcttctgatggtctcctagctggaagcctcacatttcagtctcattcccccaagtggcccatcagctactccatctctggctccccaactaaacagtttctctcatagtgctggacctccactcactagttttttttccagctgttcttctcttttcttcaggtcactcttctcgaccgagtgcaaaaattatcccctccataccagctttgatgaccttccttccatactcctcaccagacacaacataataggtcacacactcctctgtgctttctggcacgttttaaacattattattattgacctttacctatagtataccatggcctatttatgtatccatctcccctagcatttttcctcaaagacaagaaccatgtcttacccatctcttgggtaagtgcctagcatggtggctgacgcttgggagggtgtcattaaatgttgctcaaaagaacaagcaaacatttaaggtggtggagagcagcctggggacagctgacatgctgcatgcttctcagtaccagcaccatcacaatgcaaaaagcaacatctttcttaacctcagcttattctgtttttcagtctactctgtgagagagcaggaatgagaccagactagcaacaccattgccaagctcaaggactgggctcaatgcagtcactccttcagagagaccccccaccccaagcatgccccactttaaaatagcatgtttattgaagggggcatcctttacagtagctagaaaatgactgaggcccaagccagggttgatcaaggatgtgccattaaggtaaagagttacagagcagggcagagggactctgggggcagaagtggatgatttgcccggcctcttccagggggtctggatacaactgaaggagctttagctacatgaggccctcagagccaaagacaggatgcaaatagagttctagagagtggccgtggaagcagaactccaggtggggaatgttcaatctctgcctcccttaaagcagggccaggctcagctggccccattgttcacttggtcacaagtttcctacctttgtttctggatgagtcaaaggccaggaaggcagttatggagagctcctgcacctccagctgccccacagaaaagcctgcaagagtacttccaggcacaggccctctcccaccctattccatttgtaagcaagggaggtcgaggaaaaggacatctccaaaagggagcataagaatagccatatatacaggggctgaaaaagtgctcatgagtccatcttttctggaaagcaaagaccagcctgaagcagtgggagctgctgcccaagcggtagtgaactggagagaaacaggccctggattttcagtgaggatgtggatctgaagagtcccccaaatgcctctgaagtctgacatctctgcttagccctaggagtctggttccctgccttcagttgcagagtgatgtgtttgtgtcattgttgatgtcacctcctaaaaagaccttcactttctggctgccacaaagccatatgtgttgctccccatatacagcctgacagagtaaatggagaggaagtgctggatttgtgtatcactggctatcagttcctcatgttgttaagcctcacacaggtgtgctagcattgaactgtagagtgtcacatacctgagtttgaaaataaaagcacatttccaaacctc

SEQ ID NO: 39285 - DNA, 5978 bp, Artificial Sequence
  derived and/or modified sequence
ctccggtgttgatgcaaactcaagccggctctcactgtggcttgtggctccgggaaatggaacccagcttgggacagggatgggaatggatttgacttgtccttttggcatctccccagcctgtggagcccaggcctcttggagcatctttggggctgacgcagcggaggttccgggcacacgtggccactcccagcaggaggctgccatgccccacattcccgaggacgaggagccccccggagagccacaggcagcccagagccctgccggccaaggtcctcctgccgcaggagtatcttgcagtccaactcccacgattgtcctgactggggatgccacttcaccagaaggagaaaccgacaaaaacctggccaacagagttcacagtccccacaagaggctttctcaccgacacttgaaggtgtccactgcctccctgacatctgtggaccccgcggggcacatcattgacctggtgaatgaccagctgccagacatcagcatctcagaggaggacaagaagaaaaacctggcgctgctggaagaagccaagttggtgagtgagcgattcctgacccgccgtgggaggaagtccaggagcagccccggagactccccatcagctgtttccccgaacctcagccccagcgcttctcctacatcctctcggagcaactcacttacagtccccaccccgccagatggggatgaggccgacgtctcttcacctcaccctggcgagcctaacgtccccaaagggctagctgacaggaagcagaatgaccagaggaaagtgtctcagggcaggctggctcctcgtcctcctccagttgagaagtccaaagagattgcaatagaacaaaaggaaaacttcgatcccctccagtaccccgagaccacacccaaaggcctagctcctgttacaaacagcagtgggaaaatggccctgaacagccctcagcctggccccgtggagagcgagctggggaagcagctcttgaaaacgggctgggagggcagccctctgccgagaagtccaacccaggatgcggcaggagtgggtcccccagcctcccaggggagaggcccagctggagagccgatggggcccgaggctggctccaaagctgagcttccacccactgtgtcccggcccccgctgctgcgagggctctcctgggacagtggccctgaagaacctggcccccggctgcagaaagtgcttgccaagctgccactggcagaggaagaaaagcgttttgcaggcaaggccggcggcaagctggccaaggcccctggtctcaaagactttcagatacaagtgcagcccgtgcggatgcagaaactgaccaagctccgagaggagcacatcctgatgagaaatcagaacttagtggggctcaagcttccagaccttagtgaagcagctgagcaggaaaaagggcttccttctgaactctccccagctattgaggaagaagagtcaaagagtggcttagatgtcatgcctaatatttctgatgtgctgctgcgcaaactgcgggtccacaggagtctccctggaagtgcccctccactcactgaaaaggaagttgagaacgtgtttgtgcaactgtccttggcctttagaaatgacagctacactctggaatctagaattaaccaggctgaaagggaacgcaacctgacagaggagaacactgagaaagaactggaaaacttcaaagcttccattacgtcctcagcttcactctggcaccactgtgagcaccgggaaacctaccagaagttgctggaggacatcgctgtcctgcaccgcctggctgcccgcctctccagccgagctgaggtggtaggcgccgtccgccaggaaaagcgcatgtcgaaagcaacggaagtgatgatgcagtatgtggagaatctaaagaggacgtatgagaaggaccatgcggagctcatggagtttaaaaagcttgcaaatcagaattcaagccgcagctgtggcccctctgaagatggggtccctcgcacggcacggtccatgtccctcacgctgggaaagaatatgcctcgccggagggtcagcgttgctgtggttcctaagtttaatgccctgaatctgcctggccaaactcccagctcatcatccattccctccttaccagccttgtcggaatcacccaatgggaaaggcagcctacctgtcacttcagcactgcctgcacttttggaaaatggaaagacaaatggggacccagattgtgaagcctctgctcctgcgctgaccctgagctgcctggaggagcttagtcaggagaccaaggccaggatggaggaagaagcctacagcaagggattccaagaaggtctaaagaagaccaaagaacttcaagacctgaaggaggaggaggaagaacagaagagtgagagtcctgaggaacctgaagaggtagaagaaactgaggaagaggaaaagggcccaagaagcagcaaacttgaagaattggtccatttcttacaagtcatgtatcccaaactgtgtcagcactggcaagtgatctggatgatggctgcagtgatgctggtcttgactgttgtgctggggctctacaattcctataactcttgtgcagagcaggctgatgggccccttggaagatccacttgctcggcagcccagagggactcctggtggagctcaggactccagcatgagcagcctacagagcagtaggaaacctcacacctagccagtgccctgctctgagacactcagactaccaccctttccccaagtataacgtcaggcccaagtgtggacacactgccgcccatcccatcaggtcatgaggaagggttcttttaacactcggcacttctgtgggagctattcatacacagtgacttgatgttcttggaggatcaacaaaactgccctgggaaagcatccagtggatgaagaagtcaccttcaccaaggaactctattggaagggaaggtctcctgcccctagctcaggtggctggggagaactaaaacaccttcactggtggttgggggtaaggagcggggcacgggggaggaggaggtagggggcagtaaaaaacttactctcttttttcctctctgtaattggttatcaggaagaatttgcttaatgactaacaccctaagcatcagacctggaatttggagttgcaaagtgactatcttcccatttcccatctcattttcaataacttcagcctcccattctttcctttggaatgagagtttctttttacagaagtaggaaaggcttctcagaaaaaaaaaaaaaagtataggctgaatttagctcagtgcttgaaatgggaagatatgaattattatatacgcatctgtccacacatacacacatactgttgtgtacacacacacaacatgcctgtgcacagagccaacaacccttcaaaagtgtgctctgggtgtgtacctctggataaataagatgcatgccaagccaacccacagattttcaccagtgtggggcagtcaccaggcacctgttcaatgagctgtccacatggattgaagatgttttaaaaacacagaaaactcatggcttcaatggcagacttactagtctccatttcaaatgccaactctgagctgctgtacagcacaatctattccctattctctctttgaaaacagttaacccacctcacaggtgaatgaggagagaagatgtgctttctgcttcagtctcttactctgtgtgtgaccacatgcaagagtaaacttgcacctcagtgcttcagttcaaatggggtttccaaccccagtataattaggggtgtttcagagcatccccagttatttagcacaacactgaaggagcacatcccctctccattttgacttctctccccacttttacagccactgccttcatcagttttgtagaggtttgatttccatgtgggttttgttgtcattgttttgcatttttgttttgttattgatattgtttgctttcattgctaaaactcatatacgacttactatgagccaagcactgttctcagtattacataggtatgaattcatttaagtcctgaagaaaaagaaaaaaaaatacgaagtggatattacccttcccattttcaaataaggaaactgaagcacaaaaagaacaagtaacttgacaaggacaccccggtagtaaatcatggggctggagctcaaccccagggtaggctggctccagagctgtgctctccttgactcttctgatggtctcctagctggaagcctcacatttcagtctcattcccccaagtggcccatcagctactccatctctggctccccaactaaacagtttctctcatagtgctggacctccactcactagttttttttccagctgttcttctcttttcttcaggtcactcttctcgaccgagtgcaaaaattatcccctccataccagctttgatgaccttccttccatactcctcaccagacacaacataataggtcacacactcctctgtgctttctggcacgttttaaacattattattattgacctttacctatagtataccatggcctatttatgtatccatctcccctagcatttttcctcaaagacaagaaccatgtcttacccatctcttgggtaagtgcctagcatggtggctgacgcttgggagggtgtcattaaatgttgctcaaaagaacaagcaaacatttaaggtggtggagagcagcctggggacagctgacatgctgcatgcttctcagtaccagcaccatcacaatgcaaaaagcaacatctttcttaacctcagcttattctgtttttcagtctactctgtgagagagcaggaatgagaccagactagcaacaccattgccaagctcaaggactgggctcaatgcagtcactccttcagagagaccccccaccccaagcatgccccactttaaaatagcatgtttattgaagggggcatcctttacagtagctagaaaatgactgaggcccaagccagggttgatcaaggatgtgccattaaggtaaagagttacagagcagggcagagggactctgggggcagaagtggatgatttgcccggcctcttccagggggtctggatacaactgaaggagctttagctacatgaggccctcagagccaaagacaggatgcaaatagagttctagagagtggccgtggaagcagaactccaggtggggaatgttcaatctctgcctcccttaaagcagggccaggctcagctggccccattgttcacttggtcacaagtttcctacctttgtttctggatgagtcaaaggccaggaaggcagttatggagagctcctgcacctccagctgccccacagaaaagcctgcaagagtacttccaggcacaggccctctcccaccctattccatttgtaagcaagggaggtcgaggaaaaggacatctccaaaagggagcataagaatagccatatatacaggggctgaaaaagtgctcatgagtccatcttttctggaaagcaaagaccagcctgaagcagtgggagctgctgcccaagcggtagtgaactggagagaaacaggccctggattttcagtgaggatgtggatctgaagagtcccccaaatgcctctgaagtctgacatctctgcttagccctaggagtctggttccctgccttcagttgcagagtgatgtgtttgtgtcattgttgatgtcacctcctaaaaagaccttcactttctggctgccacaaagccatatgtgttgctccccatatacagcctgacagagtaaatggagaggaagtgctggatttgtgtatcactggctatcagttcctcatgttgttaagcctcacacaggtgtgctagcattgaactgtagagtgtcacatacctgagtttgaaaataaaagcacatttccaaacctc

SEQ ID NO: 39286 - DNA, 3339 bp, Artificial Sequence
  derived and/or modified sequence
gaataactcagttttaggtaagcctcccctatatcctagaataacctgcctcttcggctgggaagcggagggaaccttctcttccttaaagacagggtctcgcactgtcacccaggctggagtgcagtggtgcaaccccacctcccgggttcaagcaattctcatgcctcagcctcccaagtagctgggattacagcctgtggagcccaggcctcttggagcatctttggggctgacgcagcggaggttccgggcacacgtggccactcccagcaggaggctgccatgccccacattcccgaggacgaggagccccccggagagccacaggcagcccagagccctgccggccaaagttcacagtccccacaagaggctttctcaccgacacttgaaggtgtccactgcctccctgacatctgtggaccccgcggggcacatcattgacctggtgaatgaccagctgccagacatcagcatctcagaggaggacaagaagaaaaacctggcgctgctggaagaagccaagttggtgagtgagcgattcctgacccgccgtgggaggaagtccaggagcagccccggagactccccatcagctgtttccccgaacctcagccccagcgcttctcctacatcctctcggagcaactcacttacagtccccaccccgccaggtttggatgtgtgcagtggcccgccatcccctctgcctggagcaccaccacagcagaagggggatgaggccgacgtctcttcacctcaccctggcgagcctaacgtccccaaagggctagctgacaggaagcagaatgaccagaggaaagtgtctcagggcaggctggctcctcgtcctcctccagttgagaagtccaaagagattgcaatagaacaaaaggaaaacttcgatcccctccagtaccccgagaccacacccaaaggcctagctcctgttacaaacagcagtgggaaaatggccctgaacagccctcagcctggccccgtggagagcgagctggggaagcagctcttgaaaacgggctgggagggcagccctctgccgagaagtccaacccaggatgcggcaggagtgggtcccccagcctcccaggggagaggcccagctggagagccgatggggcccgaggctggctccaaagctgagcttccacccactgtgtcccggcccccgctgctgcgagggctctcctgggacagtggccctgaagaacctggcccccggctgcagaaagtgcttgccaagctgccactggcagaggaagaaaagcgttttgcaggcaaggccggcggcaagctggccaaggcccctggtctcaaagactttcagatacaagtgcagcccgtgcggatgcagaaactgaccaagctccgagaggagcacatcctgatgagaaatcagaacttagtggggctcaagcttccagaccttagtgaagcagctgagcaggaaaaagggcttccttctgaactctccccagctattgaggaagaagagtcaaagagtggcttagatgtcatgcctaatatttctgatgtgctgctgcgcaaactgcgggtccacaggagtctccctggaagtgcccctccactcactgaaaaggaagttgagaacgtgtttgtgcaactgtccttggcctttagaaatgacagctacactctggaatctagaattaaccaggctgaaagggaacgcaacctgacagaggagaacactgagaaagaactggaaaacttcaaagcttccattacgtcctcagcttcactctggcaccactgtgagcaccgggaaacctaccagaagttgctggaggacatcgctgtcctgcaccgcctggctgcccgcctctccagccgagctgaggtggtaggcgccgtccgccaggaaaagcgcatgtcgaaagcaacggaagtgatgatgcagtatgtggagaatctaaagaggacgtatgagaaggaccatgcggagctcatggagtttaaaaagcttgcaaatcagaattcaagccgcagctgtggcccctctgaagatggggtccctcgcacggcacggtccatgtccctcacgctgggaaagaatatgcctcgccggagggtcagcgttgctgtggttcctaagtttaatgccctgaatctgcctggccaaactcccagctcatcatccattccctccttaccagccttgtcggaatcacccaatgggaaaggcagcctacctgtcacttcagcactgcctgcacttttggaaaatggaaagacaaatggggacccagattgtgaagcctctgctcctgcgctgaccctgagctgcctggaggagcttagtcaggagaccaaggccaggatggaggaagaagcctacagcaagggattccaagaaggtctaaagaagaccaaagaacttcaagacctgaaggaggaggaggaagaacagaagagtgagagtcctgaggaacctgaagaggtagaagaaactgaggaagaggaaaagggcccaagaagcagcaaacttgaagaattggtccatttcttacaagtcatgtatcccaaactgtgtcagcactggcaagtgatctggatgatggctgcagtgatgctggtcttgactgttgtgctggggctctacaattcctataactcttgtgcagagcaggctgatgggccccttggaagatccacttgctcggcagcccagagggactcctggtggagctcaggactccagcatgagcagcctacagagcagtaggaaacctcacacctagccagtgccctgctctgagacactcagactaccaccctttccccaagtataacgtcaggcccaagtgtggacacactgccgcccatcccatcaggtcatgaggaagggttcttttaacactcggcacttctgtgggagctattcatacacagtgacttgatgttcttggaggatcaacaaaactgccctgggaaagcatccagtggatgaagaagtcaccttcaccaaggaactctattggaagggaaggtctcctgcccctagctcaggtggctggggagaactaaaacaccttcactggtggttgggggtaaggagcggggcacgggggaggaggaggtagggggcagtaaaaaacttactctcttttttcctctctgtaattggttatcaggaagaatttgcttaatgactaacaccctaagcatcagacctggaatttggagttgcaaagtgactatcttcccatttcccatctcattttcaataacttcagcctcccattctttcctttggaatgagagtttctttttacagaagtaggaaaggcttctcag

SEQ ID NO: 39287 - DNA, 2887 bp, Artificial Sequence
  derived and/or modified sequence
aaactcaagccggctctcactgtggcttgtggctccgggaaatggaacccagcttgggacagggatgggaatggatttgacttgtccttttggcatctccccagcctgtggagcccaggcctcttggagcatctttggggctgacgcagcggaggttccgggcacacgtggccactcccagcaggaggctgccatgccccacattcccgaggacgaggagccccccggagagccacaggcagcccagagccctgccggccaaggtcctcctgccgcaggagtatcttgcagtccaactcccacgattgtcctgactggggatgccacttcaccagaaggagaaaccgacaaaaacctggccaacagagttcacagtccccacaagaggctttctcaccgacacttgaaggtgtccactgcctccctgacatctgtggaccccgcggggcacatcattgacctggtgaatgaccagctgccagacatcagcatctcagaggaggacaagaagaaaaacctggcgctgctggaagaagccaagttggtgagtgagcgattcctgacccgccgtgggaggaagtccaggagcagccccggagactccccatcagctgtttccccgaacctcagccccagcgcttctcctacatcctctcggagcaactcacttacagtccccaccccgccaggtttggatgtgtgcagtggcccgccatcccctctgcctggagcaccaccacagcagaagggggatgaggccgacgtctcttcacctcaccctggcgagcctaacgtccccaaagggctagctgacaggaagcagaatgaccagaggaaagtgtctcagggcaggctggctcctcgtcctcctccagttgagaagtccaaagagattgcaatagaacaaaaggaaaacttcgatcccctccagtaccccgagaccacacccaaaggcctagctcctgttacaaacagcagtgggaaaatggccctgaacagccctcagcctggccccgtggagagcgagctggggaagcagctcttgaaaacgggctgggagggcagccctctgccgagaagtccaacccaggatgcggcaggagtgggtcccccagcctcccaggggagaggcccagctggagagccgatggggcccgaggctggctccaaagctgagcttccacccactgtgtcccggcccccgctgctgcgagggctctcctgggacagtggccctgaagaacctggcccccggctgcagaaagtgcttgccaagctgccactggcagaggaagaaaagcgttttgcaggcaaggccggcggcaagctggccaaggcccctggtctcaaagactttcagatacaagtgcagcccgtgcggatgcagaaactgaccaagctccgagaggagcacatcctgatgagaaatcagaacttagtggggctcaagcttccagaccttagtgaagcagctgagcaggaaaaagggcttccttctgaactctccccagctattgaggaagaagagtcaaagagtggcttagatgtcatgcctaatatttctgatgtgctgctgcgcaaactgcgggtccacaggagtctccctggaagtgcccctccactcactgaaaaggaagttgagaacgtgtttgtgcaactgtccttggcctttagaaatgacagctacactctggaatctagaattaaccaggctgaaagggaacgcaacctgacagaggagaacactgagaaagaactggaaaacttcaaagcttccattacgtcctcagcttcactctggcaccactgtgagcaccgggaaacctaccagaagttgctggaggacatcgctgtcctgcaccgcctggctgcccgcctctccagccgagctgaggtggtaggcgccgtccgccaggaaaagcgcatgtcgaaagcaacggaagtgatgatgcagtatgtggagaatctaaagaggacgtatgagaaggaccatgcggagctcatggagtttaaaaagcttgcaaatcagaattcaagccgcagctgtggcccctctgaagatggggtccctcgcacggcacggtccatgtccctcacgctgggaaagaatatgcctcgccggagggtcagcgttgctgtggttcctaagtttaatgccctgaatctgcctggccaaactcccagctcatcatccattccctccttaccagccttgtcggaatcacccaatgggaaaggcagcctacctgtcacttcagcactgcctgcacttttggaaaatggaaagacaaatggggacccagattgtgaagcctctgctcctgcgctgaccctgagctgcctggaggagcttagtcaggagaccaaggccaggatggaggaagaagcctacagcaagggattccaagaaggtctaaagaagaccaaagaacttcaagacctgaaggaggaggaggaagaacagaagagtgagagtcctgaggaacctgaagaggtagaagaaactgaggaagaggaaaagggcccaagaagcagcaaacttgaagaattggtccatttcttacaagtcatgtatcccaaactgtgtcagcactggcaagtgatctggatgatggctgcagtgatgctggtcttgactgttgtgctggggctctacaattcctataactcttgtgcagagcaggctgatgggccccttggaagatccacttgctcggcagcccagagggactcctggtggagctcaggactccagcatgagcagcctacagagcagtaggaaacctcacacctagccagtgccctgctctgagacactcagactaccaccctttccccaagtataacgtcaggcccaagtgtggacacactgccgcccatcccatca

SEQ ID NO: 39288 - DNA, 2661 bp, Artificial Sequence
  derived and/or modified sequence
atgggcatggacctgacctgccccttcggcatcagccccgcctgcggagcccaggctagctggtcgatattcggcgcagacgctgctgaggtccctggtactagaggccactcccagcaggaggctgcaatgcctcacatcccagaggatgaggaaccccccggtgagccgcaggctgcccagagtccagctgggcagcaaggaccccctgcggcaggcgttagctgctcaccgaccccaaccatagtcctgaccggggatgccacaagtcccgagggcgagactgataagaacttggctaatcgcgtgcacagtccccataaacgcctctctcacagacacctcaaggtcagcacggcgtctttgactagcgtggaccccgccggccatattattgatttagtgaatgaccagctgcccgacataagtatatccgaggaggacaaaaagaaaaacctggccttgctggaggaagccaaactggtgtccgaacgcttcctcactaggaggggaagaaagagccgtagtagcccaggtgattctccgtcagcagtgagcccaaatctgagtccaagtgcgtccccaactagctcacggagtaatagtctgactgtacctaccccaccagagggtgatgaagctgatgtgtcttcccctcatcctggcgaacccaacgttccgaagggtctggctgatcggaagcagaatgatcaaagaaaagtatcgcagggccgccttgccccacgtcctcccccagttgagaagagtaaagaaattgccatcgagcaaaaagagaacttcgatcccctgcagtaccctgagactacgcccaagggcttagcccccgtaaccaacagctctggcaagatggcccttaattccccgcagcctggccccgtcgagagcgagctgggtaaacagctacttaagactggctgggagggctctccccttccgcgcagcccgacccaggacgccgctggtgtgggaccaccagccagccagggtcgcggacctgcaggcgagcctatgggaccagaagccggctctaaggccgagctgcccccaactgtttctagaccccctcttctgcgcggtctttcatgggacagcggtccagaggaaccggggcccaggttgcagaaagtgcttgctaaactgcccctggcagaggaggagaaaaggtttgccggcaaagccggcggaaagcttgcaaaggcccccgggctgaaagacttccaaattcaggtgcaacctgtgagaatgcaaaaattaactaagctcagggaagagcatatcttaatgagaaatcagaatttggtgggtctgaaactgccagacttatctgaagcggctgagcaggaaaagggccttcccagtgagctaagccctgccattgaggaagaggagagtaagtcggggctggacgtgatgccaaacatatccgatgttctactgcgcaagctgagagtgcacagatctttgccagggtccgctccgcctctgactgaaaaagaggtggaaaacgttttcgttcagctcagcttagcattcagaaatgattcatatactctggagtccaggattaatcaggctgagagagagaggaatctgaccgaggagaacacggagaaagagctcgagaacttcaaagccagcattacgtcatcagcatccctgtggcaccactgtgagcaccgggagacgtatcagaaattgctagaggacatcgccgttctgcaccgacttgccgcgaggctgagctcccgggcagaagtcgtgggcgccgtcaggcaggaaaaacgaatgagcaaggcaactgaggtgatgatgcagtacgtcgagaatctgaaacgaacttatgagaaggaccatgccgagctgatggaattcaagaaattggccaatcagaactcctccagaagttgcgggcccagtgaggacggagtgcctcggaccgcgcggtctatgagtctcacactcgggaaaaatatgcccagaagacgggtgtcggttgccgtggtgcccaaatttaacgccctcaacctacccggacaaactccgtcttccagcagtattccctccctacccgccctatcagaatccccaaacggtaaaggatcccttccagttaccagtgcactcccagccctgctggagaatggcaagactaatggtgaccctgattgcgaagcctccgcacctgcccttacactctcatgcctggaggaattaagtcaagagaccaaggccagaatggaggaagaggcctatagtaaaggattccaggaaggtctcaagaagacaaaggagctccaggacctgaaggaggaagaggaagaacagaaatccgagtctccagaggagcctgaagaggtagaggaaacagaagaggaagagaaagggcctagatcgagcaaacttgaggaactagtgcattttttacaggtcatgtaccctaaactgtgtcagcattggcaggtgatctggatgatggccgccgtaatgttagttttaaccgtcgtgctgggactgtacaactcttacaattcatgcgctgagcaggcagacgggcccctgggccgcagtacctgtagcgctgcacagcgggattcatggtggtcctctggcctccaacatgagcagcctacggagcaatag

SEQ ID NO: 39289 - DNA, 2712 bp, Artificial Sequence
  derived and/or modified sequence
atgggcatggacctgacctgccccttcggcatcagccccgcctgcggggctcaggcctcctggtccattttcggagcggatgccgccgaggtcccaggcacccgggggcattcccaacaagaggcagccatgcctcacatccctgaggacgaggaacctcctggggagccccaagccgctcaatcgcccgccgggcagggcccacctgctgctggggtctcgtgtagcccaacccctaccatagttctgaccggtgacgccacaagccccgagggcgagacagataagaatttggccaacagagtccacagtccccacaaaaggctgtcccaccgccacctgaaggtctcaacagcaagcctgaccagcgtcgaccccgccggtcacattatcgatctcgttaacgaccagctgccagacatcagtatcagtgaagaagataagaaaaagaatctggccctgcttgaggaagctaagttggtctcagaaaggttccttacgagacgcgggagaaaatctcggagttctccaggggattccccgagcgccgtatctcccaacctatctcccagcgcatctcctaccagctcaaggtctaacagtttgaccgtacccacccctcctggccttgacgtgtgcagtggtccaccctcccccttgccgggcgcaccgcctcaaaagggtgacgaggcagatgtttcatccccccaccctggggagcccaatgttcctaagggactggcggatcgcaaacaaaatgatcagaggaaagtttcacagggacgacttgcgcccagacctccccctgtggagaagtctaaagagattgctatcgagcagaaggagaattttgaccctctgcagtatccagagaccacgcctaaaggactggcgccggtgaccaactcttccggaaaaatggcactgaactcacctcagcccgggcccgtcgagtccgaactgggcaagcagctcttgaaaaccggctgggaaggttccccactcccgcgaagtccgacccaggatgccgctggcgtgggcccaccagcctcccagggaaggggcccggctggtgaacctatgggaccagaggccggttctaaggcagagttaccacctaccgtaagtcgacctcctctgttgcgtggcctatcgtgggatagcggccccgaagagcccgggccccggcttcagaaggtgcttgccaagctgcccctggctgaagaggaaaagaggtttgccgggaaggccggcgggaagcttgccaaggcccccgggctgaaggactttcaaattcaggtccagccagtcagaatgcagaaattgaccaagcttcgggaggagcacattctcatgcggaaccagaatctggttgggctgaaactcccggatttgtctgaggctgccgagcaggagaaaggactcccttcagaactctctcccgctatcgaggaggaggaatccaagagcgggttagacgtgatgcccaacatttccgatgttctgttaaggaagttgcgcgtgcatagaagtctgcctggctccgcaccgcccttgactgagaaagaggtcgaaaatgtgtttgtacagctgtcattggcgtttcgtaatgacagttatactctcgaatctcgaatcaaccaggctgagcgggaacgcaatttaacggaggagaacacagaaaaagagcttgagaactttaaggctagtatcacgagcagtgcgagcttgtggcaccactgcgagcaccgtgagacatatcagaaactgctcgaggacatcgctgtgctccacaggctcgccgctcgcctgtcctctagggccgaagttgttggtgctgtgcgtcaggaaaagcgaatgtccaaagccacagaagtgatgatgcagtatgttgaaaatttaaaaagaacatacgaaaaggatcacgccgaacttatggagtttaagaagcttgccaatcaaaactctagtcgcagctgcggaccgtcagaagacggtgtgccccgaacggcaaggtccatgtcactgacgcttggcaagaacatgccccggaggagagtgagcgttgcggtcgtgcccaagtttaacgctctcaaccttccagggcagacgcctagcagttcctccataccctctctccccgccctctcggaatcacctaacggcaaagggtcgctgcccgttacttccgcattgcccgctcttcttgaaaatggaaagactaacggcgaccccgactgcgaagcaagcgccccagctctgactctatcttgcttggaagaattaagccaggaaacaaaagccagaatggaagaagaggcatacagcaaggggtttcaggagggattaaaaaagactaaagagttgcaagatttaaaagaggaggaggaagagcaaaagtccgagagccctgaggagcccgaggaggtggaggagactgaggaggaggaaaaggggcccagaagcagcaaactcgaggaattggtgcactttctgcaggttatgtatccgaagctttgtcaacactggcaagtgatatggatgatggcggccgtgatgctcgttctgaccgtcgttcttgggctatacaacagctacaactcttgcgcagaacaagcggacggtcccctgggacggtctacatgcagcgctgctcagcgggattcttggtggagctccggccttcagcacgagcagcccactgagcagtag

SEQ ID NO: 39290 - DNA, 2658 bp, Artificial Sequence
  derived and/or modified sequence
atgggcatggacctgacctgccccttcggcatcagccccgcctgcggagcccaggccagttggtcgatcttcggagccgatgcagccgaagttcccggtacaagggggcattcccaacaggaggctgccatgccacacatccccgaagatgaggaaccaccaggcgagcctcaggccgcccagtcccccgcaggccaggggccacccgccgctggtgtgtcttgctctcccacacctaccatcgtgctgactggcgatgccacatcacccgagggggaaacagacaagaatctagccaaccgcgtacactccccccataagaggctatcacataggcatctgaaggttagcaccgccagtctgacttccgttgacccagcagggcatataatcgacctggtgaacgaccaactccccgatattagcatctccgaagaagataagaaaaaaaatttagccctgttagaggaggctaaactggtctccgagagatttttgacacggcgcggtcgaaaatctcgatcttctcccggagatagcccttctgccgtcagtcccaaccttagcccatcagcctctcccacctcatcacggtcaaacagcctcacggtgcccaccccgcccgacggcgatgaggcagatgtgtcaagtcctcaccctggtgagcccaatgttccaaaaggcttggccgataggaaacagaatgatcagagaaaggtgtcccagggtcggctggccccaagaccccctcccgttgagaaaagcaaggagatagcaatagaacagaaagagaattttgatcctctccagtatcccgagactacacctaagggtcttgctccagttactaacagctctggaaaaatggctctcaacagcccgcagccggggcctgtggagtctgagcttggcaaacaattgttgaagactggttgggagggatccccactgcctcgatcgcctacccaagatgctgctggggtaggaccaccggcaagccaggggcgaggtccagctggagagcccatggggcctgaagcaggaagtaaagcagagttacccccaaccgtgtctaggccacccctgctacgcggtctttcttgggacagcggccccgaagagccaggtcccaggctgcaaaaggtccttgccaaattgcccctggccgaggaagagaagagattcgccgggaaggcggggggcaaactcgccaaagctcctggtctgaaggatttccagatccaagtacagccagtgaggatgcagaagctgactaagctccgggaggaacatatcctgatgcggaatcagaaccttgtggggttgaagcttccagatctgtcggaggcagctgaacaagagaagggactgcccagcgagctatctcccgctatcgaagaagaggagtcaaaatccggcctcgacgttatgcccaacatctccgacgttctgctgcgcaagttaagagtccaccgctccctccctggaagtgctccaccactcaccgagaaggaagtagaaaacgtctttgtgcagctgagtctggctttccgcaacgattcatacacactggaatctaggatcaatcaggctgaacgggaacgcaatctgacagaggaaaatactgagaaggagcttgaaaacttcaaggcctcaattacttctagcgctagcctgtggcatcattgtgagcatcgcgaaacctaccaaaagctgctggaggacatagcggtgctgcaccggctggccgcccggctgtccagccgtgcggaagtagtaggcgccgtgcgacaggagaagcggatgtcaaaggccacagaggttatgatgcagtatgttgagaaccttaaacggacatacgagaaagaccatgctgaactgatggagtttaaaaagttggccaaccagaatagcagtcgatcctgcggacctagtgaagacggtgtgcccaggacagccaggagcatgagtctaaccttaggcaagaacatgccgcgcagacgcgtgtcagtcgccgtggtgccaaaattcaacgctctgaacctgcctgggcagactccctcgagtagtagcattccatctctccctgctctcagtgagagcccaaatggcaaaggatcactacctgttacgagtgctttgccagcgctgcttgaaaacgggaagacgaacggtgacccagactgcgaggcatctgcgcctgcgttaaccctctcatgcctcgaggaattaagccaggagactaaggctagaatggaggaggaggcatactcaaaagggtttcaggagggcctgaagaagactaaagaattacaggatctcaaagaggaggaggaggaacagaaaagcgaatctcctgaagaacccgaagaggtcgaggagacagaagaagaagagaaggggcctcgcagtagcaagctggaagaattagtgcactttttgcaagttatgtaccctaagctctgccagcactggcaggtcatctggatgatggcggctgtgatgctagtactcaccgtggtactgggcctctacaacagctataactcatgtgccgaacaagcagatggacctttggggcgctcaacttgcagcgccgcgcagagggattcttggtggagtagcgggctgcaacatgagcagccgactgagcagtag

SEQ ID NO: 39291 - DNA, 2715 bp, Artificial Sequence
  derived and/or modified sequence
atgggcatggacctgacctgccccttcggcatcagccccgcctgcggcgctcaagcctcatggtcaatctttggcgccgatgccgccgaggttcctgggacccgcggacactcccagcaagaggccgccatgccccacattccggaagatgaggagcctcctggtgagccgcaagcagcacagagtccagccggtcagggtccaccagccgcaggagttagctgctctccaactcctaccatcgtgctcaccggcgatgccacctcacccgagggcgagacagacaaaaacttggcaaatcgagtgcactcaccacacaaacgactctctcatcgtcatcttaaagtcagtacagcatcactgacatctgtggatcccgcggggcatattatcgacctcgtgaatgaccagcttcctgatatttccatatcggaggaggataagaaaaagaatctggcccttctggaagaggcaaagctcgtgtcagaacggttcctgaccaggaggggccgcaaatcccggagcagtcctggagattcaccaagcgccgtaagtcctaatctgtcaccctctgccagccccacttcttcccggagcaacagtctcactgtgccaactcctccaggtctggacgtgtgctccgggccaccatcccccctgcccggcgcaccccctcagcagaagggagacgaggcagatgtctcttctcctcaccccggggaacctaacgtgcccaaaggcctggctgatcgaaaacaaaatgaccagaggaaggtcagccagggtaggctcgcgcccagaccacccccagtcgagaagagtaaggagatcgcaattgaacagaaggagaacttcgacccattacagtacccggagaccactcctaaggggctggcacctgttacaaactcatccgggaaaatggctctgaacagcccccagccaggcccagttgaaagcgaacttggtaagcagcttctaaagacgggatgggagggtagcccattgccccgcagtccaacacaagatgccgcgggggttgggccccctgcttcacaggggcgggggcccgccggtgaacccatgggaccggaggcaggaagcaaggccgagctgccgcccaccgtctcacgtcctcctctcctgaggggattaagctgggatagtggccccgaagaaccaggacctcggctgcaaaaggtgctagcgaagctcccactggctgaagaagagaagcgtttcgcaggcaaggcaggaggaaaactggcaaaggccccaggtcttaaggatttccaaattcaggtgcagcctgtcaggatgcagaaactcaccaaactcagagaggaacatatccttatgagaaatcaaaacttagttggcttgaaacttcccgacctttcggaggccgctgaacaggagaaaggcctgcctagtgagctgtcccctgccatcgaggaggaggaatctaaatccggactggacgtgatgcccaacatttctgacgtactgctgcggaagttgcgcgttcaccgatcattaccagggtctgcaccaccccttactgaaaaggaagttgagaacgtttttgttcagctgagtctcgcattcaggaatgatagctacaccctcgaatctcggattaaccaagctgagcgagagagaaatctgacagaagagaacaccgaaaaggagctggagaatttcaaagctagcataacaagctctgccagtttgtggcaccactgcgagcacagagagacctaccaaaaattgttggaggacattgctgtgctgcacagactggctgcccggctgagtagccgcgccgaagtggtaggggctgtgagacaggaaaagaggatgtccaaagcaactgaggtgatgatgcagtatgttgagaatttaaagcgcacctacgaaaaggaccacgctgaactgatggagtttaaaaagctggctaaccagaacagtagtagatcatgtggaccatcggaagacggagtgcctaggaccgcacgatccatgtcactgactcttggtaagaacatgccccggaggagggtgagtgtggcagtcgtgcctaagtttaacgcgctcaacctgcccggccagaccccttcatcctcctctatcccttcgctgcctgcccttagtgaatcaccaaatggcaaggggtcgttacctgtaacatcagccttacctgctctacttgaaaatggaaagactaacggagacccggattgtgaagcgtcagcccccgcactgacgctgtcttgtctggaggaattgtcccaggagactaaggctcgcatggaggaggaagcctattccaagggcttccaggaaggcctgaaaaagacgaaagagttacaggaccttaaagaggaggaggaggaacagaagtcagaatcacccgaggaacctgaggaggtagaggagactgaagaagaggagaaaggtcctcgatcctcaaagctggaggagctggtgcacttccttcaggtgatgtaccccaagctgtgtcagcactggcaggttatttggatgatggctgcggttatgttggtactgacggttgttttaggcctctacaattcctataacagctgcgccgagcaggcggatggcccgctgggcagaagtacctgctccgccgcccagcgcgattcctggtggtcaagcggcttacaacacgaacagccaaccgaacagtag

SEQ ID NO: 39292 - DNA, 2661 bp, Artificial Sequence
  derived and/or modified sequence
atgggtatggatcttacctgtcctttcggcatctccccagcatgtggtgctcaggcctcctggtctatcttcggagccgatgccgctgaggtaccaggcacccgaggccattctcagcaggaggccgcaatgccacacatccctgaggatgaagaacccccaggcgaacctcaggctgctcaatcaccagctgggcaacaggggccacccgctgccggtgttagctgcagccctaccccaaccattgtactgactggagatgccacctctccagaaggcgagacagataaaaacttagccaaccgagtacattcacctcacaagcgactctcccaccgccatctgaaggtctcaaccgcgtcgttgacatccgtggaccctgctggccacataatcgatctagtcaacgaccaactacccgacattagtatttctgaagaagacaaaaagaagaacttggctttgttagaagaagccaaactcgtgagcgagcgattcctcactagaaggggacgtaaatcaaggtcaagtcctggagacagtccatccgccgtaagtcccaatctttccccaagtgcttcaccaaccagttctaggtcaaactccctaaccgttcccacccccccagagggagacgaagccgatgtgagctctccccatccaggcgagcccaatgtgcccaaggggcttgctgatcggaagcagaatgaccaaagaaaggtgagccagggcaggctagcgccacgaccccctcccgttgagaaaagtaaggaaatcgctattgagcagaaagaaaatttcgatccactccaatacccagagaccacccctaagggcttggcacccgttactaactcctccggcaagatggccttgaacagcccccagccagggccagtggagtccgaattgggtaagcagctgctgaagactggatgggaaggctctccgctccctaggagtcccactcaggacgccgctggtgtgggcccacccgctagccagggcaggggacctgctggagagccgatgggtccagaggcaggttccaaagcggagttgccgccaaccgtatcacggccacctcttctgcggggactgtcttgggattctggaccagaagaacccggtccccgactccagaaggtcttggctaagctcccactcgctgaggaggaaaaaagatttgcagggaaagctggtggaaagctggccaaagccccaggcctcaaggatttccaaattcaggttcagcccgtgcgcatgcagaagctcacaaagctacgggaggaacacatcctcatgcgaaatcagaatctcgtcggtctgaagttacccgatctgtccgaggccgcagaacaggaaaagggcctcccgtctgagttgagcccagctatcgaagaggaggagtccaaaagcggattagatgtaatgcccaatatcagcgacgtcctcctgaggaagctgagggttcaccggtctttgcccggaagcgctcccccacttactgaaaaggaggttgagaacgttttcgtgcagctctcgctggcttttaggaacgactcctataccctggaatcccgcatcaaccaggctgaaagggaacgaaacctgacggaggagaatactgagaaagaactggaaaatttcaaagctagcatcacctctagtgcttccttgtggcatcactgcgagcatcgtgaaacttatcaaaaattgttggaggacatagccgtgctgcacagactcgcggcacgcctcagttcaagagccgaggtagttggcgctgttcgacaagaaaaaaggatgagcaaagctaccgaggttatgatgcagtatgtcgaaaatcttaaacgaacttatgagaaagaccacgccgagctcatggagtttaagaagttggcaaaccagaacagctctcgtagctgtggcccttcagaagacggtgtgccgcgaactgcacggtctatgtccttgacactggggaagaacatgccccgaaggcgggtgtctgtcgcagtcgtgcctaaattcaacgcactgaacctgccaggtcagaccccttctagcagttccataccatccctcccagcccttagcgaatccccaaacggtaaaggtagtcttcccgttaccagcgctttgccagctctactagagaacggcaaaaccaatggagatcctgactgtgaggcgtccgcgccagctctcaccctctcatgcttggaagagctctctcaggaaacaaaagccagaatggaggaggaggcgtacagcaaagggttccaggaaggtctcaagaagactaaggagttacaggacctgaaggaagaggaagaagagcagaagtccgagagcccggaggagcccgaagaagtggaagaaactgaagaagaggagaaggggcctcgtagtagcaaactggaagagcttgtacattttctccaggttatgtaccccaagctgtgccagcactggcaggtcatctggatgatggctgccgttatgctcgtcctgaccgttgtgctcgggctgtacaattcatataactcttgtgcggagcaggccgatggacccctgggccgatcaacatgctcagccgctcaaagggactcctggtggtcttcgggacttcagcacgaacagccaacagagcagtag

SEQ ID NO: 39293 - DNA, 2712 bp, Artificial Sequence
  derived and/or modified sequence
atgggaatggatttgacatgccctttcggcatttcacctgcttgtggcgctcaagcttcctggagcatttttggggctgacgccgcagaagttcctggaacgagggggcatagccagcaggaggcagccatgccccacatccctgaagatgaagagccacccggtgagccacaggctgcccagtctcctgctgggcagggtcccccagcagcaggtgtgagctgctccccaacaccaaccatcgtgctgactggggatgccaccagcccagaaggcgagaccgataaaaatctcgccaatagagtgcacagtccacacaaacgcttgtctcacagacatcttaaggtttctacagcttcacttaccagcgtggatcccgctggccatatcatagatctggtgaacgaccagctccctgatatctcaatcagcgaagaggataaaaagaaaaacctggctttattggaagaagcgaagctcgtttccgagagattcctaacgagacggggaaggaagtccaggagtagtcctggcgacagccccagcgcagtgagtccaaacctgtcaccctctgcaagccctacctcttccagatctaattcgttgacagtgccaacaccgcctggattagacgtctgttccgggccaccatccccccttccgggtgctcctccccagaaaggcgacgaggcagacgtgagcagcccccatcctggggagccaaacgttccaaagggattggctgatcgtaagcagaatgaccagcggaaggtgagtcaggggaggcttgcccctcgacccccacccgttgagaagagtaaggagattgcaatcgagcagaaagaaaacttcgacccactgcagtatccagaaaccacgcctaaaggactggcccctgtgaccaatagctcaggcaaaatggctctgaattcaccccagccaggccctgtggaatctgagctgggaaagcagttgctcaaaacgggctgggagggctcgccactccctaggtcacccacgcaagacgctgcgggtgtgggcccacccgcaagccagggtcgcggacctgccggagagcccatggggccagaggcgggttcaaaggccgagcttccacctaccgtctcgcgaccacccctgctgaggggcctgagctgggattcagggccagaagagccgggtcccaggctacagaaggtactggctaagctgcctctggccgaagaagagaagagatttgcgggaaaggctggtggcaagctcgcaaaggcgccaggcttgaaagacttccagatccaggttcagcccgtgcggatgcagaaattaaccaaactgagagaggagcatatacttatgcgtaaccaaaacctcgttggcttgaagctgccggacctcagcgaagctgctgagcaggagaagggcttgccctctgagctgtcaccagcaattgaggaggaagagtccaaatcgggcctagacgtcatgcctaatataagtgacgtcctgctccgcaagctccgggtgcaccgcagtctccctgggagtgcccctccgttaacggaaaaggaagtggagaacgttttcgtccaactttcccttgccttcagaaacgattcatatacattagagtcacgcatcaatcaagctgaacgcgagcgcaaccttacagaggaaaacacagagaaagaactagagaatttcaaggcgagcataacatcctctgcctctctgtggcatcattgtgagcacagggagacctaccagaaattgctcgaggacatcgccgtccttcatagactggctgccagactgagctcacgggcagaggtggttggtgccgtgagacaggaaaaacgaatgagcaaagcaacggaggtcatgatgcagtatgttgagaatcttaagcggacttacgaaaaagaccacgccgagttaatggaatttaagaagctcgcgaatcaaaactcatcccgctcctgcggaccctccgaggatggagtaccacggactgcacgctccatgagtcttaccctcgggaagaacatgccacgcaggcgagttagcgttgcggtagtgcccaagttcaacgcgttgaacttgcccggtcagacgccaagctcctcatcaataccctccctgcctgcactctctgaaagtccgaacggaaagggaagccttcctgtgacatctgccctccctgctcttctcgagaatggaaagacaaacggcgaccccgactgcgaagcctctgccccagccctgacgctgagctgtctggaagaactgagccaggagaccaaagcgcgaatggaggaggaggcttatagcaagggattccaggaggggctcaagaagacaaaggaactccaggacctaaaagaggaagaagaagagcagaagtctgagagccccgaggaacctgaggaggtggaggaaaccgaggaggaagagaagggacctcggagttccaagcttgaagaactagtccacttcctccaggtcatgtatcccaaactctgtcaacattggcaggtgatctggatgatggcagccgtgatgctggtgctcacagtggtgctcggcctgtataattcttataatagctgtgcagagcaggccgacggccctctgggaagatctacatgctctgctgctcaaagggattcatggtggtccagtggccttcaacatgaacagcccacagaacagtag

SEQ ID NO: 39294 - DNA, 2658 bp, Artificial Sequence
  derived and/or modified sequence
atgggtatggacttaacctgcccatttggcatatcccccgcttgtggtgcccaggcatcgtggtcaatattcggcgcagatgctgcagaggtccccggaacaagaggtcattcccagcaagaagccgctatgcctcacattcctgaggatgaggagcctcccggagagccacaggccgcacagagccctgctggccagggcccaccggcagccggtgtttcttgttctccaacccctacaattgttcttaccggggatgctacttcccctgagggtgagaccgataaaaacttagctaacagagtgcacagcccacataagagacttagccaccgccacctcaaggtgtccaccgcgtctctgacaagcgtggatccggcaggacatatcatagacttggtgaatgaccagttaccagatatcagcataagtgaggaggataagaaaaagaacttggccctgctagaagaagctaaactcgtcagcgagagatttcttactcgcagagggcgaaaaagccgcagctctccaggggatagcccctccgcagtttcaccaaatcttagcccttctgcttcaccaacgtcctcacggtctaacagtctgaccgttcctactccaccggatggtgatgaggctgacgtttctagcccccacccgggagaaccaaatgtgcccaaaggcctggctgaccgaaagcaaaacgaccagagaaaggtgagccaaggaaggctggcccctcgccctccccctgtagagaagagcaaggagatcgcgattgaacagaaagagaattttgaccccctgcaataccccgagacgactccgaaaggattggcccctgtcacaaatagtagcggtaaaatggcactgaactcccctcagcccggaccggtggaatccgagctcggtaagcagcttctgaagacaggttgggaagggtctcctcttcctagatctccaacacaagatgcggcaggcgtgggaccgccagcttctcaaggcagaggacctgcaggcgagccgatgggacccgaggcaggctctaaggccgagctgccgccaaccgtcagcagacctcctctgctacgaggcttgtcgtgggattctggaccagaagagcctggccctaggctgcagaaagtattggccaaattgccattggccgaagaagaaaagcggttcgccggaaaagccggaggaaagttagcaaaggcacctggtctgaaagacttccagatccaggtgcagcccgtacgaatgcagaaactcacgaaactgagggaggaacatatattgatgaggaaccaaaacctggtgggattgaagctgcccgatctgtctgaggccgcagaacaggaaaagggattgccttccgagctctcacccgcaatagaagaggaggagtccaaatccggtcttgatgtcatgcctaatattagtgatgtcctgctgcgcaaattgcgggtgcacaggtccttaccagggtctgcacctccactcactgaaaaagaggtggaaaatgtgttcgtacagctcagcctggcatttcggaacgacagttacacactcgaaagtagaattaaccaggctgagagggagaggaatcttacagaagagaatacggaaaaggagcttgaaaactttaaagccagtatcactagttcagccagcctgtggcatcattgtgagcacagagagacctaccagaaacttctcgaggatattgcagttctgcaccgactagcggctcggctcagtagccgggctgaggttgttggcgctgtgcgtcaggagaaacgcatgtctaaggctactgaggtcatgatgcaatatgtagaaaatctcaaacgcacttatgagaaggaccacgcggagctcatggaattcaagaagctggcaaaccaaaattccagccggagttgtgggccttcagaggacggggtaccacggacagcccgaagcatgtctttgactttgggcaagaacatgccaaggcgaagggttagtgtagccgtagtgcccaaatttaatgccctcaacctgcccggacaaacacctagcagtagctcaatcccgtccctgcccgctctatctgaaagcccaaacggaaaaggctcattaccagttacatctgccctgcccgctctgttggagaacgggaagacaaacggcgatccagactgcgaggcgtctgccccagccttgacgttgtcctgcctggaagaactcagccaggagacaaaggctaggatggaagaggaagcctactctaaaggttttcaggagggcctaaagaagaccaaggaattgcaagacttgaaagaggaggaagaggagcagaaatctgaatccccggaagaacccgaagaggtggaggaaacagaagaagaggagaagggacctcgctcctcaaaactagaggagcttgtgcacttcctccaggtaatgtatcctaaactttgtcagcactggcaagtgatttggatgatggcagccgtgatgctcgtgctgaccgtagtgcttggcctctataattcatacaacagttgtgcagagcaggcagatggaccactgggacgaagcacctgcagtgccgctcagcgagatagttggtggagttcaggactgcagcacgagcagcctacagaacaatag

SEQ ID NO: 39295 - DNA, 2715 bp, Artificial Sequence
  derived and/or modified sequence
atgggaatggacctaacttgccccttcggaatcagtccagcttgtggggcacaggctagctggagcatttttggggcagatgccgctgaagtgcctggtacgcggggacactcacagcaggaggcagcgatgccccacatccccgaggatgaagagcctcccggtgagcctcaggccgcacaatcacccgctggacagggccctcctgctgcaggagttagttgctcacctaccccaactatagtgctcacaggcgatgccaccagcccagaaggcgagactgataaaaacctggccaatagagtacactccccgcataagagactttcgcaccgtcacctgaaagttagtacagcctctctcactagcgtggatcctgccggacacattatcgaccttgtaaatgaccagctgcccgatattagcatttctgaggaggacaaaaagaaaaacttagccctcttagaggaggcaaagttagtgtcagagcggtttctcacacgaagggggcgtaaaagtaggagcagccctggcgattccccgtctgccgtctcccccaacttatctcccagtgcctctcctacatcttctcgctccaactccctgacagtcccaacaccaccagggctggatgtgtgtagcggtcccccatcacccctgcccggagccccaccgcagcagaagggagacgaagctgatgtaagcagtccccaccccggagaacctaatgtgcctaagggcctggcagatagaaagcagaacgatcaaaggaaagtctcacaaggacggctggctcctaggcctcctcccgtggaaaagagcaaggagattgccatcgaacagaaggagaacttcgatcccctgcagtacccggagacgacgccgaaaggactggctcccgtaactaatagcagcggcaaaatggccctgaatagccctcaaccgggaccggtggagtctgaactgggaaagcaacttctcaaaactgggtgggagggcagtccactgccccgaagcccaacacaggacgccgctggagtgggccctcccgcttctcagggaagaggtccggctggcgagccaatgggcccagaggccggatctaaagcagaacttccgccaactgtctcaaggccacccttactgcgcggactgagctgggatagcggcccagaagagcccggaccacgccttcagaaagtgttagcaaagctgcctcttgccgaagaggagaagcggtttgctgggaaggccggaggtaagctggccaaagcgcctggactcaaagacttccagatccaggtccagcccgtgagaatgcagaagttaacaaagctgcgtgaggagcatattttaatgagaaatcagaacctggtcggactgaagctgcctgatttatcggaagctgctgaacaggaaaaaggtttgccttcggagctgagtcctgcgatcgaggaggaggagagcaagtctggcctggacgtaatgccaaatatatctgacgttctcctacgcaagctccgcgtccaccggagtctgccaggcagcgccccacccctgactgaaaaggaagtggagaacgtattcgtgcagcttagtctcgcatttagaaacgatagctacacgctggagagccgcatcaaccaggccgaacgagagagaaatctcactgaggagaataccgagaaagaactggagaattttaaggcttccatcaccagcagtgcgtcactgtggcaccactgcgagcaccgagaaacctaccaaaagttgctggaggatatcgccgtgctgcatagactcgctgccaggctgtcctccagagctgaagtagtgggtgccgtcagacaggagaaacgaatgtcaaaagccactgaggttatgatgcagtacgtagaaaacttaaagagaacatacgagaaggaccacgccgagcttatggaattcaagaagttggctaaccagaatagttcccgcagttgtgggccatccgaagacggtgtgccacggaccgcccgatccatgtctctcactctgggaaaaaatatgccaaggcgcagggtgtcagtcgcagttgtgccaaagtttaatgctcttaatctgccgggacagacaccctccagctcatcaattccatcacttcctgctctctccgagtcgcctaatggtaaaggctctttacccgtaacttctgctctcccagcattgctagaaaatgggaaaacaaatggagacccagactgtgaggctagtgcacccgcattgacactgagttgcctggaagaactgagccaggaaaccaaagctcgcatggaagaagaggcctactcaaaagggtttcaagagggcctgaaaaaaaccaaggaactccaggacttgaaagaggaagaggaggaacagaaaagcgagtcccccgaggagccggaggaagtggaggagacagaggaagaggaaaagggtccacgcagctccaagctggaagaacttgtgcacttcttgcaggtgatgtaccccaagctttgccagcattggcaggtgatttggatgatggccgcagtaatgttggtcctgaccgtggtcctgggcctctacaactcttacaattcctgtgcagagcaggctgatggacctctcggacgttcaacgtgcagcgcagcccagagagactcttggtggtcgtcaggcctgcagcacgagcaacccacggaacagtag

SEQ ID NO: 39296 - protein, 396 aa, Artificial Sequence
  derived and/or modified sequence
MLPLLLLPLLWGGSLQEKPVYELQVQKSVTVQEGLCVLVPCSFSYPWRSWYSSPPLYVYWFRDGEIPYYAEVVATNNPDRRVKPETQGRFRLLGDVQKKNCSLSIGDARMEDTGSYFFRVERGRDVKYSYQQNKLNLEVTALIEKPDIHFLEPLESGRPTRLSCSLPGSCEAGPPLTFSWTGNALSPLDPETTRSSELTLTPRPEDHGTNLTCQVKRQGAQVTTERTVQLNVSYAPQNLAISIFFRNGTGTALRILSNGMSVPIQEGQSLFLACTVDSNPPASLSWFREGKALNPSQTSMSGTLELPNIGAREGGEFTCRVQHPLGSQHLSFILSVQRSSSSCICVTEKQQGSWPLVLTLIRGALMGAGFLLTYGLTWIYYTRCGGPQQSRAERPG

SEQ ID NO: 39297 - DNA, 1191 bp, Artificial Sequence
  derived and/or modified sequence
atgctgcccctgctgctgctgcccctgctgtggggcggcagcctgcaggagaagcccgtgtacgagctgcaggtgcagaagagcgtgaccgtgcaggagggcctgtgcgtgctggtgccctgcagcttcagctacccctggagaagctggtacagcagcccccccctgtacgtgtactggttcagagacggcgagatcccctactacgccgaggtggtggccaccaacaaccccgacagaagagtgaagcccgagacccagggcagattcagactgctgggcgacgtgcagaagaagaactgcagcctgagcatcggcgacgccagaatggaggacaccggcagctacttcttcagagtggagagaggcagagacgtgaagtacagctaccagcagaacaagctgaacctggaggtgaccgccctgatcgagaagcccgacatccacttcctggagcccctggagagcggcagacccaccagactgagctgcagcctgcccggcagctgcgaggccggcccccccctgaccttcagctggaccggcaacgccctgagccccctggaccccgagaccaccagaagcagcgagctgaccctgacccccagacccgaggaccacggcaccaacctgacctgccaggtgaagagacagggcgcccaggtgaccaccgagagaaccgtgcagctgaacgtgagctacgccccccagaacctggccatcagcatcttcttcagaaacggcaccggcaccgccctgagaatcctgagcaacggcatgagcgtgcccatccaggagggccagagcctgttcctggcctgcaccgtggacagcaacccccccgccagcctgagctggttcagagagggcaaggccctgaaccccagccagaccagcatgagcggcaccctggagctgcccaacatcggcgccagagagggcggcgagttcacctgcagagtgcagcaccccctgggcagccagcacctgagcttcatcctgagcgtgcagagaagcagcagcagctgcatctgcgtgaccgagaagcagcagggcagctggcccctggtgctgaccctgatcagaggcgccctgatgggcgccggcttcctgctgacctacggcctgacctggatctactacaccagatgcggcggcccccagcagagcagagccgagagacccggctag

SEQ ID NO: 39298 - DNA, 1191 bp, Artificial Sequence
  derived and/or modified sequence
atgctgcccctgctgttactgcccctattatggggaggatcattacaagagaagccggtatacgaattacaggtgcagaaatccgtaactgttcaggaaggtctctgtgttctcgtgccatgcagtttttcatacccttggcggagctggtactcgagcccgccactctacgtgtactggttccgagacggagaaataccgtattatgccgaagttgtcgccaccaacaatcccgacaggcgagtgaaacccgaaactcagggaagattccggctgctgggagatgttcagaagaagaattgttccctgtcgatcggcgatgcgcggatggaagataccggttcttatttctttcgggttgaaaggggtcgagacgttaagtacagttatcagcagaataaactgaatctggaggtgaccgccctcatcgagaagcccgacattcactttctagagccactggagagtggaaggccaacaagactcagctgctcactccccggcagttgtgaggcagggcctccactgacttttagctggaccgggaatgctctgtccccgctggaccccgaaaccactaggagcagcgaactcaccctgacaccaaggcccgaggatcacggtactaatctgacgtgccaagtgaagaggcagggggcccaggtgaccaccgagcgcaccgtccagttgaacgtgagctatgcgccccaaaatctcgccatctcaatctttttcaggaatggaacagggacggcacttcgaattctgtctaacggtatgagcgtgccgatacaagaaggccagtctctttttctcgcatgcaccgtggacagcaatcctcccgcaagtctaagttggtttcgcgagggcaaagctttaaatccatcccagacatcaatgagcggaacccttgagcttcccaatattggtgctagagagggcggtgagttcacctgcagagtgcagcatccattggggagccagcatctgtctttcattcttagcgtgcagagatcctccagttcctgcatttgtgttacagaaaagcagcagggttcctggccattggtgttaactctgattagaggcgcattgatgggggcgggattcctgttgacatacggcctgacttggatctattacacaaggtgtggcggaccccagcagtcaagagccgagagaccggggtag

SEQ ID NO: 39299 - DNA, 1191 bp, Artificial Sequence
  derived and/or modified sequence
atgctgcccctgctgctgctgcccctgctgtggggcggcagcctgcaggagaagcctgtgtatgagctgcaggtgcagaagtctgtgacagtgcaggagggcctgtgtgtgctggtgccctgcagcttctcctacccctggaggtcctggtacagcagcccccccctgtatgtgtactggttcagagatggagagatcccctactatgcagaggtggtggccaccaacaacccagaccggcgggtgaagccagagacccagggccgcttccggctgctgggagatgtgcagaagaagaactgcagcctgagcattggagatgccaggatggaggacaccggcagctacttcttccgggtggagcggggcagagatgtgaagtacagctaccagcagaacaagctgaacctggaggtgacagccctgattgagaagccagacatccacttcctggagcccctggagagcggccggcccacccggctgagctgcagcctgcccggcagctgtgaggccggcccccccctgaccttctcctggacaggaaatgccctgagccccctggaccctgagaccaccaggagcagcgagctgaccctgacccccaggccagaagatcatggcaccaacctgacctgccaggtgaagaggcagggcgcccaggtgaccacagagaggacagtgcagctgaatgtgtcctatgccccccagaacctggccatcagcatcttcttcagaaatggaactggaacagccctgcgcatcctgagcaatggcatgtctgtgcccatccaggagggccagagcctcttcctggcctgcaccgtggacagcaaccccccagccagcctgtcctggttccgggagggcaaggccctgaaccccagccagacctccatgagcggcaccctggagctgcccaacattggagcccgggagggcggggagttcacctgccgggtgcagcaccccctgggcagccagcacctgtccttcatcctgtctgtgcagaggagcagcagcagctgcatctgtgtgacagagaagcagcagggctcctggcccctggtgctgaccctcatccggggggccctgatgggcgccggcttcctgctgacctacggcctgacctggatctactacacccgctgtggcggcccccagcagagcagagctgagaggcctggatag

SEQ ID NO: 39300 - DNA, 1191 bp, Artificial Sequence
  derived and/or modified sequence
atgctgcccctgctgctgctgcccctgctgtggggcggcagcctgcaagagaagcctgtctacgaacttcaagtgcagaaaagtgtgactgtgcaagaaggtctgtgtgtgctggtcccatgctccttctcctacccatggaggagttggtatagcagtcctcctctctacgtgtactggttcagagatggcgaaattccatactacgctgaggtggtagccacaaataaccccgatagacgggtaaagcccgagacgcaaggaagatttcgactcctgggagatgtgcagaaaaaaaactgctcattatccataggggatgccaggatggaggatactggatcatacttctttagagtcgagagaggcagagatgtgaagtactcgtaccagcagaataaactgaacctagaggttactgcactcatcgaaaagcctgacatccactttctagagcctctggaaagtgggcgccccacaaggctgagttgttccttgcccggctcttgcgaggccggcccccccctgactttctcatggacaggaaacgctctgtcgccccttgatccagaaacgactagaagctccgagctcacattgactcctcgaccggaggaccacgggacaaacctgacttgtcaagttaagagacaaggcgcccaagtgaccacagagcgcacagtccagctcaatgtgtcctacgcaccccagaacctggctatcagtattttcttcagaaacggaaccggtaccgccctgcgaatcctgtccaatggcatgtccgttcctatacaggaggggcaaagtttgtttttggcttgcactgttgactcaaacccacctgcctctctcagctggtttagagagggcaaggccttgaacccttctcagacctctatgagtggtacattagagttacctaatatcggggccagagaggggggagagtttacttgtcgagttcagcaccctctggggagccagcacctgagctttatcctttccgttcaaagatcatcaagtagctgcatttgcgtaacagaaaaacagcaagggtcctggccactggtacttactctgatccgtggtgcactgatgggagctggctttctgctcacatatggactaacatggatttattatactagatgtggcggacctcagcagtcccgggcagaaagacctgggtag

SEQ ID NO: 39301 - DNA, 1191 bp, Artificial Sequence
  derived and/or modified sequence
atgctgcccctcttgctgctcccgctgctgtggggaggttctctccaggagaaaccagtttacgaactgcaggtgcagaaatctgtgactgtgcaggaaggactctgcgttctggtgccttgcagtttttcctacccttggaggtcctggtactcaagccctccactctatgtgtactggtttagagacggtgaaatcccttattacgctgaagtagtcgcaactaataatcccgatcgccgtgtgaaacctgagacacagggcagatttcgactgttgggtgacgtgcaaaagaagaactgcagcttaagtattggtgacgccaggatggaggataccggatcctattttttccgggtggaacgcggtagggacgtgaaatacagctatcagcagaataagctgaacctggaggtgaccgctttaattgagaaaccagatatccacttcctggagcctctcgagtcaggacgacccacgcgcctttcctgctcattgcccggttcctgtgaagcaggcccacccctaacgttttcttggactggaaacgctctctcccctctggacccagagaccacaagatcatctgagttgacactgacgcccagaccagaagaccacggcaccaatctgacatgtcaggtgaaacgccagggggcacaggtgactaccgagaggacagtccagctgaatgtatcttatgcccctcagaacttggccatttcaattttcttccggaatggaactgggactgccctgagaatcctgagtaatggtatgagcgttccgattcaagaaggacagagcctattcctggcttgcacagtggacagtaatccccctgcgtccctgagctggtttcgcgagggaaaggccttgaacccctctcagactagcatgtccgggaccctggagctgcccaatatcggtgccagagaagggggagaattcacctgcagagtacagcaccctttgggcagtcagcacctgagctttattctctctgtgcaacgctccagctcctcttgcatctgcgtcacagagaaacagcagggctcttggccactggtcctgactctcataagaggcgctctcatgggcgcaggtttcctcctgacttacgggctcacctggatttattacacccgctgcgggggacctcaacagagcagggccgagcgacccggatag

SEQ ID NO: 39302 - DNA, 2018 bp, Artificial Sequence
  derived and/or modified sequence
agccggacctgggactgggctggggccctggcggatggagacatgctgcccctgctgctgctgcccctgctgtggggggggtccctgcaggagaagccagtgtacgagctgcaagtgcagaagtcggtgacggtgcaggagggcctgtgcgtccttgtgccctgctccttctcttacccctggagatcctggtattcctctcccccactctacgtctactggttccgggacggggagatcccatactacgctgaggttgtggccacaaacaacccagacagaagagtgaagccagagacccagggccgattccgcctccttggggatgtccagaagaagaactgctccctgagcatcggagatgccagaatggaggacacgggaagctatttcttccgcgtggagagaggaagggatgtaaaatatagctaccaacagaataagctgaacttggaggtgacagccctgatagagaaacccgacatccactttctggagcctctggagtccggccgccccacaaggctgagctgcagccttccaggatcctgtgaagcgggaccacctctcacattctcctggacggggaatgccctcagccccctggaccccgagaccacccgctcctcggagctcaccctcacccccaggcccgaggaccatggcaccaacctcacctgtcaggtgaaacgccaaggagctcaggtgaccacggagagaactgtccagctcaatgtctcctatgctccacagaacctcgccatcagcatcttcttcagaaatggcacaggcacagccctgcggatcctgagcaatggcatgtcggtgcccatccaggagggccagtccctgttcctcgcctgcacagttgacagcaacccccctgcctcactgagctggttccgggagggaaaagccctcaatccttcccagacctcaatgtctgggaccctggagctgcctaacataggagctagagagggaggggaattcacctgccgggttcagcatccgctgggctcccagcacctgtccttcatcctttctgtgcagagaagctcctcttcctgcatatgtgtaactgagaaacagcagggctcctggcccctcgtcctcaccctgatcaggggggctctcatgggggctggcttcctcctcacctatggcctcacctggatctactataccaggtgtggaggcccccagcagagcagggctgagaggcctggctgagcccctcccgctcaagacagaactgaggtgtggacacttagccctgtgggacacatgcaggacatcactgtcagcttctttctggaagctcacatcccactgactacccctcttttccttcctgccccataccccttctacttattcccctctgcttgtgagtcttgccccaccacacctgcatccccatctgcaccccatcccctctccacctgcccttctcttccctctccatccaccatctccagccctgtgaagggaatgtactttcggtcttatacccccattacccattacccaaaagttaccttttttttttttttttttttttgagacagagtctcactctgttgcacaggctggagttcagtggcacaatctccgttcactgcaacctccacctctggggttcaagcaattctcctgcctcagcctccctagtagctgggattacaggtgcctgccaccacatccagttaattttttttttttgtatgttagtagagatggggttttaccatgttggccaggtctcgaactcctgacctcaagcaatccactgcattggcctcccaaagtgctggcattacaggtatgagccaccgtgcctggctgccaaaagttaccttcttaacacttgaatttctggtctcctcagcttccctatccatataggcacagagaggcagcatttgttttccagttaaaactctacctcattgtgattattatccaatacaattgttacaaaataagtaaaacttttatgaaacaatacaacataa

SEQ ID NO: 39303 - protein, 331 aa, Artificial Sequence
  derived and/or modified sequence
MDTGVIEGGLNVTLTIRLLMHGKEVGSIIGKKGESVKKMREESGARINISEGNCPERIITLAGPTNAIFKAFAMIIDKLEEDISSSMTNSTAASRPPVTLRLVVPASQCGSLIGKGGCKIKEIRESTGAQVQVAGDMLPNSTERAITIAGIPQSIIECVKQICVVMLESPPKGVTIPYRPKPSSSPVIFAGGQAYTIQGQYAIPQPDLTKLHQLAMQQSHFPMTHGNTGFSGIESSSPEVKGYWAGLDASAQTTSHELTIPNDLIGCIIGRQGAKINEIRQMSGAQIKIANPVEGSTDRQVTITGSAASISLAQYLINVRLSSETGGMGSS

SEQ ID NO: 39304 - DNA, 996 bp, Artificial Sequence
  derived and/or modified sequence
atggatacaggggtgatcgaaggggggttgaatgttacccttactattcgattgttgatgcacggcaaggaggtcggctctattatcggaaaaaagggggagagcgtgaagaaaatgagggaagaatccggagcccgaatcaacatatccgaaggtaattgtcccgagaggattatcaccctcgctgggcccacgaacgccatcttcaaagcctttgccatgatcatcgacaaactggaggaagatatcagctcatctatgaccaattctaccgcagcaagcagaccacccgtgacccttcgcctagttgttcccgcatcccaatgtgggagtctgatcgggaagggaggctgcaagatcaaagaaatcagagagtcgacgggagcccaagtgcaggtggccggagatatgttacctaatagcacagaacgggccatcacaattgcaggtatccctcagtcgatcatcgaatgtgttaagcaaatttgcgtagtgatgctggaatccccccctaagggggtcaccatcccatataggcctaaaccttcaagctctccagtcatatttgcaggaggccaagcatatacgattcagggtcagtatgcaattccccaacccgacctgaccaagctccatcagctcgccatgcaacagtcccattttccaatgacacatgggaatactggcttctctgggattgaatcctcctctcccgaagtcaaaggctactgggctggcctcgatgcttctgcccaaacgacctcccacgagttaacgatccccaatgacctcatcgggtgcatcatcggtcgccaaggcgctaaaattaacgaaatccgccagatgtccggtgcacaaatcaagattgctaacccagtggagggtagtaccgaccgccaagtgacgattacaggtagcgctgcttcaattagtctggcacaatatctcattaacgtgcgactgtcttccgaaactgggggtatggggagctcctag

SEQ ID NO: 39305 - DNA, 996 bp, Artificial Sequence
  derived and/or modified sequence
atggacacaggagtcatcgagggcggcctgaatgtgaccctgaccatccggctgctgatgcacggcaaggaggtgggcagcatcatcggcaagaagggggagagcgtgaagaagatgagggaggagagcggggcccgcatcaacatcagcgagggcaactgcccagagcgcatcatcaccctggccggccccaccaatgccatcttcaaggcctttgccatgatcatcgacaagctggaggaggacatcagcagctccatgaccaacagcacagctgccagccggccccctgtgaccctgcggctggtggtgcctgccagccagtgtggcagcctgattggaaaaggaggctgcaagatcaaggagatccgggagagcactggagcccaggtgcaggtggccggggacatgctgcccaacagcacagagcgggccatcaccatcgccggcatcccccagagcatcattgaatgtgtgaagcagatctgtgtggtgatgctggagagcccccccaagggcgtgaccatcccctaccggcccaagcccagcagcagccctgtgatctttgctgggggccaggcctacaccatccagggccagtatgccatcccccagcctgacctgaccaagctgcaccagctggccatgcagcagagccacttccccatgacccacggcaacacaggcttctctggaattgagagcagcagccctgaggtgaagggctactgggccggcctggatgccagcgcccagaccaccagccatgagctgaccatccccaatgacctgattggctgcatcatcggccggcagggcgccaagatcaatgagatccggcagatgtctggggcccagatcaagatcgccaaccctgtggagggcagcacagaccggcaggtgaccatcaccggcagcgctgccagcatcagcctggcccagtacctgatcaacgtgcggctgagcagcgagactggaggcatgggcagcagctag

SEQ ID NO: 39306 - DNA, 996 bp, Artificial Sequence
  derived and/or modified sequence
atggacaccggcgtgatcgagggcggcctgaacgtgaccctgaccataagattgctaatgcatggcaaggaggtaggctccataatcggaaagaaaggtgaaagtgtgaaaaaaatgagggaggaatccggcgctagaatcaacatctccgagggcaactgccctgaaaggattattaccttggccggcccaaccaatgcaatctttaaggccttcgcaatgatcatcgataaactggaggaggatattagctctagcatgacgaacagcactgccgcttctcgccctccggtgaccctcagacttgtagttccagcttcacagtgcggctctctgattggaaaggggggctgcaaaatcaaagaaatccgtgagagcactggtgctcaagtgcaggtggccggagatatgttgccgaacagcaccgagcgagccattactatagctggcattccacaatcgatcattgaatgcgtcaaacaaatttgcgtggtgatgctggagtccccccccaaaggtgtcacaataccctatcggcccaagccgtcaagtagcccagtcattttcgcgggcggccaggcttacactattcaaggccagtatgcaattcctcagcccgacctcaccaagctccaccagctggctatgcagcagtcgcatttccctatgacccacggaaatacgggctttagcgggatcgagtcttcctctcccgaagtaaaaggatactgggcgggcctggacgctagtgctcagactacatcccacgagctgacaattcccaatgacttgataggctgtataattgggaggcagggcgcaaaaataaacgaaataaggcagatgtcaggtgcgcagatcaaaattgcgaatcccgtggagggcagcactgaccgccaggtgactatcacaggctctgctgcaagtattagcctcgcccaatatctgatcaatgtgcggctgagttcggaaacagggggcatgggttcctcgtag

SEQ ID NO: 39307 - DNA, 1730 bp, Artificial Sequence
  derived and/or modified sequence
cccagaccagcagaggcagcagccggagcagccgcagcctgcgccctctcccgcccgcccgccctccgcccgcccgcccgccctccgccgccctccacccgccccggggtctctttcccccttcctcctcctcctcctccacccccccttcctcctccgcccgcccgcggggcccccctcgccttcccgcccgcccctattgttccgcccccggcctcccgcccttccccttcccgcccgctccccttttcccctcagtcgcctcgcgcctgcagtttttggctttcacccccaaccagtgaccaaagacttgaccactcaaagtccagctccccagaacactgctcgacatggacaccggtgtgattgaaggtggattaaatgtcactctcaccatccggctacttatgcatggaaaggaagttggcagtatcatcggaaagaaaggagaatcagttaagaagatgcgcgaggagagtggtgcacgtatcaacatctcagaagggaattgtcctgagagaattatcactttggctggacccactaatgccatcttcaaagcctttgctatgatcattgacaaactggaagaggacataagcagctctatgaccaatagcacagctgccagtagacccccggtcaccctgaggctggtggtccctgctagtcagtgtggctctctcattggaaaaggtggatgcaagatcaaggaaatacgagagagtacaggggctcaggtccaggtggcaggggatatgctacccaactcaactgagcgggccatcactattgctggcattccacaatccatcattgagtgtgtcaaacagatctgcgtggtcatgttggagtcccccccgaagggcgtgaccatcccgtaccggcccaagccgtccagctctccggtcatctttgcaggtggtcaggcctataccattcaaggacagtatgccattccacagccagatttgaccaagctgcaccagttggcaatgcaacagtctcattttcccatgacgcatggcaacaccggattcagtggcattgaatccagctctccagaggtgaaaggctattgggcaggtttggatgcatctgctcagactacttctcatgaactcaccattccaaacgatttgattggctgcataatcgggcgtcaaggcgccaaaatcaatgagatccgtcagatgtctggggcgcagatcaaaattgcgaacccagtggaaggatctactgataggcaggttaccatcactggatctgctgccagcattagcctggctcaatatctaatcaatgtcaggctttcctcggagacgggtggcatggggagcagctagaacaatgcagattcatccataatccctttctgctgttcaccaccacccatgatccatctgtgtagtttctgaacagtcagcgattccaggttttaaatagtttgtaaattttcagtttctacacactttatcatccactcgtgattttttaattaaagcgttttaattcctttctctgttcagctgttgatgctgagatccatatttagttttataagcttctccctggttttttttttttggctcatgaatttttctgtttgtcatggaaatgtaagagtggaatattaatacatttcagtttagttctgtaatgtcaggaatttttcaaaaaaattaaaagatggactggagctttttctttgtgaatagaaactggatgcc

SEQ ID NO: 39308 - DNA, 996 bp, Artificial Sequence
  derived and/or modified sequence
atggacacgggcgtaatcgaagggggtctcaatgtgactctcacgattcgccttctgatgcacggaaaagaggtgggcagtatcatcggtaaaaaaggggagtctgttaaaaaaatgagagaagagtcaggcgcacgaatcaatatcagcgagggcaactgccccgagcgtatcattacattggcaggtcccactaacgcgatcttcaaagctttcgcaatgatcattgataagttagaggaagacatctcttcttccatgactaactctacagccgcatcccgtcctccggtaacactgaggttagttgtgcccgcttcccagtgtgggagcctgatcggaaagggaggatgcaagatcaaggaaattagagaaagcacgggcgcacaggtacaagtcgcaggcgacatgttgccgaacagtactgaaagagccatcaccattgccggaatcccacagtccattatcgagtgtgtcaaacagatctgcgtggtgatgttggagtctcctcctaaaggcgtgaccattccttaccgccctaaacctagctcctctcccgtgattttcgctggagggcaggcctatactatacagggccaatacgcaatcccccaaccggatctgaccaaattgcatcagctcgctatgcaacaatcacacttccctatgacacacggtaatactggtttctccggaatcgaatcgtcctctccagaagtcaagggatactgggccggactcgacgcctcagcgcagacaaccagtcacgagctaaccattccaaacgatctaattggttgtataatcggaagacagggcgcaaaaattaacgaaatccgtcaaatgtccggagcacagatcaaaatcgctaatccggtagagggaagcactgacaggcaggtgacgatcactggctctgccgcatcaatttctctcgcccagtacttgataaatgtgcggctgtcatctgagaccgggggtatggggtctagttag

SEQ ID NO: 39309 - DNA, 996 bp, Artificial Sequence
  derived and/or modified sequence
atggacaccggcgtgatcgagggcggcctgaacgtgaccctgaccatcagactgctgatgcacggcaaggaggtgggcagcatcatcggcaagaagggcgagagcgtgaagaagatgagagaggagagcggcgccagaatcaacatcagcgagggcaactgccccgagagaatcatcaccctggccggccccaccaacgccatcttcaaggccttcgccatgatcatcgacaagctggaggaggacatcagcagcagcatgaccaacagcaccgccgccagcagaccccccgtgaccctgagactggtggtgcccgccagccagtgcggcagcctgatcggcaagggcggctgcaagatcaaggagatcagagagagcaccggcgcccaggtgcaggtggccggcgacatgctgcccaacagcaccgagagagccatcaccatcgccggcatcccccagagcatcatcgagtgcgtgaagcagatctgcgtggtgatgctggagagcccccccaagggcgtgaccatcccctacagacccaagcccagcagcagccccgtgatcttcgccggcggccaggcctacaccatccagggccagtacgccatcccccagcccgacctgaccaagctgcaccagctggccatgcagcagagccacttccccatgacccacggcaacaccggcttcagcggcatcgagagcagcagccccgaggtgaagggctactgggccggcctggacgccagcgcccagaccaccagccacgagctgaccatccccaacgacctgatcggctgcatcatcggcagacagggcgccaagatcaacgagatcagacagatgagcggcgcccagatcaagatcgccaaccccgtggagggcagcaccgacagacaggtgaccatcaccggcagcgccgccagcatcagcctggcccagtacctgatcaacgtgagactgagcagcgagaccggcggcatgggcagcagctag

SEQ ID NO: 39310 - protein, 192 aa, Artificial Sequence
  derived and/or modified sequence
MGTFDLWTDYLGLAHLVRALSGKEGPETRLSPQPEPEPMLEPVSALEPMPAPESVPVPGPKDQKRSLESSPAPERLCSFCKHNGESRAIYQSHVLKDEAGRVLCPILRDYVCPQCGATRERAHTRRFCPLTGQGYTSVYSHTTRNSAGKKLVRPDKAKTQDTGHRRGGGGGAGFRGAGKSEPSPSCSPSMST

SEQ ID NO: 39311 - protein, 173 aa, Artificial Sequence
  derived and/or modified sequence
MGTFDLWTDYLGLAHLVRALSGKEGPETRLSPQPEPEPMLEPDQKRSLESSPAPERLCSFCKHNGESRAIYQSHVLKDEAGRVLCPILRDYVCPQCGATRERAHTRRFCPLTGQGYTSVYSHTTRNSAGKKLVRPDKAKTQDTGHRRGGGGGAGFRGAGKSEPSPSCSPSMST

SEQ ID NO: 39312 - DNA, 579 bp, Artificial Sequence
  derived and/or modified sequence
atgggcaccttcgacctgtggaccgactacctgggcctggcccacctggtgagagccctgagcggcaaggagggccccgagaccagactgagcccccagcccgagcccgagcccatgctggagcccgtgagcgccctggagcccatgcccgcccccgagagcgtgcccgtgcccggccccaaggaccagaagagaagcctggagagcagccccgcccccgagagactgtgcagcttctgcaagcacaacggcgagagcagagccatctaccagagccacgtgctgaaggacgaggccggcagagtgctgtgccccatcctgagagactacgtgtgcccccagtgcggcgccaccagagagagagcccacaccagaagattctgccccctgaccggccagggctacaccagcgtgtacagccacaccaccagaaacagcgccggcaagaagctggtgagacccgacaaggccaagacccaggacaccggccacagaagaggcggcggcggcggcgccggcttcagaggcgccggcaagagcgagcccagccccagctgcagccccagcatgagcacctag

SEQ ID NO: 39313 - DNA, 522 bp, Artificial Sequence
  derived and/or modified sequence
atgggcaccttcgacctgtggaccgactacctgggcctggcccacctggtgagagccctgagcggcaaggagggccccgagaccagactgagcccccagcccgagcccgagcccatgctggagcccgaccagaagagaagcctggagagcagccccgcccccgagagactgtgcagcttctgcaagcacaacggcgagagcagagccatctaccagagccacgtgctgaaggacgaggccggcagagtgctgtgccccatcctgagagactacgtgtgcccccagtgcggcgccaccagagagagagcccacaccagaagattctgccccctgaccggccagggctacaccagcgtgtacagccacaccaccagaaacagcgccggcaagaagctggtgagacccgacaaggccaagacccaggacaccggccacagaagaggcggcggcggcggcgccggcttcagaggcgccggcaagagcgagcccagccccagctgcagccccagcatgagcacctag

SEQ ID NO: 39314 - DNA, 946 bp, Artificial Sequence
  derived and/or modified sequence
gctccagagaggggaaggaaggggcagcagagaggggtcagaaggagggagcttaagccaggcagggttacttgtctctgtgactccttccgcctggcacatgctgcccagctatggggacctttgacctgtggacagattacctgggtttggcacacctggttagggctctgagtgggaaagagggtcctgaaaccaggctgagcccccagccagagccagagccaatgctggagccggtgtcagccctggagccgatgccagcgccggagtcggtgccagtgccgggacccaaggatcagaagcgcagcctggagtcctcgccagctcccgaacgcctgtgctctttctgcaaacacaacggcgagtcccgggccatctaccagtcccacgtgctgaaggacgaggctggcagggtgctgtgtcccatcctgcgggactacgtgtgtccccagtgcggcgccacacgtgagcgcgcccacacccgacgcttctgcccacttactggccagggctacacctccgtctacagccacaccacccgaaactcggcaggcaagaagctggtccggcctgacaaggcgaagacacaggacacaggccaccgccgaggaggaggaggaggagcaggtttcagaggtgccgggaagtctgagccttcgccctcctgctctccctccatgtccacctaggaggctgcctacacctgggcaagggcacccgggctcggctggatttccaggaagacccaccctatgacgactgcccccactcccagaccctccccccagcctgggattgagccctggggatgacccggggttggcaagggaagagctgaaatcgccctgtccttggggaccccaccctttgtgccatctgccgtttccctagtgctgggcatccagtcagccctcaataaatgcttatgaatggatcaacaaca

SEQ ID NO: 39315 - DNA, 579 bp, Artificial Sequence
  derived and/or modified sequence
atggggactttcgatctttggactgattacctcggtctggcgcacttggtgagagctctcagtggcaaagaggggcccgagacgaggttgtctccacagccagagcctgagcccatgctggagcctgtgagcgccctcgagcctatgccggcgcctgagtcagtgcccgtgccaggacccaaagatcaaaagaggagcctggaatcaagtcccgctcctgagaggttgtgtagcttctgtaaacataacggagaatctagggccatatatcagagtcacgtcctgaaagacgaggcgggaagagtactctgccctatactcagagattacgtctgtcctcagtgtggggcgacgcgggaacgggcacacacgagaagattttgtcctttgacaggccaggggtacacttcagtgtactcccatactaccagaaatagcgcgggcaaaaaattagtacgacctgacaaggctaagacccaggacaccgggcaccgtcgcgggggcggcggcggggcaggcttccggggggcaggaaaaagcgaacctagtccaagctgcagcccctctatgtccacctag

SEQ ID NO: 39316 - DNA, 522 bp, Artificial Sequence
  derived and/or modified sequence
atggggaccttcgacctgtggaccgactacctcggcttggctcatctggttagggctctgagtggcaaagaggggcctgagacacgtctatccccgcaacccgagcccgaaccgatgctcgaaccagatcagaagcgctcgctcgagagttctcccgcgccagaaaggctgtgtagcttctgtaagcataatggcgaatctcgagctatataccagtcacacgtcttgaaggatgaagccggccgagtcctgtgcccgattttgcgggattatgtatgccctcaatgcggggcaacccgggagagggctcatactaggaggttctgtcccctgaccggtcaggggtatacttctgtatattcacacacaacacgcaattctgcaggtaaaaaactcgtgcgccccgataaggctaagacgcaggacaccggacacaggcggggaggcggaggcggtgccgggttccgtggagccggtaagagtgagccctcccccagctgctctcccagcatgagcacctag

SEQ ID NO: 39317 - DNA, 579 bp, Artificial Sequence
  derived and/or modified sequence
atgggcacctttgacctgtggacagactacctgggcctggcccacctggtgcgggccctgagcggcaaggagggccctgagacccggctgagcccccagcctgagcctgagcccatgctggagcctgtgtctgccctggagcccatgcctgcccctgagagcgtgcctgtgcccggccccaaggaccagaagaggagcctggagagcagccctgcccctgagcggctgtgcagcttctgcaagcacaatggagagagccgggccatctaccagagccacgtgctgaaggatgaagctggccgggtgctgtgccccatcctgcgggactatgtgtgcccccagtgtggggccacccgggagcgggcccacacccggcgcttctgccccctgaccggccagggctacacctctgtgtacagccacaccaccaggaacagcgctgggaagaagctggtgcggccagacaaggccaagacccaggacaccggccacagaagaggaggcggcggcggggccggcttcagaggagctgggaagtctgagcccagccccagctgcagccccagcatgagcacctag

SEQ ID NO: 39318 - DNA, 522 bp, Artificial Sequence
  derived and/or modified sequence
atgggcacctttgacctgtggacagactacctgggcctggcccacctggtgcgggccctgagcggcaaggagggccctgagacccggctgagcccccagcctgagcctgagcccatgctggagccagaccagaagaggagcctggagagcagccctgcccctgagcggctgtgcagcttctgcaagcacaacggggagagccgggccatctaccagagccacgtgctgaaggatgaggccggccgggtgctgtgccccatcctgcgggactatgtgtgcccccagtgtggggccacccgggagcgggcccacacccggcgcttctgccccctgaccggccagggctacacctctgtgtacagccacaccaccagaaattctgctgggaagaagctggtgcggccagacaaggccaagacccaggacaccggccaccggcggggcggcggcggcggggccggcttccggggggccggcaagtctgagcccagccccagctgcagccccagcatgagcacctag

SEQ ID NO: 39319 - DNA, 579 bp, Artificial Sequence
  derived and/or modified sequence
atgggcaccttcgacctgtggaccgactacctgggcctggcccacttggtgcgtgctctgagcggtaaggaaggacccgagacaagactttctccccagccagaacctgaacccatgcttgaacctgtatctgccctcgagccaatgccggcgcctgagtctgtaccagtccctgggccaaaagatcagaaacggtccctcgaatcgtctccggcccccgagcgcttgtgtagtttctgcaaacacaatggcgaatctagagcaatctaccaatctcacgtgctgaaggatgaggctgggagagttctatgcccgatcctacgcgactacgtgtgcccacagtgtggcgccacccgagaacgagcgcacaccaggcgcttttgccctttaactggacaagggtacactagtgtttacagtcataccacccgtaatagcgccgggaagaaacttgtccggcccgacaaggcaaagactcaggacactggtcacagaagggggggtggcgggggcgcgggcttcagaggtgctggaaagagcgagccatctccctcctgttcacctagcatgtcgacttag

SEQ ID NO: 39320 - DNA, 776 bp, Artificial Sequence
  derived and/or modified sequence
atggggacctttgacctgtggacagattacctgggtttggcacacctggttagggctctgagtgggaaagagggtcctgaaaccaggctgagcccccagccagagccagagccaatgctggagccggatcagaagcgcagcctggagtcctcgccagctcccgaacgcctgtgctctttctgcaaacacaacggcgagtcccgggccatctaccagtcccacgtgctgaaggacgaggctggcagggtgctgtgtcccatcctgcgggactacgtgtgtccccagtgcggcgccacacgtgagcgcgcccacacccgacgcttctgcccacttactggccagggctacacctccgtctacagccacaccacccgaaactcggcaggcaagaagctggtccggcctgacaaggcgaagacacaggacacaggccaccgccgaggaggaggaggaggagcaggtttcagaggtgccgggaagtctgagccttcgccctcctgctctccctccatgtccacctaggaggctgcctacacctgggcaagggcacccgggctcggctggatttccaggaagacccaccctatgacgactgcccccactcccagaccctccccccagcctgggattgagccctggggatgacccggggttggcaagggaagagctgaaatcgccctgtccttggggaccccaccctttgtgccatctgccgtttccctagtgctgggcatccagtcagccctcaataaatgcttatgaatggatcaacaaca

SEQ ID NO: 39321 - DNA, 522 bp, Artificial Sequence
  derived and/or modified sequence
atgggcaccttcgacctgtggaccgactacctgggcctggcccacctcgtgcgagcactgtcaggaaaagaggggcctgagacccgcctgagcccccagccggaacccgaacccatgctggaacccgaccagaaacggtcattggagtccagcccagcccctgagagactctgctcattttgcaagcacaatggcgaaagccgagccatctaccagagtcatgttttgaaggatgaagctggaagggttctgtgcccgatcctcagggattacgtctgtcctcaatgtggagccactcgggagagggctcacacccgacgtttttgcccactgaccgggcagggctatacttcagtttacagccacacgacaaggaactccgccggaaagaagctggtacgacctgataaggccaagacacaggacacaggacaccggcgcgggggggggggcggtgccgggttccgcggtgcaggtaagtcagaaccttccccttcttgctcaccttccatgtctacttag

SEQ ID NO: 39322 - DNA, 579 bp, Artificial Sequence
  derived and/or modified sequence
atgggaacattcgatctgtggactgattatctgggcctggcccacctggtgcgtgcactttctgggaaggagggccctgagaccagactatcgccacagccagagccggagcccatgctagaaccagtctcagcactcgagccaatgccagcccctgagtctgtgcctgtgcccggtccgaaagatcagaagcgcagtcttgagtcttccccagccccagagagactgtgttccttctgcaagcacaatggggagagccgcgctatttaccagagccatgtcctcaaggacgaagccggacgggtactgtgcccaatcctgagggattacgtgtgtccacagtgcggagccacgagagagagagcacatacccgtcgattttgcccccttacaggccagggctacacgtcagtctactctcacacaactcgcaattctgctggaaaaaaactcgtgcgacccgacaaagcaaagactcaggataccggccaccggcgtggtggaggtggcggtgcgggattcaggggtgcaggaaagtcagagccatctccctcgtgctctcccagcatgtctacctag

SEQ ID NO: 39323 - DNA, 522 bp, Artificial Sequence
  derived and/or modified sequence
atgggcactttcgatctatggaccgactaccttgggctggcccacctcgttcgggctctcagtggaaaagaagggcctgaaacccgattgagtcctcagccagagccagaacccatgctggaaccggaccagaagaggagtctggaatcaagtcctgccccagagagactctgcagtttctgcaaacacaatggagagtcccgcgctatctaccagagccacgtgctgaaagatgaagccggacgagttctttgccccatcctccgagattatgtgtgtccacagtgcggcgctaccagggaacgcgctcacacaaggcgtttttgccccctgacaggtcagggatacacatctgtttacagtcatacaacaaggaactctgcaggcaaaaagctggtaagaccagataaggcgaagacgcaagataccggccaccgcagggggggtgggggaggggctgggttcaggggcgctggcaagtcagagccgagcccatcatgttcgccaagcatgtcgacttag

SEQ ID NO: 39324 - protein, 7968 aa, Artificial Sequence
  derived and/or modified sequence
MDQPQFSGAPRFLTRPKAFVVSVGKDATLSCQIVGNPTPQVSWEKDQQPVAAGARFRLAQDGDLYRLTILDLALGDSGQYVCRARNAIGEAFAAVGLQVDAEAACAEQAPHFLLRPTSIRVREGSEATFRCRVGGSPRPAVSWSKDGRRLGEPDGPRVRVEELGEASALRIRAARPRDGGTYEVRAENPLGAASAAAALVVDSDAADTASRPGTSTAALLAHLQRRREAMRAEGAPASPPSTGTRTCTVTEGKHARLSCYVTGEPKPETVWKKDGQLVTEGRRHVVYEDAQENFVLKILFCKQSDRGLYTCTASNLVGQTYSSVLVVVREPAVPFKKRLQDLEVREKESATFLCEVPQPSTEAAWFKEETRLWASAKYGIEEEGTERRLTVRNVSADDDAVYICETPEGSRTVAELAVQGNLLRKLPRKTAVRVGDTAMFCVELAVPVGPVHWLRNQEEVVAGGRVAISAEGTRHTLTISQCCLEDVGQVAFMAGDCQTSTQFCVSAPRKPPLQPPVDPVVKARMESSVILSWSPPPHGERPVTIDGYLVEKKKLGTYTWIRCHEAEWVATPELTVADVAEEGNFQFRVSALNSFGQSPYLEFPGTVHLAPKLAVRTPLKAVQAVEGGEVTFSVDLTVASAGEWFLDGQALKASSVYEIHCDRTRHTLTIREVPASLHGAQLKFVANGIESSIRMEVRAAPGLTANKPPAAAAREVLARLHEEAQLLAELSDQAAAVTWLKDGRTLSPGPKYEVQASAGRRVLLVRDVARDDAGLYECVSRGGRIAYQLSVQGLARFLHKDMAGSCVDAVAGGPAQFECETSEAHVHVHWYKDGMELGHSGERFLQEDVGTRHRLVAATVTRQDEGTYSCRVGEDSVDFRLRVSEPKVVFAKEQLARRKLQAEAGASATLSCEVAQAQTEVTWYKDGKKLSSSSKVCMEATGCTRRLVVQQAGQADAGEYSCEAGGQRLSFHLDVKEPKVVFAKDQVAHSEVQAEAGASATLSCEVAQAQTEVMWYKDGKKLSSSLKVHVEAKGCRRRLVVQQAGKTDAGDYSCEARGQRVSFRLHITEPKMMFAKEQSVHNEVQAEAGASAMLSCEVAQAQTEVTWYKDGKKLSSSSKVGMEVKGCTRRLVLPQAGKADAGEYSCEAGGQRVSFHLHITEPKGVFAKEQSVHNEVQAEAGTTAMLSCEVAQPQTEVTWYKDGKKLSSSSKVRMEVKGCTRRLVVQQVGKADAGEYSCEAGGQRVSFQLHITEPKAVFAKEQLVHNEVRTEAGASATLSCEVAQAQTEVTWYKDGKKLSSSSKVRIEAAGCMRQLVVQQAGQADAGEYTCEAGGQRLSFHLDVSEPKAVFAKEQLAHRKVQAEAGAIATLSCEVAQAQTEVTWYKDGKKLSSSSKVRMEAVGCTRRLVVQQACQADTGEYSCEAGGQRLSFSLDVAEPKVVFAKEQPVHREVQAQAGASTTLSCEVAQAQTEVMWYKDGKKLSFSSKVRMEAVGCTRRLVVQQAGQAVAGEYSCEAGSQRLSFHLHVAEPKAVFAKEQPASREVQAEAGTSATLSCEVAQAQTEVTWYKDGKKLSSSSKVRMEAVGCTRRLVVQEAGQADAGEYSCKAGDQRLSFHLHVAEPKVVFAKEQPAHREVQAEAGASATLSCEVAQAQTEVTWYKDGKKLSSSSKVRVEAVGCTRRLVVQQAGQAEAGEYSCEAGGQQLSFRLQVAELEPQISERPCRREPLVVKEHEDIILTATLATPSAATVTWLKDGVEIRRSKRHETASQGDTHTLTVHGAQVLDSAIYSCRVGAEGQDFPVQVEEVAAKFCRLLEPVCGELGGTVTLACELSPACAEVVWRCGNTQLRVGKRFQMVAEGPVRSLTVLGLRAEDAGEYVCESRDDHTSAQLTVSVPRVVKFMSGLSTVVAEEGGEATFQCVVSPSDVAVVWFRDGALLQPSEKFAISQSGASHSLTISDLVLEDAGQITVEAEGASSSAALRVREAPVLFKKKLEPQTVEERSSVTLEVELTRPWPELRWTRNATALAPGKNVEIHAEGARHRLVLHNVGFADRGFFGCETPDDKTQAKLTVEMRQVRLVRGLQAVEAREQGTATMEVQLSHADVDGSWTRDGLRFQQGPTCHLAVRGPMHTLTLSGLRPEDSGLMVFKAEGVHTSARLVVTELPVSFSRPLQDVVTTEKEKVTLECELSRPNVDVRWLKDGVELRAGKTMAIAAQGACRSLTIYRCEFADQGVYVCDAHDAQSSASVKVQGRTYTLIYRRVLAEDAGEIQFVAENAESRAQLRVKELPVTLVRPLRDKIAMEKHRGVLECQVSRASAQVRWFKGSQELQPGPKYELVSDGLYRKLIISDVHAEDEDTYTCDAGDVKTSAQFFVEEQSITIVRGLQDVTVMEPAPAWFECETSIPSVRPPKWLLGKTVLQAGGNVGLEQEGTVHRLMLRRTCSTMTGPVHFTVGKSRSSARLVVSDIPVVLTRPLEPKTGRELQSVVLSCDFRPAPKAVQWYKDDTPLSPSEKFKMSLEGQMAELRILRLMPADAGVYRCQAGSAHSSTEVTVEAREVTVTGPLQDAEATEEGWASFSCELSHEDEEVEWSLNGMPLYNDSFHEISHKGRRHTLVLKSIQRADAGIVRASSLKVSTSARLEVRVKPVVFLKALDDLSAEERGTLALQCEVSDPEAHVVWRKDGVQLGPSDKYDFLHTAGTRGLVVHDVSPEDAGLYTCHVGSEETRARVRVHDLHVGITKRLKTMEVLEGESCSFECVLSHESASDPAMWTVGGKTVGSSSRFQATRQGRKYILVVREAAPSDAGEVVFSVRGLTSKASLIVRERPAAIIKPLEDQWVAPGEDVELRCELSRAGTPVHWLKDRKAIRKSQKYDVVCEGTMAMLVIRGASLKDAGEYTCEVEASKSTASLHVEEKANCFTEELTNLQVEEKGTAVFTCKTEHPAATVTWRKGLLELRASGKHQPSQEGLTLRLTISALEKADSDTYTCDIGQAQSRAQLLVQGRRVHIIEDLEDVDVQEGSSATFRCRISPANYEPVHWFLDKTPLHANELNEIDAQPGGYHVLTLRQLALKDSGTIYFEAGDQRASAALRVTEKPSVFSRELTDATITEGEDLTLVCETSTCDIPVCWTKDGKTLRGSARCQLSHEGHRAQLLITGATLQDSGRYKCEAGGACSSSIVRVHARPVRFQEALKDLEVLEGGAATLRCVLSSVAAPVKWCYGNNVLRPGDKYSLRQEGAMLELVVRNLRPQDSGRYSCSFGDQTTSATLTVTALPAQFIGKLRNKEATEGATATLRCELSKAAPVEWRKGSETLRDGDRYCLRQDGAMCELQIRGLAMVDAAEYSCVCGEERTSASLTIRPMPAHFIGRLRHQESIEGATATLRCELSKAAPVEWRKGRESLRDGDRHSLRQDGAVCELQICGLAVADAGEYSCVCGEERTSATLTVKALPAKFTEGLRNEEAVEGATAMLWCELSKVAPVEWRKGPENLRDGDRYILRQEGTRCELQICGLAMADAGEYLCVCGQERTSATLTIRALPARFIEDVKNQEAREGATAVLQCELNSAAPVEWRKGSETLRDGDRYSLRQDGTKCELQIRGLAMADTGEYSCVCGQERTSAMLTVRALPIKFTEGLRNEEATEGATAVLRCELSKMAPVEWWKGHETLRDGDRHSLRQDGARCELQIRGLVAEDAGEYLCMCGKERTSAMLTVRAMPSKFIEGLRNEEATEGDTATLWCELSKAAPVEWRKGHETLRDGDRHSLRQDGSRCELQIRGLAVVDAGEYSCVCGQERTSATLTVRALPARFIEDVKNQEAREGATAVLQCELSKAAPVEWRKGSETLRGGDRYSLRQDGTRCELQIHGLSVADTGEYSCVCGQERTSATLTVRAPQPVFREPLQSLQAEEGSTATLQCELSEPTATVVWSKGGLQLQANGRREPRLQGCTAELVLQDLQREDTGEYTCTCGSQATSATLTVTAAPVRFLRELQHQEVDEGGTAHLCCELSRAGASVEWRKGSLQLFPCAKYQMVQDGAAAELLVRGVEQEDAGDYTCDTGHTQSMASLSVRVPRPKFKTRLQSLEQETGDIARLCCQLSDAESGAVVQWLKEGVELHAGPKYEMRSQGATRELLIHQLEAKDTGEYACVTGGQKTAASLRVTEPEVTIVRGLVDAEVTADEDVEFSCEVSRAGATGVQWCLQGLPLQSNEVTEVAVRDGRIHTLRLKGVTPEDAGTVSFHLGNHASSAQLTVRAPEVTILEPLQDVQLSEGQDASFQCRLSRASGQEARWALGGVPLQANEMNDITVEQGTLHLLTLHKVTLEDAGTVSFHVGTCSSEAQLKVTAKNTVVRGLENVEALEGGEALFECQLSQPEVAAHTWLLDDEPVHTSENAEVVFFENGLRHLLLLKNLRPQDSCRVTFLAGDMVTSAFLTVRGWRLEILEPLKNAAVRAGAQACFTCTLSEAVPVGEASWYINGAAVQPDDSDWTVTADGSHHALLLRSAQPHHAGEVTFACRDAVASARLTVLGLPDPPEDAEVVARSSHTVTLSWAAPMSDGGGGLCGYRVEVKEGATGQWRLCHELVPGPECVVDGLAPGETYRFRVAAVGPVGAGEPVHLPQTVRLAEPPKPVPPQPSAPESRQVAAGEDVSLELEVVAEAGEVIWHKGMERIQPGGRFEVVSQGRQQMLVIKGFTAEDQGEYHCGLAQGSICPAAATFQVALSPASVDEAPQPSLPPEAAQEGDLHLLWEALARKRRMSREPTLDSISELPEEDGRSQRLPQEAEEVAPDLSEGYSTADELARTGDADLSHTSSDDESRAGTPSLVTYLKKAGRPGTSPLASKVGAPAAPSVKPQQQQEPLAAVRPPLGDLSTKDLGDPSMDKAAVKIQAAFKGYKVRKEMKQQEGPMFSHTFGDTEAQVGDALRLECVVASKADVRARWLKDGVELTDGRHHHIDQLGDGTCSLLITGLDRADAGCYTCQVSNKFGQVTHSACVVVSGSESEAESSSGGELDDAFRRAARRLHRLFRTKSPAEVSDEELFLSADEGPAEPEEPADWQTYREDEHFICIRFEALTEARQAVTRFQEMFATLGIGVEIKLVEQGPRRVEMCISKETPAPVVPPEPLPSLLTSDAAPVFLTELQNQEVQDGYPVSFDCVVTGQPMPSVRWFKDGKLLEEDDHYMINEDQQGGHQLIITAVVPADMGVYRCLAENSMGVSSTKAELRVDLTSTDYDTAADATESSSYFSAQGYLSSREQEGTESTTDEGQLPQVVEELRDLQVAPGTRLAKFQLKVKGYPAPRLYWFKDGQPLTASAHIRMTDKKILHTLEIISVTREDSGQYAAYISNAMGAAYSSARLLVRGPDEPEEKPASDVHEQLVPPRMLERFTPKKVKKGSSITFSVKVEGRPVPTVHWLREEAERGVLWIGPDTPGYTVASSAQQHSLVLLDVGRQHQGTYTCIASNAAGQALCSASLHVSGLPKVEEQEKVKEALISTFLQGTTQAISAQGLETASFADLGGQRKEEPLAAKEALGHLSLAEVGTEEFLQKLTSQITEMVSAKITQAKLQVPGGDSDEDSKTPSASPRHGRSRPSSSIQESSSESEDGDARGEIFDIYVVTADYLPLGAEQDAITLREGQYVEVLDAAHPLRWLVRTKPTKSSPSRQGWVSPAYLDRRLKLSPEWGAAEAPEFPGEAVSEDEYKARLSSVIQELLSSEQAFVEELQFLQSHHLQHLERCPHVPIAVAGQKAVIFRNVRDIGRFHSSFLQELQQCDTDDDVAMCFIKNQAAFEQYLEFLVGRVQAESVVVSTAIQEFYKKYAEEALLAGDPSQPPPPPLQHYLEQPVERVQRYQALLKELIRNKARNRQNCALLEQAYAVVSALPQRAENKLHVSLMENYPGTLQALGEPIRQGHFIVWEGAPGARMPWKGHNRHVFLFRNHLVICKPRRDSRTDTVSYVFRNMMKLSSIDLNDQVEGDDRAFEVWQEREDSVRKYLLQARTAIIKSSWVKEICGIQQRLALPVWRPPDFEEELADCTAELGETVKLACRVTGTPKPVISWYKDGKAVQVDPHHILIEDPDGSCALILDSLTGVDSGQYMCFAASAAGNCSTLGKILVQVPPRFVNKVRASPFVEGEDAQFTCTIEGAPYPQIRWYKDGALLTTGNKFQTLSEPRSGLLVLVIRAASKEDLGLYECELVNRLGSARASAELRIQSPMLQAQEQCHREQLVAAVEDTTLERADQEVTSVLKRLLGPKAPGPSTGDLTGPGPCPRGAPALQETGSQPPVTGTSEAPAVPPRVPQPLLHEGPEQEPEAIARAQEWTVPIRMEGAAWPGAGTGELLWDVHSHVVRETTQRTYTYQAIDTHTARPPSMQVTIEDVQAQTGGTAQFEAIIEGDPQPSVTWYKDSVQLVDSTRLSQQQEGTTYSLVLRHVASKDAGVYTCLAQNTGGQVLCKAELLVLGGDNEPDSEKQSHRRKLHSFYEVKEEIGRGVFGFVKRVQHKGNKILCAAKFIPLRSRTRAQAYRERDILAALSHPLVTGLLDQFETRKTLILILELCSSEELLDRLYRKGVVTEAEVKVYIQQLVEGLHYLHSHGVLHLDIKPSNILMVHPAREDIKICDFGFAQNITPAELQFSQYGSPEFVSPEIIQQNPVSEASDIWAMGVISYLSLTCSSPFAGESDRATLLNVLEGRVSWSSPMAAHLSEDAKDFIKATLQRAPQARPSAAQCLSHPWFLKSMPAEEAHFINTKQLKFLLARSRWQRSLMSYKSILVMRSIPELLRGPPDSPSLGVARHLCRDTGGSSSSSSSSDNELAPFARAKSLPPSPVTHSPLLHPRGFLRPSASLPEEAEASERSTEAPAPPASPEGAGPPAAQGCVPRHSVIRSLFYHQAGESPEHGALAPGSRRHPARRRHLLKGGYIAGALPGLREPLMEHRVLEEEAAREEQATLLAKAPSFETALRLPASGTHLAPGHSHSLEHDSPSTPRPSSEACGEAQRLPSAPSGGAPIRDMGHPQGSKQLPSTGGHPGTAQPERPSPDSPWGQPAPFCHPKQGSAPQEGCSPHPAVAPCPPGSFPPGSCKEAPLVPSSPFLGQPQAPPAPAKASPPLDSKMGPGDISLPGRPKPGPCSSPGSASQASSSQVSSLRVGSSQVGTEPGPSLDAEGWTQEAEDLSDSTPTLQRPQEQATMRKFSLGGRGGYAGVAGYGTFAFGGDAGGMLGQGPMWARIAWAVSQSEEEEQEEARAESQSEEQQEARAESPLPQVSARPVPEVGRAPTRSSPEPTPWEDIGQVSLVQIRDLSGDAEAADTISLDISEVDPAYLNLSDLYDIKYLPFEFMIFRKVPKSAQPEPPSPMAEEELAEFPEPTWPWPGELGPHAGLEITEESEDVDALLAEAAVGRKRKWSSPSRSLFHFPGRHLPLDEPAELGLRERVKASVEHISRILKGRPEGLEKEGPPRKKPGLASFRLSGLKSWDRAPTFLRELSDETVVLGQSVTLACQVSAQPAAQATWSKDGAPLESSSRVLISATLKNFQLLTILVVVAEDLGVYTCSVSNALGTVTTTGVLRKAERPSSSPCPDIGEVYADGVLLVWKPVESYGPVTYIVQCSLEGGSWTTLASDIFDCCYLTSKLSRGGTYTFRTACVSKAGMGPYSSPSEQVLLGGPSHLASEEESQGRSAQPLPSTKTFAFQTQIQRGRFSVVRQCWEKASGRALAAKIIPYHPKDKTAVLREYEALKGLRHPHLAQLHAAYLSPRHLVLILELCSGPELLPCLAERASYSESEVKDYLWQMLSATQYLHNQHILHLDLRSENMIITEYNLLKVVDLGNAQSLSQEKVLPSDKFKDYLETMAPELLEGQGAVPQTDIWAIGVTAFIMLSAEYPVSSEGARDLQRGLRKGLVRLSRCYAGLSGGAVAFLRSTLCAQPWGRPCASSCLQCPWLTEEGPACSRPAPVTFPTARLRVFVRNREKRRALLYKRHNLAQVR

SEQ ID NO: 39325 - DNA, 23907 bp, Artificial Sequence
  derived and/or modified sequence
atggaccagccccagttcagcggcgcccccagattcctgaccagacccaaggccttcgtggtgagcgtgggcaaggacgccaccctgagctgccagatcgtgggcaaccccaccccccaggtgagctgggagaaggaccagcagcccgtggccgccggcgccagattcagactggcccaggacggcgacctgtacagactgaccatcctggacctggccctgggcgacagcggccagtacgtgtgcagagccagaaacgccatcggcgaggccttcgccgccgtgggcctgcaggtggacgccgaggccgcctgcgccgagcaggccccccacttcctgctgagacccaccagcatcagagtgagagagggcagcgaggccaccttcagatgcagagtgggcggcagccccagacccgccgtgagctggagcaaggacggcagaagactgggcgagcccgacggccccagagtgagagtggaggagctgggcgaggccagcgccctgagaatcagagccgccagacccagagacggcggcacctacgaggtgagagccgagaaccccctgggcgccgccagcgccgccgccgccctggtggtggacagcgacgccgccgacaccgccagcagacccggcaccagcaccgccgccctgctggcccacctgcagagaagaagagaggccatgagagccgagggcgcccccgccagcccccccagcaccggcaccagaacctgcaccgtgaccgagggcaagcacgccagactgagctgctacgtgaccggcgagcccaagcccgagaccgtgtggaagaaggacggccagctggtgaccgagggcagaagacacgtggtgtacgaggacgcccaggagaacttcgtgctgaagatcctgttctgcaagcagagcgacagaggcctgtacacctgcaccgccagcaacctggtgggccagacctacagcagcgtgctggtggtggtgagagagcccgccgtgcccttcaagaagagactgcaggacctggaggtgagagagaaggagagcgccaccttcctgtgcgaggtgccccagcccagcaccgaggccgcctggttcaaggaggagaccagactgtgggccagcgccaagtacggcatcgaggaggagggcaccgagagaagactgaccgtgagaaacgtgagcgccgacgacgacgccgtgtacatctgcgagacccccgagggcagcagaaccgtggccgagctggccgtgcagggcaacctgctgagaaagctgcccagaaagaccgccgtgagagtgggcgacaccgccatgttctgcgtggagctggccgtgcccgtgggccccgtgcactggctgagaaaccaggaggaggtggtggccggcggcagagtggccatcagcgccgagggcaccagacacaccctgaccatcagccagtgctgcctggaggacgtgggccaggtggccttcatggccggcgactgccagaccagcacccagttctgcgtgagcgcccccagaaagccccccctgcagccccccgtggaccccgtggtgaaggccagaatggagagcagcgtgatcctgagctggagcccccccccccacggcgagagacccgtgaccatcgacggctacctggtggagaagaagaagctgggcacctacacctggatcagatgccacgaggccgagtgggtggccacccccgagctgaccgtggccgacgtggccgaggagggcaacttccagttcagagtgagcgccctgaacagcttcggccagagcccctacctggagttccccggcaccgtgcacctggcccccaagctggccgtgagaacccccctgaaggccgtgcaggccgtggagggcggcgaggtgaccttcagcgtggacctgaccgtggccagcgccggcgagtggttcctggacggccaggccctgaaggccagcagcgtgtacgagatccactgcgacagaaccagacacaccctgaccatcagagaggtgcccgccagcctgcacggcgcccagctgaagttcgtggccaacggcatcgagagcagcatcagaatggaggtgagagccgcccccggcctgaccgccaacaagccccccgccgccgccgccagagaggtgctggccagactgcacgaggaggcccagctgctggccgagctgagcgaccaggccgccgccgtgacctggctgaaggacggcagaaccctgagccccggccccaagtacgaggtgcaggccagcgccggcagaagagtgctgctggtgagagacgtggccagagacgacgccggcctgtacgagtgcgtgagcagaggcggcagaatcgcctaccagctgagcgtgcagggcctggccagattcctgcacaaggacatggccggcagctgcgtggacgccgtggccggcggccccgcccagttcgagtgcgagaccagcgaggcccacgtgcacgtgcactggtacaaggacggcatggagctgggccacagcggcgagagattcctgcaggaggacgtgggcaccagacacagactggtggccgccaccgtgaccagacaggacgagggcacctacagctgcagagtgggcgaggacagcgtggacttcagactgagagtgagcgagcccaaggtggtgttcgccaaggagcagctggccagaagaaagctgcaggccgaggccggcgccagcgccaccctgagctgcgaggtggcccaggcccagaccgaggtgacctggtacaaggacggcaagaagctgagcagcagcagcaaggtgtgcatggaggccaccggctgcaccagaagactggtggtgcagcaggccggccaggccgacgccggcgagtacagctgcgaggccggcggccagagactgagcttccacctggacgtgaaggagcccaaggtggtgttcgccaaggaccaggtggcccacagcgaggtgcaggccgaggccggcgccagcgccaccctgagctgcgaggtggcccaggcccagaccgaggtgatgtggtacaaggacggcaagaagctgagcagcagcctgaaggtgcacgtggaggccaagggctgcagaagaagactggtggtgcagcaggccggcaagaccgacgccggcgactacagctgcgaggccagaggccagagagtgagcttcagactgcacatcaccgagcccaagatgatgttcgccaaggagcagagcgtgcacaacgaggtgcaggccgaggccggcgccagcgccatgctgagctgcgaggtggcccaggcccagaccgaggtgacctggtacaaggacggcaagaagctgagcagcagcagcaaggtgggcatggaggtgaagggctgcaccagaagactggtgctgccccaggccggcaaggccgacgccggcgagtacagctgcgaggccggcggccagagagtgagcttccacctgcacatcaccgagcccaagggcgtgttcgccaaggagcagagcgtgcacaacgaggtgcaggccgaggccggcaccaccgccatgctgagctgcgaggtggcccagccccagaccgaggtgacctggtacaaggacggcaagaagctgagcagcagcagcaaggtgagaatggaggtgaagggctgcaccagaagactggtggtgcagcaggtgggcaaggccgacgccggcgagtacagctgcgaggccggcggccagagagtgagcttccagctgcacatcaccgagcccaaggccgtgttcgccaaggagcagctggtgcacaacgaggtgagaaccgaggccggcgccagcgccaccctgagctgcgaggtggcccaggcccagaccgaggtgacctggtacaaggacggcaagaagctgagcagcagcagcaaggtgagaatcgaggccgccggctgcatgagacagctggtggtgcagcaggccggccaggccgacgccggcgagtacacctgcgaggccggcggccagagactgagcttccacctggacgtgagcgagcccaaggccgtgttcgccaaggagcagctggcccacagaaaggtgcaggccgaggccggcgccatcgccaccctgagctgcgaggtggcccaggcccagaccgaggtgacctggtacaaggacggcaagaagctgagcagcagcagcaaggtgagaatggaggccgtgggctgcaccagaagactggtggtgcagcaggcctgccaggccgacaccggcgagtacagctgcgaggccggcggccagagactgagcttcagcctggacgtggccgagcccaaggtggtgttcgccaaggagcagcccgtgcacagagaggtgcaggcccaggccggcgccagcaccaccctgagctgcgaggtggcccaggcccagaccgaggtgatgtggtacaaggacggcaagaagctgagcttcagcagcaaggtgagaatggaggccgtgggctgcaccagaagactggtggtgcagcaggccggccaggccgtggccggcgagtacagctgcgaggccggcagccagagactgagcttccacctgcacgtggccgagcccaaggccgtgttcgccaaggagcagcccgccagcagagaggtgcaggccgaggccggcaccagcgccaccctgagctgcgaggtggcccaggcccagaccgaggtgacctggtacaaggacggcaagaagctgagcagcagcagcaaggtgagaatggaggccgtgggctgcaccagaagactggtggtgcaggaggccggccaggccgacgccggcgagtacagctgcaaggccggcgaccagagactgagcttccacctgcacgtggccgagcccaaggtggtgttcgccaaggagcagcccgcccacagagaggtgcaggccgaggccggcgccagcgccaccctgagctgcgaggtggcccaggcccagaccgaggtgacctggtacaaggacggcaagaagctgagcagcagcagcaaggtgagagtggaggccgtgggctgcaccagaagactggtggtgcagcaggccggccaggccgaggccggcgagtacagctgcgaggccggcggccagcagctgagcttcagactgcaggtggccgagctggagccccagatcagcgagagaccctgcagaagagagcccctggtggtgaaggagcacgaggacatcatcctgaccgccaccctggccacccccagcgccgccaccgtgacctggctgaaggacggcgtggagatcagaagaagcaagagacacgagaccgccagccagggcgacacccacaccctgaccgtgcacggcgcccaggtgctggacagcgccatctacagctgcagagtgggcgccgagggccaggacttccccgtgcaggtggaggaggtggccgccaagttctgcagactgctggagcccgtgtgcggcgagctgggcggcaccgtgaccctggcctgcgagctgagccccgcctgcgccgaggtggtgtggagatgcggcaacacccagctgagagtgggcaagagattccagatggtggccgagggccccgtgagaagcctgaccgtgctgggcctgagagccgaggacgccggcgagtacgtgtgcgagagcagagacgaccacaccagcgcccagctgaccgtgagcgtgcccagagtggtgaagttcatgagcggcctgagcaccgtggtggccgaggagggcggcgaggccaccttccagtgcgtggtgagccccagcgacgtggccgtggtgtggttcagagacggcgccctgctgcagcccagcgagaagttcgccatcagccagagcggcgccagccacagcctgaccatcagcgacctggtgctggaggacgccggccagatcaccgtggaggccgagggcgccagcagcagcgccgccctgagagtgagagaggcccccgtgctgttcaagaagaagctggagccccagaccgtggaggagagaagcagcgtgaccctggaggtggagctgaccagaccctggcccgagctgagatggaccagaaacgccaccgccctggcccccggcaagaacgtggagatccacgccgagggcgccagacacagactggtgctgcacaacgtgggcttcgccgacagaggcttcttcggctgcgagacccccgacgacaagacccaggccaagctgaccgtggagatgagacaggtgagactggtgagaggcctgcaggccgtggaggccagagagcagggcaccgccaccatggaggtgcagctgagccacgccgacgtggacggcagctggaccagagacggcctgagattccagcagggccccacctgccacctggccgtgagaggccccatgcacaccctgaccctgagcggcctgagacccgaggacagcggcctgatggtgttcaaggccgagggcgtgcacaccagcgccagactggtggtgaccgagctgcccgtgagcttcagcagacccctgcaggacgtggtgaccaccgagaaggagaaggtgaccctggagtgcgagctgagcagacccaacgtggacgtgagatggctgaaggacggcgtggagctgagagccggcaagaccatggccatcgccgcccagggcgcctgcagaagcctgaccatctacagatgcgagttcgccgaccagggcgtgtacgtgtgcgacgcccacgacgcccagagcagcgccagcgtgaaggtgcagggcagaacctacaccctgatctacagaagagtgctggccgaggacgccggcgagatccagttcgtggccgagaacgccgagagcagagcccagctgagagtgaaggagctgcccgtgaccctggtgagacccctgagagacaagatcgccatggagaagcacagaggcgtgctggagtgccaggtgagcagagccagcgcccaggtgagatggttcaagggcagccaggagctgcagcccggccccaagtacgagctggtgagcgacggcctgtacagaaagctgatcatcagcgacgtgcacgccgaggacgaggacacctacacctgcgacgccggcgacgtgaagaccagcgcccagttcttcgtggaggagcagagcatcaccatcgtgagaggcctgcaggacgtgaccgtgatggagcccgcccccgcctggttcgagtgcgagaccagcatccccagcgtgagaccccccaagtggctgctgggcaagaccgtgctgcaggccggcggcaacgtgggcctggagcaggagggcaccgtgcacagactgatgctgagaagaacctgcagcaccatgaccggccccgtgcacttcaccgtgggcaagagcagaagcagcgccagactggtggtgagcgacatccccgtggtgctgaccagacccctggagcccaagaccggcagagagctgcagagcgtggtgctgagctgcgacttcagacccgcccccaaggccgtgcagtggtacaaggacgacacccccctgagccccagcgagaagttcaagatgagcctggagggccagatggccgagctgagaatcctgagactgatgcccgccgacgccggcgtgtacagatgccaggccggcagcgcccacagcagcaccgaggtgaccgtggaggccagagaggtgaccgtgaccggccccctgcaggacgccgaggccaccgaggagggctgggccagcttcagctgcgagctgagccacgaggacgaggaggtggagtggagcctgaacggcatgcccctgtacaacgacagcttccacgagatcagccacaagggcagaagacacaccctggtgctgaagagcatccagagagccgacgccggcatcgtgagagccagcagcctgaaggtgagcaccagcgccagactggaggtgagagtgaagcccgtggtgttcctgaaggccctggacgacctgagcgccgaggagagaggcaccctggccctgcagtgcgaggtgagcgaccccgaggcccacgtggtgtggagaaaggacggcgtgcagctgggccccagcgacaagtacgacttcctgcacaccgccggcaccagaggcctggtggtgcacgacgtgagccccgaggacgccggcctgtacacctgccacgtgggcagcgaggagaccagagccagagtgagagtgcacgacctgcacgtgggcatcaccaagagactgaagaccatggaggtgctggagggcgagagctgcagcttcgagtgcgtgctgagccacgagagcgccagcgaccccgccatgtggaccgtgggcggcaagaccgtgggcagcagcagcagattccaggccaccagacagggcagaaagtacatcctggtggtgagagaggccgcccccagcgacgccggcgaggtggtgttcagcgtgagaggcctgaccagcaaggccagcctgatcgtgagagagagacccgccgccatcatcaagcccctggaggaccagtgggtggcccccggcgaggacgtggagctgagatgcgagctgagcagagccggcacccccgtgcactggctgaaggacagaaaggccatcagaaagagccagaagtacgacgtggtgtgcgagggcaccatggccatgctggtgatcagaggcgccagcctgaaggacgccggcgagtacacctgcgaggtggaggccagcaagagcaccgccagcctgcacgtggaggagaaggccaactgcttcaccgaggagctgaccaacctgcaggtggaggagaagggcaccgccgtgttcacctgcaagaccgagcaccccgccgccaccgtgacctggagaaagggcctgctggagctgagagccagcggcaagcaccagcccagccaggagggcctgaccctgagactgaccatcagcgccctggagaaggccgacagcgacacctacacctgcgacatcggccaggcccagagcagagcccagctgctggtgcagggcagaagagtgcacatcatcgaggacctggaggacgtggacgtgcaggagggcagcagcgccaccttcagatgcagaatcagccccgccaactacgagcccgtgcactggttcctggacaagacccccctgcacgccaacgagctgaacgagatcgacgcccagcccggcggctaccacgtgctgaccctgagacagctggccctgaaggacagcggcaccatctacttcgaggccggcgaccagagagccagcgccgccctgagagtgaccgagaagcccagcgtgttcagcagagagctgaccgacgccaccatcaccgagggcgaggacctgaccctggtgtgcgagaccagcacctgcgacatccccgtgtgctggaccaaggacggcaagaccctgagaggcagcgccagatgccagctgagccacgagggccacagagcccagctgctgatcaccggcgccaccctgcaggacagcggcagatacaagtgcgaggccggcggcgcctgcagcagcagcatcgtgagagtgcacgccagacccgtgagattccaggaggccctgaaggacctggaggtgctggagggcggcgccgccaccctgagatgcgtgctgagcagcgtggccgcccccgtgaagtggtgctacggcaacaacgtgctgagacccggcgacaagtacagcctgagacaggagggcgccatgctggagctggtggtgagaaacctgagaccccaggacagcggcagatacagctgcagcttcggcgaccagaccaccagcgccaccctgaccgtgaccgccctgcccgcccagttcatcggcaagctgagaaacaaggaggccaccgagggcgccaccgccaccctgagatgcgagctgagcaaggccgcccccgtggagtggagaaagggcagcgagaccctgagagacggcgacagatactgcctgagacaggacggcgccatgtgcgagctgcagatcagaggcctggccatggtggacgccgccgagtacagctgcgtgtgcggcgaggagagaaccagcgccagcctgaccatcagacccatgcccgcccacttcatcggcagactgagacaccaggagagcatcgagggcgccaccgccaccctgagatgcgagctgagcaaggccgcccccgtggagtggagaaagggcagagagagcctgagagacggcgacagacacagcctgagacaggacggcgccgtgtgcgagctgcagatctgcggcctggccgtggccgacgccggcgagtacagctgcgtgtgcggcgaggagagaaccagcgccaccctgaccgtgaaggccctgcccgccaagttcaccgagggcctgagaaacgaggaggccgtggagggcgccaccgccatgctgtggtgcgagctgagcaaggtggcccccgtggagtggagaaagggccccgagaacctgagagacggcgacagatacatcctgagacaggagggcaccagatgcgagctgcagatctgcggcctggccatggccgacgccggcgagtacctgtgcgtgtgcggccaggagagaaccagcgccaccctgaccatcagagccctgcccgccagattcatcgaggacgtgaagaaccaggaggccagagagggcgccaccgccgtgctgcagtgcgagctgaacagcgccgcccccgtggagtggagaaagggcagcgagaccctgagagacggcgacagatacagcctgagacaggacggcaccaagtgcgagctgcagatcagaggcctggccatggccgacaccggcgagtacagctgcgtgtgcggccaggagagaaccagcgccatgctgaccgtgagagccctgcccatcaagttcaccgagggcctgagaaacgaggaggccaccgagggcgccaccgccgtgctgagatgcgagctgagcaagatggcccccgtggagtggtggaagggccacgagaccctgagagacggcgacagacacagcctgagacaggacggcgccagatgcgagctgcagatcagaggcctggtggccgaggacgccggcgagtacctgtgcatgtgcggcaaggagagaaccagcgccatgctgaccgtgagagccatgcccagcaagttcatcgagggcctgagaaacgaggaggccaccgagggcgacaccgccaccctgtggtgcgagctgagcaaggccgcccccgtggagtggagaaagggccacgagaccctgagagacggcgacagacacagcctgagacaggacggcagcagatgcgagctgcagatcagaggcctggccgtggtggacgccggcgagtacagctgcgtgtgcggccaggagagaaccagcgccaccctgaccgtgagagccctgcccgccagattcatcgaggacgtgaagaaccaggaggccagagagggcgccaccgccgtgctgcagtgcgagctgagcaaggccgcccccgtggagtggagaaagggcagcgagaccctgagaggcggcgacagatacagcctgagacaggacggcaccagatgcgagctgcagatccacggcctgagcgtggccgacaccggcgagtacagctgcgtgtgcggccaggagagaaccagcgccaccctgaccgtgagagccccccagcccgtgttcagagagcccctgcagagcctgcaggccgaggagggcagcaccgccaccctgcagtgcgagctgagcgagcccaccgccaccgtggtgtggagcaagggcggcctgcagctgcaggccaacggcagaagagagcccagactgcagggctgcaccgccgagctggtgctgcaggacctgcagagagaggacaccggcgagtacacctgcacctgcggcagccaggccaccagcgccaccctgaccgtgaccgccgcccccgtgagattcctgagagagctgcagcaccaggaggtggacgagggcggcaccgcccacctgtgctgcgagctgagcagagccggcgccagcgtggagtggagaaagggcagcctgcagctgttcccctgcgccaagtaccagatggtgcaggacggcgccgccgccgagctgctggtgagaggcgtggagcaggaggacgccggcgactacacctgcgacaccggccacacccagagcatggccagcctgagcgtgagagtgcccagacccaagttcaagaccagactgcagagcctggagcaggagaccggcgacatcgccagactgtgctgccagctgagcgacgccgagagcggcgccgtggtgcagtggctgaaggagggcgtggagctgcacgccggccccaagtacgagatgagaagccagggcgccaccagagagctgctgatccaccagctggaggccaaggacaccggcgagtacgcctgcgtgaccggcggccagaagaccgccgccagcctgagagtgaccgagcccgaggtgaccatcgtgagaggcctggtggacgccgaggtgaccgccgacgaggacgtggagttcagctgcgaggtgagcagagccggcgccaccggcgtgcagtggtgcctgcagggcctgcccctgcagagcaacgaggtgaccgaggtggccgtgagagacggcagaatccacaccctgagactgaagggcgtgacccccgaggacgccggcaccgtgagcttccacctgggcaaccacgccagcagcgcccagctgaccgtgagagcccccgaggtgaccatcctggagcccctgcaggacgtgcagctgagcgagggccaggacgccagcttccagtgcagactgagcagagccagcggccaggaggccagatgggccctgggcggcgtgcccctgcaggccaacgagatgaacgacatcaccgtggagcagggcaccctgcacctgctgaccctgcacaaggtgaccctggaggacgccggcaccgtgagcttccacgtgggcacctgcagcagcgaggcccagctgaaggtgaccgccaagaacaccgtggtgagaggcctggagaacgtggaggccctggagggcggcgaggccctgttcgagtgccagctgagccagcccgaggtggccgcccacacctggctgctggacgacgagcccgtgcacaccagcgagaacgccgaggtggtgttcttcgagaacggcctgagacacctgctgctgctgaagaacctgagaccccaggacagctgcagagtgaccttcctggccggcgacatggtgaccagcgccttcctgaccgtgagaggctggagactggagatcctggagcccctgaagaacgccgccgtgagagccggcgcccaggcctgcttcacctgcaccctgagcgaggccgtgcccgtgggcgaggccagctggtacatcaacggcgccgccgtgcagcccgacgacagcgactggaccgtgaccgccgacggcagccaccacgccctgctgctgagaagcgcccagccccaccacgccggcgaggtgaccttcgcctgcagagacgccgtggccagcgccagactgaccgtgctgggcctgcccgacccccccgaggacgccgaggtggtggccagaagcagccacaccgtgaccctgagctgggccgcccccatgagcgacggcggcggcggcctgtgcggctacagagtggaggtgaaggagggcgccaccggccagtggagactgtgccacgagctggtgcccggccccgagtgcgtggtggacggcctggcccccggcgagacctacagattcagagtggccgccgtgggccccgtgggcgccggcgagcccgtgcacctgccccagaccgtgagactggccgagccccccaagcccgtgcccccccagcccagcgcccccgagagcagacaggtggccgccggcgaggacgtgagcctggagctggaggtggtggccgaggccggcgaggtgatctggcacaagggcatggagagaatccagcccggcggcagattcgaggtggtgagccagggcagacagcagatgctggtgatcaagggcttcaccgccgaggaccagggcgagtaccactgcggcctggcccagggcagcatctgccccgccgccgccaccttccaggtggccctgagccccgccagcgtggacgaggccccccagcccagcctgccccccgaggccgcccaggagggcgacctgcacctgctgtgggaggccctggccagaaagagaagaatgagcagagagcccaccctggacagcatcagcgagctgcccgaggaggacggcagaagccagagactgccccaggaggccgaggaggtggcccccgacctgagcgagggctacagcaccgccgacgagctggccagaaccggcgacgccgacctgagccacaccagcagcgacgacgagagcagagccggcacccccagcctggtgacctacctgaagaaggccggcagacccggcaccagccccctggccagcaaggtgggcgcccccgccgcccccagcgtgaagccccagcagcagcaggagcccctggccgccgtgagaccccccctgggcgacctgagcaccaaggacctgggcgaccccagcatggacaaggccgccgtgaagatccaggccgccttcaagggctacaaggtgagaaaggagatgaagcagcaggagggccccatgttcagccacaccttcggcgacaccgaggcccaggtgggcgacgccctgagactggagtgcgtggtggccagcaaggccgacgtgagagccagatggctgaaggacggcgtggagctgaccgacggcagacaccaccacatcgaccagctgggcgacggcacctgcagcctgctgatcaccggcctggacagagccgacgccggctgctacacctgccaggtgagcaacaagttcggccaggtgacccacagcgcctgcgtggtggtgagcggcagcgagagcgaggccgagagcagcagcggcggcgagctggacgacgccttcagaagagccgccagaagactgcacagactgttcagaaccaagagccccgccgaggtgagcgacgaggagctgttcctgagcgccgacgagggccccgccgagcccgaggagcccgccgactggcagacctacagagaggacgagcacttcatctgcatcagattcgaggccctgaccgaggccagacaggccgtgaccagattccaggagatgttcgccaccctgggcatcggcgtggagatcaagctggtggagcagggccccagaagagtggagatgtgcatcagcaaggagacccccgcccccgtggtgccccccgagcccctgcccagcctgctgaccagcgacgccgcccccgtgttcctgaccgagctgcagaaccaggaggtgcaggacggctaccccgtgagcttcgactgcgtggtgaccggccagcccatgcccagcgtgagatggttcaaggacggcaagctgctggaggaggacgaccactacatgatcaacgaggaccagcagggcggccaccagctgatcatcaccgccgtggtgcccgccgacatgggcgtgtacagatgcctggccgagaacagcatgggcgtgagcagcaccaaggccgagctgagagtggacctgaccagcaccgactacgacaccgccgccgacgccaccgagagcagcagctacttcagcgcccagggctacctgagcagcagagagcaggagggcaccgagagcaccaccgacgagggccagctgccccaggtggtggaggagctgagagacctgcaggtggcccccggcaccagactggccaagttccagctgaaggtgaagggctaccccgcccccagactgtactggttcaaggacggccagcccctgaccgccagcgcccacatcagaatgaccgacaagaagatcctgcacaccctggagatcatcagcgtgaccagagaggacagcggccagtacgccgcctacatcagcaacgccatgggcgccgcctacagcagcgccagactgctggtgagaggccccgacgagcccgaggagaagcccgccagcgacgtgcacgagcagctggtgccccccagaatgctggagagattcacccccaagaaggtgaagaagggcagcagcatcaccttcagcgtgaaggtggagggcagacccgtgcccaccgtgcactggctgagagaggaggccgagagaggcgtgctgtggatcggccccgacacccccggctacaccgtggccagcagcgcccagcagcacagcctggtgctgctggacgtgggcagacagcaccagggcacctacacctgcatcgccagcaacgccgccggccaggccctgtgcagcgccagcctgcacgtgagcggcctgcccaaggtggaggagcaggagaaggtgaaggaggccctgatcagcaccttcctgcagggcaccacccaggccatcagcgcccagggcctggagaccgccagcttcgccgacctgggcggccagagaaaggaggagcccctggccgccaaggaggccctgggccacctgagcctggccgaggtgggcaccgaggagttcctgcagaagctgaccagccagatcaccgagatggtgagcgccaagatcacccaggccaagctgcaggtgcccggcggcgacagcgacgaggacagcaagacccccagcgccagccccagacacggcagaagcagacccagcagcagcatccaggagagcagcagcgagagcgaggacggcgacgccagaggcgagatcttcgacatctacgtggtgaccgccgactacctgcccctgggcgccgagcaggacgccatcaccctgagagagggccagtacgtggaggtgctggacgccgcccaccccctgagatggctggtgagaaccaagcccaccaagagcagccccagcagacagggctgggtgagccccgcctacctggacagaagactgaagctgagccccgagtggggcgccgccgaggcccccgagttccccggcgaggccgtgagcgaggacgagtacaaggccagactgagcagcgtgatccaggagctgctgagcagcgagcaggccttcgtggaggagctgcagttcctgcagagccaccacctgcagcacctggagagatgcccccacgtgcccatcgccgtggccggccagaaggccgtgatcttcagaaacgtgagagacatcggcagattccacagcagcttcctgcaggagctgcagcagtgcgacaccgacgacgacgtggccatgtgcttcatcaagaaccaggccgccttcgagcagtacctggagttcctggtgggcagagtgcaggccgagagcgtggtggtgagcaccgccatccaggagttctacaagaagtacgccgaggaggccctgctggccggcgaccccagccagcccccccccccccccctgcagcactacctggagcagcccgtggagagagtgcagagataccaggccctgctgaaggagctgatcagaaacaaggccagaaacagacagaactgcgccctgctggagcaggcctacgccgtggtgagcgccctgccccagagagccgagaacaagctgcacgtgagcctgatggagaactaccccggcaccctgcaggccctgggcgagcccatcagacagggccacttcatcgtgtgggagggcgcccccggcgccagaatgccctggaagggccacaacagacacgtgttcctgttcagaaaccacctggtgatctgcaagcccagaagagacagcagaaccgacaccgtgagctacgtgttcagaaacatgatgaagctgagcagcatcgacctgaacgaccaggtggagggcgacgacagagccttcgaggtgtggcaggagagagaggacagcgtgagaaagtacctgctgcaggccagaaccgccatcatcaagagcagctgggtgaaggagatctgcggcatccagcagagactggccctgcccgtgtggagaccccccgacttcgaggaggagctggccgactgcaccgccgagctgggcgagaccgtgaagctggcctgcagagtgaccggcacccccaagcccgtgatcagctggtacaaggacggcaaggccgtgcaggtggacccccaccacatcctgatcgaggaccccgacggcagctgcgccctgatcctggacagcctgaccggcgtggacagcggccagtacatgtgcttcgccgccagcgccgccggcaactgcagcaccctgggcaagatcctggtgcaggtgccccccagattcgtgaacaaggtgagagccagccccttcgtggagggcgaggacgcccagttcacctgcaccatcgagggcgccccctacccccagatcagatggtacaaggacggcgccctgctgaccaccggcaacaagttccagaccctgagcgagcccagaagcggcctgctggtgctggtgatcagagccgccagcaaggaggacctgggcctgtacgagtgcgagctggtgaacagactgggcagcgccagagccagcgccgagctgagaatccagagccccatgctgcaggcccaggagcagtgccacagagagcagctggtggccgccgtggaggacaccaccctggagagagccgaccaggaggtgaccagcgtgctgaagagactgctgggccccaaggcccccggccccagcaccggcgacctgaccggccccggcccctgccccagaggcgcccccgccctgcaggagaccggcagccagccccccgtgaccggcaccagcgaggcccccgccgtgccccccagagtgccccagcccctgctgcacgagggccccgagcaggagcccgaggccatcgccagagcccaggagtggaccgtgcccatcagaatggagggcgccgcctggcccggcgccggcaccggcgagctgctgtgggacgtgcacagccacgtggtgagagagaccacccagagaacctacacctaccaggccatcgacacccacaccgccagaccccccagcatgcaggtgaccatcgaggacgtgcaggcccagaccggcggcaccgcccagttcgaggccatcatcgagggcgacccccagcccagcgtgacctggtacaaggacagcgtgcagctggtggacagcaccagactgagccagcagcaggagggcaccacctacagcctggtgctgagacacgtggccagcaaggacgccggcgtgtacacctgcctggcccagaacaccggcggccaggtgctgtgcaaggccgagctgctggtgctgggcggcgacaacgagcccgacagcgagaagcagagccacagaagaaagctgcacagcttctacgaggtgaaggaggagatcggcagaggcgtgttcggcttcgtgaagagagtgcagcacaagggcaacaagatcctgtgcgccgccaagttcatccccctgagaagcagaaccagagcccaggcctacagagagagagacatcctggccgccctgagccaccccctggtgaccggcctgctggaccagttcgagaccagaaagaccctgatcctgatcctggagctgtgcagcagcgaggagctgctggacagactgtacagaaagggcgtggtgaccgaggccgaggtgaaggtgtacatccagcagctggtggagggcctgcactacctgcacagccacggcgtgctgcacctggacatcaagcccagcaacatcctgatggtgcaccccgccagagaggacatcaagatctgcgacttcggcttcgcccagaacatcacccccgccgagctgcagttcagccagtacggcagccccgagttcgtgagccccgagatcatccagcagaaccccgtgagcgaggccagcgacatctgggccatgggcgtgatcagctacctgagcctgacctgcagcagccccttcgccggcgagagcgacagagccaccctgctgaacgtgctggagggcagagtgagctggagcagccccatggccgcccacctgagcgaggacgccaaggacttcatcaaggccaccctgcagagagccccccaggccagacccagcgccgcccagtgcctgagccacccctggttcctgaagagcatgcccgccgaggaggcccacttcatcaacaccaagcagctgaagttcctgctggccagaagcagatggcagagaagcctgatgagctacaagagcatcctggtgatgagaagcatccccgagctgctgagaggcccccccgacagccccagcctgggcgtggccagacacctgtgcagagacaccggcggcagcagcagcagcagcagcagcagcgacaacgagctggcccccttcgccagagccaagagcctgccccccagccccgtgacccacagccccctgctgcaccccagaggcttcctgagacccagcgccagcctgcccgaggaggccgaggccagcgagagaagcaccgaggcccccgccccccccgccagccccgagggcgccggcccccccgccgcccagggctgcgtgcccagacacagcgtgatcagaagcctgttctaccaccaggccggcgagagccccgagcacggcgccctggcccccggcagcagaagacaccccgccagaagaagacacctgctgaagggcggctacatcgccggcgccctgcccggcctgagagagcccctgatggagcacagagtgctggaggaggaggccgccagagaggagcaggccaccctgctggccaaggcccccagcttcgagaccgccctgagactgcccgccagcggcacccacctggcccccggccacagccacagcctggagcacgacagccccagcacccccagacccagcagcgaggcctgcggcgaggcccagagactgcccagcgcccccagcggcggcgcccccatcagagacatgggccacccccagggcagcaagcagctgcccagcaccggcggccaccccggcaccgcccagcccgagagacccagccccgacagcccctggggccagcccgcccccttctgccaccccaagcagggcagcgccccccaggagggctgcagcccccaccccgccgtggccccctgcccccccggcagcttcccccccggcagctgcaaggaggcccccctggtgcccagcagccccttcctgggccagccccaggccccccccgcccccgccaaggccagcccccccctggacagcaagatgggccccggcgacatcagcctgcccggcagacccaagcccggcccctgcagcagccccggcagcgccagccaggccagcagcagccaggtgagcagcctgagagtgggcagcagccaggtgggcaccgagcccggccccagcctggacgccgagggctggacccaggaggccgaggacctgagcgacagcacccccaccctgcagagaccccaggagcaggccaccatgagaaagttcagcctgggcggcagaggcggctacgccggcgtggccggctacggcaccttcgccttcggcggcgacgccggcggcatgctgggccagggccccatgtgggccagaatcgcctgggccgtgagccagagcgaggaggaggagcaggaggaggccagagccgagagccagagcgaggagcagcaggaggccagagccgagagccccctgccccaggtgagcgccagacccgtgcccgaggtgggcagagcccccaccagaagcagccccgagcccaccccctgggaggacatcggccaggtgagcctggtgcagatcagagacctgagcggcgacgccgaggccgccgacaccatcagcctggacatcagcgaggtggaccccgcctacctgaacctgagcgacctgtacgacatcaagtacctgcccttcgagttcatgatcttcagaaaggtgcccaagagcgcccagcccgagccccccagccccatggccgaggaggagctggccgagttccccgagcccacctggccctggcccggcgagctgggcccccacgccggcctggagatcaccgaggagagcgaggacgtggacgccctgctggccgaggccgccgtgggcagaaagagaaagtggagcagccccagcagaagcctgttccacttccccggcagacacctgcccctggacgagcccgccgagctgggcctgagagagagagtgaaggccagcgtggagcacatcagcagaatcctgaagggcagacccgagggcctggagaaggagggcccccccagaaagaagcccggcctggccagcttcagactgagcggcctgaagagctgggacagagcccccaccttcctgagagagctgagcgacgagaccgtggtgctgggccagagcgtgaccctggcctgccaggtgagcgcccagcccgccgcccaggccacctggagcaaggacggcgcccccctggagagcagcagcagagtgctgatcagcgccaccctgaagaacttccagctgctgaccatcctggtggtggtggccgaggacctgggcgtgtacacctgcagcgtgagcaacgccctgggcaccgtgaccaccaccggcgtgctgagaaaggccgagagacccagcagcagcccctgccccgacatcggcgaggtgtacgccgacggcgtgctgctggtgtggaagcccgtggagagctacggccccgtgacctacatcgtgcagtgcagcctggagggcggcagctggaccaccctggccagcgacatcttcgactgctgctacctgaccagcaagctgagcagaggcggcacctacaccttcagaaccgcctgcgtgagcaaggccggcatgggcccctacagcagccccagcgagcaggtgctgctgggcggccccagccacctggccagcgaggaggagagccagggcagaagcgcccagcccctgcccagcaccaagaccttcgccttccagacccagatccagagaggcagattcagcgtggtgagacagtgctgggagaaggccagcggcagagccctggccgccaagatcatcccctaccaccccaaggacaagaccgccgtgctgagagagtacgaggccctgaagggcctgagacacccccacctggcccagctgcacgccgcctacctgagccccagacacctggtgctgatcctggagctgtgcagcggccccgagctgctgccctgcctggccgagagagccagctacagcgagagcgaggtgaaggactacctgtggcagatgctgagcgccacccagtacctgcacaaccagcacatcctgcacctggacctgagaagcgagaacatgatcatcaccgagtacaacctgctgaaggtggtggacctgggcaacgcccagagcctgagccaggagaaggtgctgcccagcgacaagttcaaggactacctggagaccatggcccccgagctgctggagggccagggcgccgtgccccagaccgacatctgggccatcggcgtgaccgccttcatcatgctgagcgccgagtaccccgtgagcagcgagggcgccagagacctgcagagaggcctgagaaagggcctggtgagactgagcagatgctacgccggcctgagcggcggcgccgtggccttcctgagaagcaccctgtgcgcccagccctggggcagaccctgcgccagcagctgcctgcagtgcccctggctgaccgaggagggccccgcctgcagcagacccgcccccgtgaccttccccaccgccagactgagagtgttcgtgagaaacagagagaagagaagagccctgctgtacaagagacacaacctggcccaggtgagatag

SEQ ID NO: 39326 - DNA, 23907 bp, Artificial Sequence
  derived and/or modified sequence
atggatcagccacagttctccggcgccccaagatttctcacccgtcccaaggcattcgtggtttccgtcggcaaagacgcaacactgagctgtcagatcgtaggcaacccaactcctcaggtatcatgggagaaagaccagcagcccgtcgccgccggggcaagattccggctggcccaggacggggacctgtatcgacttacgattttggacctggcgctgggagatagtggccagtacgtatgtcgggcccgcaacgctataggggaagcatttgcggccgtgggcctacaggtggatgcggaagctgcttgcgcagaacaagcccctcacttccttcttcgtccgacgtccatcagagtgcgcgagggcagtgaagctacatttagatgtcgcgtaggggggtccccccgccccgccgtctcctggtctaaggacggtagaagactgggagagccggacggcccaagagtccgggtggaagagttgggggaggcgagtgcactgcgcataagggccgcccgaccaagggacggggggacgtacgaagttcgggcagagaaccccctgggagccgcgtcagcggccgcagcactggtagtggatagtgatgcagccgacacagcatccaggccgggcacctccacggctgccttactggcacatcttcagaggaggcgtgaagcaatgcgggctgagggggcccctgcatctcctccaagtacgggcacgaggacctgcaccgtgactgagggtaaacatgcaagactttcttgttacgtgaccggggaaccaaagccagagacggtttggaaaaaagatggacaactggttaccgaggggcgacgccatgtcgtgtatgaggatgcccaggaaaacttcgtgttaaaaatcctgttctgcaagcaatctgaccgaggattatacacgtgtactgccagcaacttggtgggacagacatattcctccgtcctcgtcgttgtccgagaacccgccgtgcctttcaaaaaacgtctgcaggatttggaggtccgggagaaggaatcagctactttcctgtgcgaggtgccacagccttccacagaggccgcgtggtttaaagaggaaacccgactgtgggcaagcgccaagtatggtatcgaggaggagggaaccgagaggagactgaccgtccgaaatgtcagcgcagatgacgatgccgtctatatttgcgagaccccagagggcagccgaacagttgcagaactggctgttcaggggaatctcctccggaaactaccccgaaaaacagctgtacgagtgggagacaccgccatgttttgcgtcgaactcgcggtgccagtgggtcctgtacactggttaagaaatcaggaagaagttgtcgcagggggtcgcgtcgctatttccgccgagggcactcgtcacaccctgacaatctctcaatgttgtttggaagacgtaggacaggtggccttcatggctggcgactgccaaacctctacccaattctgcgtttcagcccctcgcaaaccacctctgcaaccacccgttgacccagttgtcaaagcacgtatggaatcatctgtgatcctctcctggtccccccccccacacggagaaagacctgtgaccatcgacggctacctcgtcgaaaagaaaaagttgggcacttacacatggatcagatgtcacgaagcagaatgggtagcaacgcccgaactgaccgtggcggatgtggccgaagagggcaacttccagtttcgagtgtctgccttgaatagctttgggcagtctccttatctcgagttccctggcacagtgcacctggccccaaagttggctgtaagaacacccttgaaagcagttcaagcggtcgagggcggagaggttacattcagtgtggacctcacggtggcttctgccggcgagtggtttcttgatggacaagccctcaaggcctcctccgtgtacgagatccactgcgaccgcaccagacatacacttaccatccgtgaggtacctgccagcctgcatggggcccagctgaagttcgtagccaacggcatcgagtcatctattcgcatggaggtgagggcagcccccggcctaacagcaaataagccaccggccgccgccgccagagaggtgctggcccgtctgcacgaggaagcccagctgttagccgagcttagcgatcaggctgctgctgttacatggctgaaagatgggcggacactgtctcccggcccgaagtacgaggtgcaggcaagcgcggggagacgcgtgctgcttgtccgggacgtggcccgcgacgacgcagggctatacgagtgcgtgtctcgaggaggaaggatcgcataccaactctccgtgcagggattagctcgctttctgcataaggacatggccggatcctgcgtggatgcagtcgccggcgggccagcgcaattcgagtgtgaaacaagtgaggcacacgttcatgtgcactggtacaaagatggtatggagcttggacactccggggagaggtttctacaggaagatgtgggtacgaggcaccgactggtggccgctacagtgacaagacaggatgaaggcacgtatagctgcagagtgggagaggacagcgtcgacttccgcttgagagtgtcggaacccaaagtcgtttttgctaaagagcagcttgcccgtcgaaaattacaagctgaagccggtgcctccgcaactctgagctgtgaagttgcacaggcacaaaccgaagtgacctggtataaagacggcaaaaagctgtcctcatccagcaaggtgtgtatggaggcaacagggtgtacccggcgcttagtggtgcagcaggccggacaggctgatgctggcgaatactcttgcgaagcgggagggcagcggctctcttttcaccttgacgtcaaagaacctaaagtcgtttttgcgaaggatcaggtggcacattccgaggttcaggccgaagcgggggcgagcgccactctctcatgtgaggtggcccaggcccagacggaggtcatgtggtacaaggatgggaagaagctgtcaagtagtcttaaagttcacgttgaagccaagggctgtagaagaagactggtcgtccagcaggccggtaaaacagacgccggcgactattcttgcgaggctcggggacaaagagtgtcttttcgtctgcacattaccgagcccaaaatgatgttcgccaaggagcagtccgtgcacaacgaagtgcaagccgaggctggcgcgagcgctatgctttcatgcgaagtggcccaggcccagaccgaggtcacgtggtacaaggacgggaagaaattgtcttctagttccaaggttgggatggaggtgaaaggctgtacacgtcggctcgtgttgccacaggcaggcaaagctgatgctggggaatattcctgcgaagcaggggggcagagggttagcttccatctgcatattactgaacccaaaggagttttcgccaaggagcagagcgttcataacgaggtccaggccgaagccgggaccactgccatgctcagttgtgaagtggcacagcctcagaccgaggtgacttggtacaaagacgggaaaaagctgagtagctcgtctaaagtgagaatggaagtcaagggctgtactagacgactggttgtgcagcaggtcggcaaagccgacgcgggtgagtactcctgcgaggccggcgggcagagggtgagcttccagttacatataactgagccaaaggctgtgttcgcgaaggaacagctggtgcataacgaggttcggactgaagcaggcgctagcgcgacattgtcctgtgaggtggctcaggcccagaccgaagtgacttggtacaaggatggaaaaaaactatcatcgtcctccaaggtgcgtatcgaagcggcagggtgtatgcggcaactggtcgttcagcaggcagggcaggccgacgccggagaatacacgtgtgaggccgggggccagcgtctgtcatttcacttagacgtcagcgagccaaaagcagtgtttgccaaggagcagcttgcccacagaaaagtccaggccgaggccggggcaattgcgactctgtcttgcgaggttgcacaagcccagaccgaagtgacttggtacaaagacgggaaaaagctgagcagttccagtaaagttagaatggaggcagtgggatgcacccgacgcctagtcgtgcagcaggcatgtcaggccgacacaggagaatacagctgcgaggcaggcggccaaaggctctcgttcagcctcgacgtcgccgagcccaaggtggtgtttgcgaaggagcagcctgtgcatagagaagttcaggcccaggctggcgcctccactacactgagctgcgaagtagcacaggcccaaacagaagtgatgtggtataaggacggcaaaaagcttagtttttctagtaaggtgcggatggaggccgtgggttgtacaaggagactggtagtccaacaagcaggacaggctgtggccggggagtattcgtgcgaagccggctcacagaggctgagctttcatctccacgtggcagagcccaaggctgtattcgccaaggagcaaccagcgagtagagaagtgcaggccgaggccgggacgagcgctaccctatcttgtgaggtcgctcaagctcagactgaagtaacttggtacaaagatggaaagaagctatcctcgtctagcaaggtgcggatggaagctgtgggctgtacccgtcgcctagtcgtgcaggaggcaggacaagcagatgcgggcgagtactcttgcaaggctggcgaccagagactgtcattccacttacacgtggcagagccaaaggtggtcttcgcgaaggaacagcctgcccatcgcgaggtccaggccgaggctggcgcctcggctacactgagctgtgaggttgcgcaggcccagactgaagttacctggtacaaggacggcaagaaattgtcttcctcctccaaagtcagggtggaggcagttggctgtacccggagactcgttgtccagcaggcggggcaggctgaagctggggagtacagctgcgaggctggcggccagcagctgagttttagactgcaggtcgcagagttagaacctcagatctccgaacgcccctgtcggagggaaccactcgtggtgaaggaacatgaggatatcattctcactgcaacattagctaccccgtccgcagcgacagttacttggttaaaggacggggtggaaatccgaaggagcaagcgccatgagactgcctcccagggagatactcataccttaaccgtgcatggtgcccaagtgctagacagcgccatatatagctgccgcgttggagcagaaggccaggacttcccggtgcaggtggaggaagtcgcggcaaaattctgtaggttgcttgaacctgtgtgcggggaattaggaggcactgtaacccttgcctgtgagctcagcccagcctgtgccgaggtcgtttggcggtgtggtaatacccaacttagagtgggaaaacggttccagatggtcgccgagggacctgtacggtcgttgaccgtgctagggctgagagcggaagatgcaggggagtacgtgtgtgagagcagagacgatcacacaagcgctcagctgacggtctctgtgccacgggtggtgaaattcatgtcaggactgtccactgtggtcgcagaggaagggggtgaggcaacattccaatgtgtggtctctccgtcagatgtggctgtcgtttggtttagggacggggctctactccagccttctgagaagttcgcaatctcacagtctggagcgtcccatagcctgactatttcggacttagtcctggaggacgcagggcagattactgttgaagctgagggtgctagctcttctgccgccttaagggtaagagaggctccggtgctgttcaagaagaaactagaacctcagacggtggaagaaagatcaagtgtgaccctggaagtagagttaacccgcccatggcccgaactaagatggacccggaatgcgaccgccctggcccccgggaagaatgttgagattcacgctgaaggtgcacgccacaggctggtgttgcacaatgtgggattcgctgacagggggttttttggttgcgagacacccgacgacaagacccaggcaaagctgacagtggagatgaggcaggtgcggctggtcagagggctgcaagcagtcgaagccagagagcagggaacggccaccatggaagttcagttgtcgcatgcagatgtcgacggttcctggaccagagacggtctgcggtttcaacaggggcctacgtgtcatctagccgtgcgaggccctatgcatacactcaccctgagtgggctcaggcctgaggacagcggccttatggtatttaaagccgaaggcgtccacacttccgcgaggctggtggtaaccgagctgcctgtgagttttagccgcccccttcaggacgtggtcacgacagagaaggaaaaggtgaccttagagtgcgagctcagccggcctaatgttgacgtaaggtggctgaaagacggtgttgaactgagagccggaaaaactatggcaattgccgcacagggggcttgtagaagtttaaccatttacaggtgtgagttcgccgatcagggagtctatgtctgcgatgctcacgatgcccaatccagcgcctctgtgaaagtgcagggcagaacctacacgctaatttacaggagggtattggccgaggatgccggcgagatccagttcgttgcagagaacgcagagtctcgggcgcagctgagggtcaaggaactccccgtgaccctggttcggccactgagggataagatagcaatggagaagcatagaggggtcttggagtgtcaggtctctcgagcaagtgctcaagtgcgttggttcaaaggttctcaggaactgcaaccagggcctaagtatgaattagtaagcgatggactgtatcggaaactgattatatccgacgttcacgccgaagatgaggatacatacacctgcgatgctggcgacgtaaaaacttccgcgcagttctttgtggaggaacaatccatcacaatagtcaggggcttgcaggatgtcacggtgatggaaccagcacctgcgtggtttgagtgcgaaacctcaatccctagcgtaagaccccctaaatggctgttgggcaaaaccgttctccaggccgggggtaatgttggtcttgagcaggaaggcacggtacatcggctaatgcttaggagaacttgttccacaatgactggccctgtgcacttcactgtggggaagtctcggtcatccgccagactggtggttagcgacatcccggtcgtgctgacacgcccactggaacccaaaactggcagagagttacagtccgttgtgctgtcatgtgactttaggcctgccccaaaagccgtgcagtggtacaaggatgacaccccactatctccttccgagaaatttaagatgtctctcgaagggcagatggccgagctgcggatccttagactcatgcctgcagatgccggggtttataggtgtcaagccggctcagcccatagctcaacagaggtcaccgtagaagccagagaagtgaccgttacaggtccactgcaggacgccgaagccacagaagagggctgggcgtcattttcctgcgagcttagccacgaggacgaggaggtggaatggtctctcaatggtatgcccctgtataacgattctttccacgaaatttctcacaaaggccgcaggcacacattagtgctgaaaagcatacaacgggccgacgctggcattgtccgtgcaagctcgcttaaggtctccactagcgcgcgccttgaggttagagtcaagcctgttgtttttctaaaggcccttgatgacctctccgccgaggaacgaggaacactggccttacaatgtgaggtgagcgatcctgaagcgcacgttgtttggaggaaggatggagtgcagctaggtcctagcgacaagtacgacttcctccacacagccggaacccgcggactggtggttcacgacgtgtctcccgaggacgccgggctgtatacttgccacgtcggcagcgaggagacacgggcaagagtgcgcgtccacgacctacacgttggaataaccaagcgcctgaaaaccatggaagttctggagggggagtcctgcagctttgagtgcgtcctgtcacacgagagcgcgtcagatcctgcgatgtggacggtcggagggaagactgtcggaagctcatccaggtttcaggctacccggcaaggaagaaagtatatcctggtcgtgcgagaggccgcaccgtctgacgctggggaagttgtgtttagtgttcgggggctgaccagcaaggcaagcctgattgtgcgggaaaggcctgcagcgatcatcaaacccctggaggatcagtgggtggcacctggggaggatgtggaactgcgatgtgaactgtcacgggccggaaccccggtccattggctaaaagatagaaaagccatccgcaagtcacaaaagtacgatgtggtttgcgagggcacaatggccatgctggtcattaggggagcttcactgaaagatgccggcgagtatacatgcgaagttgaagcctctaaatctactgcatctctgcatgtggaggagaaggctaactgcttcacagaggagcttaccaatctccaggttgaggagaaggggactgccgtcttcacctgtaaaaccgagcatcccgcggctaccgtgacgtggagaaagggtctattggagctccgagccagcggtaaacatcaacccagccaagagggtttaaccctgagattaaccatctccgccctggaaaaagcagatagtgacacatacacctgcgacattgggcaggctcagtcacgcgcccagttgctggtgcaggggagacgtgtgcatattatcgaagacctcgaagacgtggatgttcaagaaggaagcagcgccacctttagatgccgtatttcacccgcaaactacgagccggtgcattggtttctcgataaaacccctctccatgccaacgagctgaacgaaatcgacgcccagcctggaggctaccacgttctgactttaaggcagctcgctctcaaggattccggcaccatttattttgaggcaggcgaccaacgggctagtgcagcacttagagtgacagaaaaaccatcagtgttttctagggagcttacagatgctacaataacagagggtgaagatctaactctagtctgcgaaacgagtacatgtgacatccccgtctgctggacgaaggacggcaagacacttcgggggtctgccagatgccagttgagccacgaaggacaccgcgctcagctgctgatcacaggagccactcttcaggatagtggacgctataaatgtgaggctggcggtgcttgctctagctcgatagtacgtgtgcatgctcgaccagtcagatttcaggaggccttgaaggatttggaggtgctcgaaggaggagccgccactttgaggtgtgtgctaagctccgttgccgcccccgtcaagtggtgttacggcaataacgttctccggcctggcgacaaatactctcttcgccaggagggtgccatgctggagctggtcgtgcggaatttgagaccccaggactctggccgctacagttgcagcttcggagatcagaccaccagtgccacactgactgtgaccgcgctgccagctcagttcattggaaagcttagaaataaggaagccactgagggggcaaccgctactctccggtgcgaactctccaaagcagccccggtcgagtggaggaaaggatcagagacactccgcgacggagatagatactgtcttcggcaggacggggccatgtgcgaactccagatccgagggcttgccatggtggatgcagcagaatacagttgcgtgtgtggcgaagaaagaacctcagcttccttgaccataagaccgatgcctgcacactttatcggtagacttaggcaccaggagtctattgagggcgctactgccactttgagatgcgagctaagcaaggccgctcccgtcgagtggcggaaaggacgcgagtctctgagagatggcgatcggcactctcttaggcaggacggagccgtctgcgagttacagatttgtggactcgcagttgctgatgcaggagaatacagttgcgtgtgtggggaggagaggacctctgccactctgactgttaaagccttgccagctaagttcacagaagggttgcgtaacgaggaggctgtggagggggccactgccatgttgtggtgtgaactttccaaggtcgccccagtagaatggcggaagggcccagagaacctgcgggacggggatcggtacattttgcggcaggaggggaccagatgcgagctgcagatctgtggcctggctatggctgatgctggggagtacctttgtgtctgcggccaagagcggacgtctgccaccctcactatccgtgccctccctgcgcgcttcattgaagatgtgaagaaccaggaggcacgagaaggcgcaacagctgtgttgcagtgcgagctcaacagcgcagcacccgtagaatggcgcaagggatccgaaaccttaagggacggagatcgctacagcttaagacaggacgggaccaaatgcgagctgcagatcaggggattagccatggctgacaccggagaatacagctgtgtgtgcgggcaggagagaacttcggcaatgcttaccgtccgcgctctcccaattaagtttacagaaggtctaagaaatgaggaggcaactgagggagcgacagctgttctgagatgcgaattatccaaaatggctccggtggaatggtggaaaggccacgaaaccctgagagacggtgacaggcattctctccggcaagacggcgcaagatgcgagctgcagataagggggctggttgctgaggacgctggtgagtacctttgcatgtgtggcaaagaaaggaccagtgccatgctgacagtcagagctatgccttcaaagttcattgaagggctcaggaatgaggaagccaccgagggggacacagccaccttatggtgcgagttaagcaaagcagccccggtggagtggaggaagggacatgaaacactcagggatggagatcggcactctctccggcaagacggctctagatgtgaactacagatcagaggacttgcggtggttgatgctggggagtacagctgcgtgtgcggtcaggaacgaacgtcagcgaccctgaccgtgagggcgcttccagccagattcatagaggacgtgaagaatcaggaagcgagggaaggggcaactgccgtcctgcaatgcgagctgagcaaggctgctcccgtcgagtggaggaaaggttctgagaccctccgcggaggcgatcggtattcacttcgccaggacggtacaaggtgcgagctgcagattcacgggctgtcagtggcagacacaggagagtacagttgcgtgtgcggacaggagcggacctctgctactctaactgtcagagccccccagcccgtcttccgggaacccctccaatctctccaagccgaggaaggtagcactgctactcttcaatgcgaactttcagagcctacggccaccgtggtatggtcaaagggcggactacaactccaggcaaatggccgccgcgaaccgagactccagggttgcacagcggaattagttctccaggacctccaaagggaggatactggcgaatacacctgcacgtgtggatcgcaggctacaagcgccaccctgaccgtgaccgccgcccctgtgaggtttctgcgggagttacagcaccaggaagtcgatgaagggggcacagctcacctctgttgtgaactgagccgggcgggggccagcgtggagtggaggaagggcagccttcagctctttccttgcgcgaaatatcaaatggttcaggatggagcagcagccgaactcctggttagaggcgttgaacaggaggatgcgggggattacacatgcgacacgggtcacacccagtcaatggcaagtttaagcgtacgcgtgccccgacccaagttcaagacccggttgcagagcttggagcaggaaaccggcgacattgctaggctgtgttgccagctctcagatgcggagtctggagctgtcgtgcagtggctaaaggagggggtagagctgcacgcaggcccaaaatacgagatgcgctcccagggcgccacacgggagctcctgatccatcagttagaggccaaggatacaggcgagtatgcttgcgtgacaggcggtcaaaagacagccgctagtctgcgagtgaccgagcctgaagtgacaatagtgagggggctggtagacgcagaagtcactgccgatgaagatgtcgaattcagctgtgaggtgtctcgggccggcgcaacaggagtacaatggtgtttgcaggggctgcccttgcagtcgaacgaggtgacagaagttgctgttagggacgggcggatccatacactgagacttaaaggcgtaacaccagaggacgccggtaccgtgtcctttcacctaggaaaccacgcctcatccgctcagctcaccgtgcgggctcccgaagtgaccatccttgagcctctgcaagatgtccagttatcagagggccaagatgcctcatttcagtgcagactctcaagggctagcggtcaggaggccaggtgggcgctgggcggcgtgccgctgcaggctaacgaaatgaacgacattacagtggaacagggtacactccacctgctgaccttgcacaaggtgaccctggaggacgcaggcacagtgagcttccacgtaggcacttgcagttccgaagcacagttaaaggttactgctaagaataccgttgtcaggggtctggagaacgtcgaggctcttgaaggaggggaagcgctgtttgaatgccagctgagccaaccggaggtggccgcccacacttggctgctcgatgatgagcccgtgcatacgtctgaaaacgcagaggtggtgttttttgaaaacggactgaggcatctgcttctcctaaagaacctgcggccacaggactcctgccgagtgacctttctagctggcgacatggttacatcagctttcctgaccgtacgcgggtggaggttagagatcctcgaaccgttgaaaaacgctgccgtgagggctggagctcaggcctgcttcacctgtactctttcggaggcagtgcctgtgggcgaagcctcttggtacattaacggggctgccgtgcagccagacgacagtgattggaccgtgacagccgatgggtcccaccatgccctgttgttaagatctgcccagcctcaccacgcaggcgaggtgaccttcgcatgtagagacgccgtggctagcgccagacttacagtcctggggctccccgatccaccagaggatgccgaggtggtggccaggagtagccacacagttaccctttcgtgggcagctcccatgagtgatggcgggggtggactctgtggttacagagtcgaggtgaaggaaggcgccacaggtcaatggcgactttgtcatgagctggtccccggccctgaatgcgtcgtggacggattagctcccggtgaaacataccggtttcgggtcgctgccgtgggacctgtgggcgctggagaaccagtgcaccttccacagaccgtgcgtttggccgagcctcctaagccggtgcccccacaaccgtccgcaccagaatccaggcaggtcgccgccggggaggacgtgtcccttgaattggaggtcgtcgctgaggccggggaggtaatttggcataaaggcatggagcgaatccagcccgggggccgattcgaagtggtatcccagggaagacagcagatgctcgtcatcaaggggttcacagccgaggatcagggggagtaccactgcggtctggcccagggaagcatttgccctgcagcggccacattccaggtcgctctttctcccgcctcagtcgatgaagccccccagccgtctctgcccccagaggccgctcaggaaggtgatttgcacctgctatgggaagctctcgcacgaaaacggaggatgagcagagagcctacactagactcaatcagtgagctgccggaggaggatggccgcagtcagcgcttacctcaggaggcagaggaagtcgcccccgacctgtccgaaggctactccaccgccgatgaactggcgagaacaggcgacgcagacttatcacatacctcttccgacgacgagtcgcgcgccggaacgccatcacttgttacctatctgaaaaaggccggaagaccggggacttctccactggcttcaaaggtgggcgccccagcagctccgtctgtaaagccacagcaacagcaagaaccacttgccgccgtccgtcctccgctgggcgacctcagcacaaaggatcttggggacccatccatggataaggccgctgtcaaaattcaggccgcgtttaaaggatataaagtgcggaaagaaatgaaacagcaggagggacccatgttcagtcataccttcggtgatactgaggctcaggtcggcgacgcactgcggttagaatgcgtagttgcttcaaaggctgatgtgcgagcacggtggcttaaggatggggtcgaactcaccgatggccgacaccatcatatagatcagctgggagatgggacttgttcactgctgatcaccgggcttgaccgtgctgacgcgggctgctatacttgccaagtgagcaacaaatttgggcaggtgacacatagcgcctgcgtagtggtttctggcagcgaaagtgaagcagagagcagtagcggaggcgagcttgatgatgccttcaggcgtgcggccagacggctgcaccgcctcttcaggaccaaatctccagctgaagtgtccgacgaggagctgtttttgtccgcagatgagggtcctgccgagcctgaggagccggctgattggcaaacctatcgagaagatgagcacttcatctgtatcagatttgaggcccttacggaggcgagacaggcagtgacacgcttccaggagatgtttgctaccctcggtattggtgtggagatcaagctggtggaacagggccctcgaagggtggagatgtgtatctcaaaagaaactccagctcccgttgtccccccagaacccttgccttcattgttgaccagcgatgccgcccctgtgttcttgacggagctgcagaaccaagaggttcaggatggctacccagtcagcttcgattgcgtggtgactggccagcctatgccaagtgtgaggtggtttaaggacggcaagcttctggaagaagacgatcattatatgattaatgaagaccaacaaggcggtcaccagttgattatcacagctgttgtgccagcagacatgggggtatataggtgcctggccgagaacagcatgggggtgagctcaaccaaggctgagcttcgtgtagacttaacaagtaccgactacgatacagctgcagatgctactgaaagtagcagttatttcagcgcacaagggtacctctcatctagggaacaggaagggaccgaatctaccacggatgaaggccaactaccacaggtggtggaggagctgagggacctccaagtggccccagggaccagacttgccaagtttcagctaaaggtgaaaggttatccagctccacgcctgtattggtttaaggacggccagccactgactgctagcgcccatatccgcatgacagataaaaagatattgcatactctcgagatcatttcggtcacacgcgaagattccggtcagtatgctgcctacatcagcaacgcaatgggcgcggcttactcctctgcgcgcctactggtgcgtggtccggatgagcccgaggagaagcccgcatcagatgttcacgaacagttggtgcctcctagaatgctggagcggttcacccctaagaaggtgaaaaaaggctcctcaatcactttctccgtgaaggtggagggtcgtcctgtacctaccgtgcattggctccgcgaagaagccgaacgcggcgtcttgtggatcggcccagacactcccggatacactgtcgcttcctctgcgcagcagcatagcctggtgttactcgacgtcggtaggcagcaccagggtacatatacttgcatcgcatcaaatgctgccgggcaggcactgtgtagtgcctcattgcacgtaagcggtctgcccaaagtggaggaacaggaaaaagtcaaagaagcgttgatatccactttcctgcagggtacaacacaagctataagtgcccaaggcctggaaacggccagttttgccgaccttggcgggcagaggaaagaggagccactcgccgctaaagaagccttgggtcatttgtccctggcagaggtgggtactgaggagttcctacagaagctgacgtctcagatcacagagatggtctctgccaagattacacaggcgaagctgcaggtacccgggggtgattcagacgaggatagcaaaacccctagcgctagtcctcgccatggccggtccaggccatcaagttctatacaggaatcgagttccgaaagcgaggacggtgacgccaggggcgagatctttgatatatacgtagtgacagcagattacctacctctcggcgccgaacaagacgctatcacactgcgcgagggacagtacgttgaagtgctcgatgccgcccacccgctgcgatggctcgtcagaactaagccgactaagtctagcccttccaggcagggctgggtgtccccggcgtaccttgatagacgcctgaaactctctccagagtggggagccgctgaagccccagagttccctggggaggctgtgtcggaagatgagtacaaggccagactttcttccgtgatccaggaattactaagcagcgagcaagcatttgtcgaagagttgcagtttctgcagtcgcaccatctccagcatctcgagagatgcccccacgtgcctatcgctgtggccgggcagaaagctgttatttttcgaaatgttcgggatatcggcaggtttcactcgtccttcctacaggagcttcagcagtgtgatacagatgacgatgttgccatgtgcttcatcaagaaccaggctgcctttgagcagtacctcgagttcctcgttggtagggtgcaagccgagtccgttgtagtgtccacagctattcaggagttctacaaaaagtacgcggaagaagcattactcgccggagatccaagtcagccaccgcctccccctctgcagcattacctggagcagcctgtggaacgcgtgcaacgataccaagctctgttaaaggaactgattagaaataaggctaggaataggcaaaattgtgccttgttggagcaggcctatgctgttgtgtcagccctcccacagcgagccgaaaataaactccatgtgagcttaatggagaattaccccggaacactgcaggccctgggagaacccattaggcagggacacttcattgtctgggaaggagcccctggagcccgcatgccatggaaaggacacaaccgtcacgtgttcttgttcagaaatcatctggtcatatgcaagccccgtcgggacagccgaaccgacaccgtgtcatacgtcttcagaaacatgatgaagctctcaagcatagatctgaatgatcaggtggagggggatgacagagcgttcgaagtctggcaggagagagaagattctgttcggaaatatctactccaggctcgcacagcaatcattaagtctagctgggtcaaggagatttgcggcatccaacagaggctagcgctgcctgtgtggcgtcctccagacttcgaggaagaactggctgattgtaccgctgagctcggggagacggtcaaactggcttgcagagtcacaggcaccccaaagcccgtgatctcctggtacaaagacggtaaggccgtgcaagttgatccccatcacattctgatcgaagacccagacggatcctgtgcccttatcctggatagtctgacgggcgtggactcgggccagtatatgtgtttcgcagccagtgccgctgggaactgttccaccctcggcaaaatcctggtccaggtcccacctcgcttcgttaataaagtccgtgcgtctccgtttgtcgagggcgaagatgctcagttcacatgtaccatagaaggtgctccatatccccagatccgttggtataaagatggcgccttactcactactgggaacaagtttcagacactgtccgaacctcggagcggactgctagtcctggtgattagggcggcgtctaaggaagatctggggctgtacgagtgcgaattagtcaaccggctggggagtgctagggcctcagcggagctgcggattcaaagccccatgctgcaggctcaggaacagtgccatcgagagcaactggtcgcagccgtggaggacacaacactggaacgcgctgatcaggaggtaacatccgtcctgaagaggctgctcgggcctaaagccccaggcccctcaaccggggatctcacggggcccggaccctgtcctaggggagcgccagctctccaggaaactggctcacagcctccagtcaccggaactagcgaggcgccggccgtgccaccccgagtaccacagcccctgctacacgaaggccccgaacaggaaccggaggccatcgctcgagctcaagaatggactgtccctataaggatggagggtgctgcctggcccggcgccgggaccggggaattactctgggatgtacacagccacgtcgtccgggagaccacacagagaacgtacacgtaccaggccatcgacacacacaccgcacgccctccatcaatgcaggtgactatcgaagacgtgcaagctcagaccggcgggacagctcagttcgaggctattatcgagggtgatccccagccttctgttacttggtacaaggattccgtgcagttggtggacagcacccggctgtcacagcagcaggaaggaaccacctattcccttgtgctgcgccatgtagcaagcaaggatgcgggagtctacacgtgtctcgcgcagaatacgggcggccaggtgctgtgtaaagccgagctgctggtgctggggggagacaatgagccggattccgagaagcagagccatagacgcaaactgcactcgttctatgaagtgaaagaggagataggccggggcgtgtttggtttcgtaaagagggtccaacacaaggggaacaagattctgtgtgcagctaagtttattcccttgcgctctagaacccgggcacaggcctatagagaacgggacatcttggctgccctctcccatccactggtaacaggactgctcgaccaatttgagacacgaaagacgttgattcttatcctggaactgtgttctagcgaggagctcctggacaggctgtaccgcaagggagtcgtaactgaagccgaggtgaaggtgtatatccaacagctggttgaggggctccactacctccatagccatggcgttctgcacctcgacatcaaaccctcaaacatcctcatggtccatccagcgcgagaagacatcaagatttgtgattttgggttcgcacagaacatcactcctgccgaactgcagttttcacaatatggttcccccgaattcgtgtcgcctgaaatcatccaacagaacccagtttctgaggccagcgacatttgggcaatgggcgtaattagttacctttctctcacctgtagcagtccgttcgccggcgagtctgacagagccacattgttgaatgtgctggaaggaagagtgagctggagttctcctatggcagctcatttgagcgaagacgcaaaagactttataaaagccactctgcaacgagccccacaggcacgccctagcgctgcccagtgcttaagtcacccgtggttccttaagtccatgcctgccgaggaagcgcattttatcaacacgaagcagctgaaatttttactggccaggtctaggtggcaacggagtcttatgtcctacaagtcaatcctggttatgagatccatacccgaactgctgagaggaccgcccgacagcccaagtctcggtgtggccaggcacctgtgccgcgacactggaggatctagttccagctcttcttcctcagacaatgaactggccccattcgcacgggccaagtctcttcctccctcccccgtgacccactcccctctcctgcacccaagaggattcctgagaccatcagcctcactccctgaggaagcagaggcaagcgaaagaagcacggaagcgccagcccccccagcttcgcctgaaggtgccggacctcccgccgcccagggatgcgtgcctcgccattccgtgatacgatctttgttttatcaccaggcaggggagtcgcccgagcacggtgccctggccccaggatctcggcgccatcccgcccggcggcgccatctcctgaaaggaggttatattgctggagccctcccggggctgagagaaccgctaatggagcaccgggtattagaggaggaagcggctcgtgaggagcaagcaacgctcctcgctaaagcgccatcatttgaaacagcattacgcctgcccgcttccggtacacacttggccccgggccactcacatagtctagaacatgacagcccatctacccctaggccaagttccgaggcatgtggggaagctcagcgcttgccgtcggcaccttctggcggcgcaccaatccgggatatggggcacccccagggatcgaagcagctcccatccactggtgggcaccccggtacagcacagcccgagaggccctcaccggactcgccgtggggccaacctgcacccttctgtcaccctaagcagggaagcgcaccccaggagggttgcagcccccaccctgctgtggctccttgccctcctggcagctttccaccgggctcctgtaaggaagcccccctggtcccatcctcaccgtttctagggcagcctcaggcgccacccgcccccgctaaggctagtccgcctcttgactcaaagatgggccctggggacatctcacttcccggccgccccaagcctgggccctgctcaagccccggctccgcctcccaagcttcatctagccaggtctcgagtcttcgcgtcggatccagccaggtaggcacagagcctggaccctctctggatgcagagggctggactcaagaggcagaggacctgagcgactctactccgaccctccagagaccacaggagcaggcgactatgaggaaattttctctgggcggtcgaggcggctacgccggagtggccggttatggcacatttgcatttggcggtgatgctggcgggatgctggggcagggtcccatgtgggctaggatcgcttgggcggtatcacaaagcgaagaagaggaacaagaagaagccagagcagaaagccagtccgaagagcagcaggaagccagagccgagagtcctcttccacaagtttcggctcgacctgtccccgaggtcggccgcgcccctacccggtcctccccagagcccaccccttgggaagatattggccaggtgtctctggtgcagattagggacctttcaggagatgcagaagccgccgatacaatttccctagacatatccgaagtggatcctgcatacctgaacctctctgatctttatgacattaaatatcttcccttcgaattcatgatcttccgaaaagttcctaaatctgctcagcccgagcccccttctcccatggccgaggaagagctggcggagtttcccgaacccacctggccttggcccggcgagctcggaccacacgctggacttgaaatcacagaagagtccgaggatgtcgacgcactgctggccgaagccgcggtgggccgcaaacgaaagtggtctagccccagcagatcattgtttcatttccctgggaggcacctgcccttggacgaacccgccgaactcggcttacgcgaacgcgtcaaagcaagtgttgaacacatttcccgaatcctgaagggccggccagaaggattggagaaagagggcccaccgaggaagaaacccggcttggcctcctttcggctttctggcctgaagtcttgggacagggcacccacttttctccgagagctcagtgacgaaacagtggttcttggacaatctgtgacactggcttgtcaagtatctgcccagcccgccgcacaggctacgtggagcaaagacggcgccccactggaatccagttccagagtcctgattagcgccacacttaaaaattttcaactgttgactatcctcgtcgtggtcgccgaagaccttggggtctatacctgcagcgttagcaacgccctcggtacagtgactaccactggcgttctacgaaaagccgaacgtcccagtagctcaccctgccctgacatcggcgaggtatacgcagacggggtgctgcttgtgtggaaaccagtggaaagttacggcccagtgacctacatagtgcagtgtagcttagaaggtggtagctggaccacactggcgtccgatatatttgactgctgttatctcacgtctaagctaagcagaggcggaacttatacattcaggacagcttgcgtgtctaaggccggaatgggaccctattcatccccttcagagcaggtgctccttggggggccttctcatctggccagtgaggaggaaagccaaggccggagcgcccagccgttaccgtccacaaagacattcgccttccagacacagattcagaggggcaggttctccgttgtccgacaatgctgggagaaggcctcaggtcgagcccttgctgccaagatcatcccttaccatcctaaagacaaaaccgctgtcctacgtgaatatgaggccttgaaagggctgaggcacccccatctcgcacagctccatgccgcctatctgagcccgagacacctggtccttatattagaactctgttctggccccgagctgttgccgtgcctggcggagagagccagctacagtgagtcggaagtgaaggactacctctggcaaatgctttccgccactcagtaccttcacaatcagcacatcctgcatctggaccttaggagcgagaatatgattatcaccgagtataatttgctgaaggtggtagacttgggtaatgcacagtctctgtcacaggaaaaagtgctcccctccgataagtttaaagactacttagaaaccatggctcctgaactgctggagggtcagggcgccgtgcctcagacggacatatgggcgatcggggtcacagctttcatcatgctctccgccgaatatcctgtgagttccgagggtgctcgcgacttacagcgcggtctcaggaagggcctggttaggctctctcgttgttatgctggcctatctggcggagccgtggccttcctcaggagcacgctctgcgcccaaccctgggggaggccctgcgcttcctcctgcctacagtgcccatggctgacggaagagggacccgcctgttcccgcccggcccccgtgactttccccactgccagattaagagtattcgtgcgtaaccgagaaaagcggcgagctcttctgtacaaacgccacaacctcgcacaagtgcgctag

SEQ ID NO: 39327 - DNA, 23907 bp, Artificial Sequence
  derived and/or modified sequence
atggaccagccccagttcagcggggccccccgcttcctgacccggcccaaggcctttgtggtgtctgtgggcaaggatgccaccctgagctgccagatcgtgggcaaccccaccccccaggtgtcctgggagaaggaccagcagcctgtggccgccggggcccgcttccggctggcccaggatggagacctgtaccgcctgaccatcctggacctggccctgggggacagcggccagtatgtgtgccgggccagaaatgccatcggggaggcctttgctgctgtgggcctgcaggtggatgctgaggccgcctgtgccgagcaggccccccacttcctgctgcggcccaccagcatccgggtgcgggagggcagcgaggccaccttccgctgccgggtgggcggcagccccaggcctgctgtgtcctggagcaaggatggccggcggctgggggagccagatggcccccgggtgcgggtggaggagctgggggaggccagcgccctgcgcatccgggccgcccggcccagagatggcggcacctatgaggtgcgggcagagaaccccctgggcgccgccagcgctgctgctgccctggtggtggacagtgatgctgctgacacagccagccggcccggcaccagcacagctgccctgctggcccacctgcagaggcggcgggaggccatgagagctgagggcgccccagccagcccccccagcacaggcaccaggacctgcaccgtgacagagggcaagcacgcccggctgagctgctacgtgactggagagcccaagccagagaccgtgtggaagaaggatggccagctggtgacagagggccgccgccacgtggtgtatgaagatgcccaggagaactttgtgctgaagatcctcttctgcaagcagagcgaccggggcctgtacacctgcacagccagcaacctggtgggccagacctacagctctgtgctggtggtggtgcgggagcctgctgtgcccttcaagaagaggctgcaggacctggaggtgcgggagaaggagagcgccaccttcctgtgtgaggtgccccagcccagcacagaagctgcctggttcaaggaggagacccggctgtgggccagcgccaagtatggcatcgaggaggagggcacagaaagaaggctgactgtgagaaatgtgtctgcagatgatgatgctgtgtacatctgtgagaccccagagggcagcaggacagtggccgagctggccgtgcagggcaacctgctgaggaagctgcccaggaagacagctgtgcgggtgggggacacagccatgttctgtgtggagctggccgtgcctgtgggccctgtgcactggctgaggaaccaggaggaggtggtggccggcggccgggtggccatctctgctgagggcaccaggcacaccctgaccatcagccagtgctgcctggaggatgtgggccaggtggccttcatggccggggactgccagaccagcacccagttctgtgtgtctgcccccaggaagccacccctgcagccccctgtggaccctgtggtgaaggccaggatggagagcagcgtcatcctgtcctggagccccccaccccacggggagaggcctgtgaccattgatggctacctggtggagaagaagaagctgggcacctacacctggatccgctgccacgaggccgagtgggtggccaccccagagctgactgtggctgatgtggccgaggagggcaacttccagttccgggtgtctgccctgaacagctttggccagagcccctacctggagttccctggcaccgtgcacctggcccccaagctggccgtgaggacccccctgaaggctgtgcaggccgtggagggcggggaggtgaccttctctgtggacctgactgtggccagcgctggggagtggttcctggatggccaggccctgaaggccagctctgtgtatgagatccactgtgacaggaccaggcacaccctgaccatccgggaggtgcctgccagcctgcacggggcccagctgaagtttgtggccaatggaattgagagcagcatccgcatggaggtgcgggccgcccctggcctgacagccaacaagcccccagctgctgctgcccgggaggtgctggcccggctgcacgaggaggcccagctgctggccgagctgagtgaccaggccgctgctgtgacctggctgaaggatggccgcaccctgagccctggccccaagtatgaggtgcaggccagcgctggccggcgggtgctgctggtgagagatgtggccagagatgatgctggcctgtatgaatgtgtgtcccggggcggcagaattgcctaccagctgtctgtgcagggcctggcccgcttcctgcacaaggacatggccggcagctgtgtggatgctgtggccggcggccctgcccagtttgaatgtgagaccagcgaggcccacgtgcacgtgcactggtacaaggatggcatggagctgggccacagcggggagcgcttcctgcaggaggatgtgggcaccaggcaccggctggtggccgccaccgtgacccggcaggatgagggcacctacagctgccgggtgggggaggacagcgtggacttccggctgcgggtgtctgagcccaaggtggtgtttgccaaggagcagctggcccggaggaagctgcaggccgaggccggggccagcgccaccctgagctgtgaggtggcccaggcccagacagaggtgacctggtacaaggatggcaagaagctgagcagcagcagcaaggtgtgcatggaggccaccggctgcacccggcggctggtggtgcagcaggccggccaggctgatgctggggagtacagctgtgaggccggcggccagaggctgtccttccacctggatgtgaaggagcccaaggtggtgtttgccaaggaccaggtggcccacagcgaggtgcaggccgaggccggggccagcgccaccctgagctgtgaggtggcccaggcccagacagaggtgatgtggtacaaggatggcaagaagctgagcagcagcctgaaggtgcacgtggaggccaagggctgcagaagaaggctggtggtgcagcaggccggcaagacagatgctggggactacagctgtgaggcccggggccagagggtgtccttccggctgcacatcacagagcccaagatgatgtttgccaaggagcagagcgtgcacaatgaggtgcaggccgaggccggggccagcgccatgctgagctgtgaggtggcccaggcccagacagaggtgacctggtacaaggatggcaagaagctgagcagcagcagcaaggtgggcatggaggtgaagggctgcacccggcggctggtgctgccccaggccggcaaggcagatgctggggagtacagctgtgaggccggcggccagagggtgtccttccacctgcacatcacagagcccaagggcgtgtttgccaaggagcagagcgtgcacaatgaggtgcaggccgaggccggcaccacagccatgctgagctgtgaggtggcccagccccagacagaggtgacctggtacaaggatggcaagaagctgagcagcagcagcaaggtgaggatggaggtgaagggctgcacccggcggctggtggtgcagcaggtgggcaaggcagatgctggggagtacagctgtgaggccggcggccagagggtgtccttccagctgcacatcacagagcccaaggctgtgtttgccaaggagcagctggtgcacaatgaggtgaggacagaggccggggccagcgccaccctgagctgtgaggtggcccaggcccagacagaggtgacctggtacaaggatggcaagaagctgagcagcagcagcaaggtgcgcatcgaggccgccggctgcatgaggcagctggtggtgcagcaggccggccaggctgatgctggggagtacacctgtgaggccggcggccagaggctgtccttccacctggatgtgtctgagcccaaggctgtgtttgccaaggagcagctggcccacaggaaggtgcaggccgaggccggggccatcgccaccctgagctgtgaggtggcccaggcccagacagaggtgacctggtacaaggatggcaagaagctgagcagcagcagcaaggtgaggatggaggccgtgggctgcacccggcggctggtggtgcagcaggcctgccaggccgacacaggagagtacagctgtgaggccggcggccagaggctgtccttcagcctggatgtggccgagcccaaggtggtgtttgccaaggagcagcctgtgcaccgggaggtgcaggcccaggccggggccagcaccaccctgagctgtgaggtggcccaggcccagacagaggtgatgtggtacaaggatggcaagaagctgtccttcagcagcaaggtgaggatggaggccgtgggctgcacccggcggctggtggtgcagcaggccggccaggccgtggccggggagtacagctgtgaggccggcagccagaggctgtccttccacctgcacgtggccgagcccaaggctgtgtttgccaaggagcagcctgccagccgggaggtgcaggccgaggccggcaccagcgccaccctgagctgtgaggtggcccaggcccagacagaggtgacctggtacaaggatggcaagaagctgagcagcagcagcaaggtgaggatggaggccgtgggctgcacccggcggctggtggtgcaggaggccggccaggctgatgctggggagtacagctgcaaggccggggaccagaggctgtccttccacctgcacgtggccgagcccaaggtggtgtttgccaaggagcagcctgcccaccgggaggtgcaggccgaggccggggccagcgccaccctgagctgtgaggtggcccaggcccagacagaggtgacctggtacaaggatggcaagaagctgagcagcagcagcaaggtgcgggtggaggccgtgggctgcacccggcggctggtggtgcagcaggccggccaggccgaggccggggagtacagctgtgaggccggcggccagcagctgtccttccggctgcaggtggccgagctggagccccagatcagcgagcggccctgccggcgggagcccctggtggtgaaggagcacgaggacatcatcctgacagccaccctggccacccccagcgctgccaccgtgacctggctgaaggatggagtggagatccgccgcagcaagagacatgaaacagccagccagggcgacacccacaccctgactgtgcatggagcccaggtgctggacagcgccatctacagctgccgggtgggcgctgagggccaggacttccctgtgcaggtggaggaggtggccgccaagttctgccgcctgctggagcctgtgtgtggggagctgggcggcaccgtgaccctggcctgtgagctgagccctgcctgtgccgaggtggtgtggaggtgtggcaacacccagctgcgggtgggcaagcgcttccagatggtggccgagggccctgtgcgcagcctgactgtgctgggcctgcgggcagaagatgctggggagtatgtgtgtgagagcagagatgaccacaccagcgcccagctgactgtgtctgtgccccgggtggtgaagttcatgagcggcctgagcacagtggtggccgaggagggcggggaggccaccttccagtgtgtggtgagccccagtgatgtggccgtggtgtggttcagagatggagccctgctgcagcccagcgagaagtttgccatcagccagagcggggccagccacagcctgaccatcagtgacctggtgctggaggatgctggccagatcaccgtggaggccgagggcgccagcagcagcgctgccctgcgggtgcgggaggcccctgtgctcttcaagaagaagctggagccccagacagtggaggagaggagctctgtgaccctggaggtggagctgacccggccctggccagagctgcgctggaccagaaatgccacagccctggcccctgggaagaatgtggagatccatgctgagggcgcccggcaccggctggtgctgcacaacgtgggctttgctgaccggggcttcttcggctgtgagaccccagatgacaagacccaggccaagctgactgtggagatgaggcaggtgcggctggtgcggggcctgcaggccgtggaggcccgggagcagggcacagccaccatggaggtgcagctgagccatgctgatgtggatggctcctggaccagagatggcctgcgcttccagcagggccccacctgccacctggccgtgcggggccccatgcacaccctgaccctgagcggcctgcggccagaagattctggcctgatggtgttcaaggccgagggcgtgcacaccagcgcccggctggtggtgacagagctgcctgtgtccttcagccggcccctgcaggatgtggtgaccacagagaaggagaaggtgaccctggagtgtgagctgagccggcccaacgtggatgtgcgctggctgaaggatggagtggagctgcgggccggcaagaccatggccatcgccgcccagggcgcctgccgcagcctgaccatctaccgctgtgaatttgctgaccagggcgtgtatgtgtgtgatgcccatgatgcccagagcagcgcctctgtgaaggtgcagggccgcacctacaccctcatctaccgccgggtgctggctgaagatgctggggagatccagtttgtggctgaaaatgctgagagccgggcccagctgcgggtgaaggagctgcctgtgaccctggtgcggcccctgcgggacaagatcgccatggagaagcacagaggagtgctggagtgccaggtgtcccgggccagcgcccaggtgcgctggttcaagggcagccaggagctgcagcccggccccaagtatgagctggtgtctgatggcctgtacaggaagctgatcatcagtgatgtgcatgctgaagatgaggacacctacacctgtgatgctggagatgtgaagaccagcgcccagttctttgtggaggagcagagcatcaccatcgtgcggggcctgcaggatgtgacagtgatggagcccgccccagcctggtttgaatgtgagaccagcatccccagcgtgcggccccccaagtggctgctgggcaagacagtgctgcaggccggcggcaatgtgggcctggagcaggagggcaccgtgcaccggctgatgctgcggaggacctgcagcaccatgacaggccctgtgcacttcaccgtgggcaagagccgcagcagcgcccggctggtggtgtctgacatccctgtggtgctgacccggcccctggagcccaagacaggccgggagctgcagagcgtggtgctgagctgtgacttccggcctgcccccaaggctgtgcagtggtacaaggatgacacccccctgagccccagcgagaagttcaagatgagcctggagggccagatggccgagctgcgcatcctgcggctgatgccagcagatgctggggtgtaccgctgccaggccggcagcgcccacagcagcacagaggtgacagtggaggcccgggaggtgacagtgacaggccccctgcaggatgctgaggccacagaggagggctgggccagcttcagctgtgagctgagccatgaagatgaggaggtggagtggagcctgaatggcatgcccctgtacaatgacagcttccacgagatcagccacaagggccgccgccacaccctggtgctgaagagcatccagagagcagatgctggcatcgtgcgggccagcagcctgaaggtgtccaccagcgcccggctggaggtgcgggtgaagcctgtggtgttcctgaaggccctggatgacctgtctgctgaggagcggggcaccctggccctgcagtgtgaggtgtctgaccctgaggcccacgtggtgtggaggaaggatggagtgcagctgggccccagcgacaagtatgacttcctgcacacagctggcacccggggcctggtggtgcatgatgtgtccccagaagatgctggcctgtacacctgccacgtgggcagcgaggagacccgggcccgggtgcgggtgcatgacctgcacgtgggcatcaccaagaggctgaagaccatggaggtgctggagggggagagctgcagctttgaatgtgtgctgagccatgaaagtgccagtgaccctgccatgtggacagtgggcggcaagacagtgggcagcagcagccgcttccaggccacccggcagggcaggaagtacatcctggtggtgcgggaggccgcccccagtgatgctggggaggtggtgttttctgtgcggggcctgaccagcaaggccagcctgattgtgcgggagaggcctgctgccatcatcaagcccctggaggaccagtgggtggcccctggagaagatgtggagctgcgctgtgagctgagcagagctggcacccctgtgcactggctgaaggacaggaaggccatcaggaagagccagaagtatgatgtggtgtgtgagggcaccatggccatgctggtgatccggggggccagcctgaaggatgctggggagtacacctgtgaggtggaggccagcaagagcacagccagcctgcacgtggaggagaaggccaactgcttcacagaggagctgaccaacctgcaggtggaggagaagggcacagctgtgttcacctgcaagacagagcaccctgctgccaccgtgacctggaggaagggcctgctggagctgcgggccagcggcaagcaccagcccagccaggagggcctgaccctgcggctgaccatcagcgccctggagaaggctgacagcgacacctacacctgtgacatcggccaggcccagagccgggcccagctgctggtgcagggcagaagagtgcacatcatcgaggacctggaggatgtggatgtgcaggagggcagcagcgccaccttccgctgccgcatcagccctgccaactatgagcctgtgcactggttcctggacaagacccccctgcacgccaatgagctgaatgaaattgatgcccagcccggcggctaccacgtgctgaccctgcggcagctggccctgaaggacagcggcaccatctactttgaggccggggaccagagggccagcgctgccctgcgggtgacagagaagcccagcgtcttcagccgggagctgacagatgccaccatcacagaaggagaggacctgaccctggtgtgtgagaccagcacctgtgacatccctgtgtgctggaccaaggatggcaagaccctgcggggcagcgcccgctgccagctgagccatgagggccaccgggcccagctgctgatcactggagccaccctgcaggacagcggccgctacaagtgtgaggccggcggggcctgcagcagcagcatcgtgcgggtgcacgcccggcctgtgcgcttccaggaggccctgaaggacctggaggtgctggagggcggggccgccaccctgcgctgtgtgctgagctctgtggccgcccctgtgaagtggtgctacggcaacaacgtgctgcggcctggggacaagtacagcctgcggcaggagggcgccatgctggagctggtggtgaggaacctgcggccccaggacagcggccgctacagctgcagctttggagaccagaccaccagcgccaccctgactgtgacagccctgcctgcccagttcatcggcaagctgaggaacaaggaggccacagagggcgccacagccaccctgcgctgtgagctgagcaaggccgcccctgtggagtggaggaaaggaagtgagaccctgagagatggagaccgctactgcctgcggcaggatggagccatgtgtgagctgcagatccggggcctggccatggtggatgctgctgagtacagctgtgtgtgtggggaggagaggaccagcgccagcctgaccatccggcccatgcctgcccacttcatcggccgcctgcggcaccaggagagcattgagggcgccacagccaccctgcgctgtgagctgagcaaggccgcccctgtggagtggaggaagggccgggagagcctgagagatggagacagacacagcctgcggcaggatggagctgtgtgtgagctgcagatctgtggcctggccgtggctgatgctggggagtacagctgtgtgtgtggggaggagaggaccagcgccaccctgactgtgaaggccctgcctgccaagttcacagagggcctgagaaatgaggaggccgtggagggcgccacagccatgctgtggtgtgagctgagcaaggtggcccctgtggagtggaggaaaggacctgagaacctgagagatggagaccgctacatcctgcggcaggagggcacccgctgtgagctgcagatctgtggcctggccatggctgatgctggggagtacctgtgtgtgtgtggccaggagaggaccagcgccaccctgaccatccgggccctgcctgcccgcttcattgaagatgtgaagaaccaggaggcccgggagggcgccacagctgtgctgcagtgtgagctgaacagcgctgcccctgtggagtggaggaaaggaagtgagaccctgagagatggagaccgctacagcctgcggcaggacggcaccaagtgtgagctgcagatccggggcctggccatggctgacacaggagagtacagctgtgtgtgtggccaggagaggaccagcgccatgctgactgtgcgggccctgcccatcaagttcacagagggcctgagaaatgaggaggccacagagggcgccacagctgtgctgcgctgtgagctgagcaagatggcccctgtggagtggtggaagggccacgagaccctgagagatggagacagacacagcctgcggcaggatggagcccgctgtgagctgcagatccggggcctggtggctgaagatgctggggagtacctgtgcatgtgtgggaaggagaggaccagcgccatgctgactgtgcgggccatgcccagcaagttcatcgagggcctgagaaatgaggaggccacagaaggagacacagccaccctgtggtgtgagctgagcaaggccgcccctgtggagtggaggaaaggacatgagaccctgagagatggagacagacacagcctgcggcaggacggcagccgctgtgagctgcagatccggggcctggccgtggtggatgctggggagtacagctgtgtgtgtggccaggagaggaccagcgccaccctgactgtgcgggccctgcctgcccgcttcattgaagatgtgaagaaccaggaggcccgggagggcgccacagctgtgctgcagtgtgagctgagcaaggccgcccctgtggagtggaggaaaggaagtgagaccctgcggggcggggaccgctacagcctgcggcaggacggcacccgctgtgagctgcagatccacggcctgtctgtggccgacacaggagagtacagctgtgtgtgtggccaggagaggaccagcgccaccctgactgtgcgggccccccagcccgtcttccgggagcccctgcagagcctgcaggccgaggagggcagcacagccaccctgcagtgtgagctgtctgagcccacagccaccgtggtgtggagcaagggcggcctgcagctgcaggccaacggccggcgggagccccggctgcagggctgcacagctgagctggtgctgcaggacctgcagcgggaggacaccggggagtacacctgcacctgtggcagccaggccaccagcgccaccctgactgtgacagctgcccctgtgcgcttcctgcgggagctgcagcaccaggaggtggatgaaggaggaacagcccacctgtgctgtgagctgagcagagctggggcctctgtggagtggaggaagggcagcctgcagctgttcccctgtgccaagtaccagatggtgcaggatggagctgctgctgagctgctggtgcggggcgtggagcaggaggatgctggggactacacctgtgacaccggccacacccagagcatggccagcctgtctgtgcgggtgccccggcccaagttcaagacccggctgcagagcctggagcaggagactggagacatcgcccggctgtgctgccagctgagtgatgctgagagcggggctgtggtgcagtggctgaaggagggcgtggagctgcatgctggccccaagtatgagatgaggagccagggcgccacccgggagctgctgatccaccagctggaggccaaggacaccggggagtatgcctgtgtgactggaggccagaagacagctgccagcctgcgggtgacagagcctgaggtgaccatcgtgcggggcctggtggatgctgaggtgacagcagatgaagatgtggagttcagctgtgaggtgtccagagctggggccaccggggtgcagtggtgcctgcagggcctgcccctgcagagcaatgaggtgacagaggtggccgtgagagatggccgcatccacaccctgcggctgaagggcgtgaccccagaagatgctggcaccgtgtccttccacctgggcaaccacgccagcagcgcccagctgactgtgcgggcccctgaggtgaccatcctggagcccctgcaggatgtgcagctgtctgagggccaggatgccagcttccagtgccgcctgagccgggccagcggccaggaggcccgctgggccctgggcggcgtgcccctgcaggccaatgagatgaatgacatcaccgtggagcagggcaccctgcacctgctgaccctgcacaaggtgaccctggaggatgctggcaccgtgtccttccacgtgggcacctgcagcagcgaggcccagctgaaggtgacagccaagaacacagtggtgcggggcctggagaatgtggaggccctggagggcggggaggccctgtttgagtgccagctgagccagcctgaggtggccgcccacacctggctgctggatgatgagcctgtgcacaccagtgaaaatgctgaggtggtgttctttgaaaatggcctgcggcacctgctgctgctgaagaacctgcggccccaggacagctgccgggtgaccttcctggccggggacatggtgaccagcgccttcctgactgtgcggggctggaggctggagatcctggagcccctgaagaatgctgctgtgcgggccggggcccaggcctgcttcacctgcaccctgtctgaggccgtgcctgtgggggaggcctcctggtacatcaatggagctgctgtgcagccagatgacagcgactggacagtgacagcagatggcagccaccacgccctgctgctgcggagcgcccagccccaccacgccggggaggtgacctttgcctgcagagatgctgtggccagcgcccggctgactgtgctgggcctgcctgaccccccagaagatgctgaggtggtggcccggagcagccacacagtgaccctgtcctgggccgcccccatgtctgatggcggcggcggcctgtgtggctacagagtggaggtgaaggagggcgccaccggccagtggaggctgtgccacgagctggtgcccggcccagaatgtgtggtggatggcctggcccctggagagacctaccgcttccgggtggccgctgtgggccctgtgggcgctggggagcctgtgcacctgccccagacagtgcggctggccgagccccccaagcctgtgcccccccagcccagcgcccctgagagccggcaggtggccgctggagaagatgtgtccctggagctggaggtggtggccgaggccggggaggtgatctggcacaagggcatggagcgcatccagcccggcggccgctttgaggtggtgtcccagggccggcagcagatgctggtgatcaagggcttcaccgctgaggaccagggcgagtaccactgcggcctggcccagggcagcatctgcccagctgctgccaccttccaggtggccctgagccctgcctctgtggatgaggccccccagcccagcctgcccccagaggccgcccaggagggggacctgcacctgctgtgggaggccctggccaggaagaggaggatgagccgggagcccaccctggacagcatcagcgagctgcctgaggaggatggccgcagccagaggctgccccaggaggccgaggaggtggccccagacctgtctgagggctacagcacagcagatgagctggccaggactggagatgctgacctgagccacaccagcagtgatgatgagagcagagctggcacccccagcctggtgacctacctgaagaaggccggccggcccggcaccagccccctggccagcaaggtgggcgccccagctgcccccagcgtgaagccccagcagcagcaggagcccctggccgctgtgcggccccccctgggggacctgagcaccaaggacctgggggaccccagcatggacaaggctgctgtgaagatccaggccgccttcaagggctacaaggtgaggaaggagatgaagcagcaggagggccccatgttcagccacaccttcggggacacagaggcccaggtgggagatgccctgcggctggagtgtgtggtggccagcaaggcagatgtgcgggcccgctggctgaaggatggagtggagctgacagatggccgccaccaccacatcgaccagctgggagatggcacctgcagcctgctgatcaccggcctggacagagcagatgctggctgctacacctgccaggtgagcaacaagtttggccaggtgacccacagcgcctgtgtggtggtgtctggcagcgagagcgaggccgagagcagcagtggaggagagctggatgatgccttccggcgggccgcccggcggctgcacaggctcttccgcaccaagagccctgctgaggtgtctgatgaggagctgttcctgtctgcagatgagggccctgctgagcctgaggagcctgctgactggcagacctacagagaagatgagcacttcatctgcatccgctttgaggccctgacagaggcccggcaggccgtgacccgcttccaggagatgtttgccaccctgggcatcggcgtggagatcaagctggtggagcagggcccccggcgggtggagatgtgcatcagcaaggagaccccagcccctgtggtgcccccagagcccctgcccagcctgctgaccagtgatgctgcccctgtgttcctgacagagctgcagaaccaggaggtgcaggacggctaccctgtgtcctttgactgtgtggtgacaggccagcccatgcccagcgtgcgctggttcaaggatggcaagctgctggaggaggatgaccactacatgatcaatgaagaccagcagggcggccaccagctgatcatcacagctgtggtgcctgctgacatgggcgtgtaccgctgcctggccgagaacagcatgggcgtgagcagcaccaaggccgagctgcgggtggacctgaccagcacagattatgacacagctgctgatgccacagagagcagcagctacttcagcgcccagggctacctgagcagccgggagcaggagggcacagagagcaccacagatgagggccagctgccccaggtggtggaggagctgcgggacctgcaggtggcccctggcacccggctggccaagttccagctgaaggtgaagggctacccagccccccggctgtactggttcaaggatggccagcccctgacagccagcgcccacatccgcatgacagacaagaagatcctgcacaccctggagatcatctctgtgacccgggaggacagcggccagtatgctgcctacatcagcaatgccatgggcgccgcctacagcagcgcccggctgctggtgcggggcccagatgagcctgaggagaagccagccagtgatgtgcatgagcagctggtgccccccaggatgctggagcgcttcacccccaagaaggtgaagaagggcagcagcatcaccttctctgtgaaggtggagggccggcctgtgcccaccgtgcactggctgcgggaggaggccgagcggggcgtgctgtggattggccctgacaccccaggctacacagtggccagcagcgcccagcagcacagcctggtgctgctggatgtgggccggcagcaccagggcacctacacctgcatcgccagcaatgctgctggccaggccctgtgcagcgccagcctgcacgtgtctggcctgcccaaggtggaggagcaggagaaggtgaaggaggccctgatcagcaccttcctgcagggcaccacccaggccatcagcgcccagggcctggagacagccagctttgctgacctgggcggccagaggaaggaggagcccctggccgccaaggaggccctgggccacctgagcctggccgaggtgggcacagaggagttcctgcagaagctgaccagccagatcacagagatggtgtctgccaagatcacccaggccaagctgcaggtgcctggaggagacagtgatgaggacagcaagaccccatctgccagccccaggcatggccgcagccggcccagcagcagcatccaggagagcagcagcgagagtgaagatggagatgcccggggggagatctttgacatctacgtggtgacagctgactacctgcccctgggcgctgagcaggatgccatcaccctgcgggagggccagtatgtggaggtgctggatgctgcccaccccctgcgctggctggtgaggaccaagcccaccaagagcagccccagccggcagggctgggtgtccccagcctacctggaccggcggctgaagctgagccctgagtggggcgctgctgaggcccctgagttccctggagaggccgtgtctgaagatgagtacaaggcccggctgagcagcgtcatccaggagctgctgagcagcgagcaggcctttgtggaggagctgcagttcctgcagagccaccacctgcagcacctggagcgctgcccccacgtgcccatcgctgtggccggccagaaggccgtcatcttcagaaatgtgcgggacatcggccgcttccacagcagcttcctgcaggagctgcagcagtgtgacacagatgatgatgtggccatgtgcttcatcaagaaccaggccgcctttgagcagtacctggagttcctggtgggccgggtgcaggccgagagcgtggtggtgtccacagccatccaggagttctacaagaagtatgcagaggaggccctgctggccggggaccccagccagcccccacctccacccctgcagcactacctggagcagcctgtggagcgggtgcagcgctaccaggccctgctgaaggagctgatccggaacaaggccaggaaccggcagaactgtgccctgctggagcaggcctatgctgtggtgtctgccctgccccagagagctgagaacaagctgcacgtgtccctgatggagaactacccaggcaccctgcaggccctgggggagcccatccggcagggccacttcatcgtgtgggagggcgcccctggggccaggatgccctggaagggccacaacagacatgtgttcctgttcaggaaccacctggtgatctgcaagccccggcgggacagcaggacagacacagtgtcctatgtgttcaggaacatgatgaagctgagcagcattgacctgaatgaccaggtggagggagatgaccgggcctttgaggtgtggcaggagcgggaggacagcgtgaggaagtacctgctgcaggccaggacagccatcatcaagagctcctgggtgaaggagatctgtggcatccagcagaggctggccctgcctgtgtggaggcccccagactttgaggaggagctggccgactgcacagctgagctgggggagaccgtgaagctggcctgccgggtgacaggcacccccaagcctgtgatctcctggtacaaggatggcaaggctgtgcaggtggacccccaccacatcctgattgaggaccctgatggcagctgtgccctgatcctggacagcctgactggagtggacagcggccagtacatgtgctttgctgccagcgctgctggcaactgcagcaccctgggcaagatcctggtgcaggtgcccccaagatttgtgaacaaggtgcgggccagcccctttgtggagggagaagatgcccagttcacctgcaccattgaaggagccccctacccccagatccgctggtacaaggatggagccctgctgaccaccggcaacaagttccagaccctgtctgagcccaggagcggcctgctggtgctggtgatccgggccgccagcaaagaagacctgggcctgtatgaatgtgagctggtgaaccggctgggcagcgcccgggccagcgctgagctgcgcatccagagccccatgctgcaggcccaggagcagtgccaccgggagcagctggtggccgctgtggaggacaccaccctggagagagctgaccaggaggtgacctctgtgctgaagaggctgctgggccccaaggcccctggccccagcactggagacctgaccggccctggcccctgccccaggggggccccagccctgcaggagaccggcagccagccccctgtgacaggcaccagcgaggccccagctgtgcccccccgggtgccccagcccctgctgcacgagggccctgagcaggagcctgaggccatcgcccgggcccaggagtggacagtgcccatccgcatggagggcgccgcctggccaggggccggcaccggggagctgctgtgggatgtgcacagccacgtggtgcgggagaccacccagaggacctacacctaccaggccatcgacacccacacagcccggccccccagcatgcaggtgaccattgaagatgtgcaggcccagacaggaggaacagcccagtttgaggccatcatcgagggggacccccagcccagcgtgacctggtacaaggacagcgtgcagctggtggacagcacccggctgagccagcagcaggagggcaccacctacagcctggtgctgcggcacgtggccagcaaggatgctggggtgtacacctgcctggcccagaacacaggaggccaggtgctgtgcaaggccgagctgctggtgctgggcggggacaatgaaccagattctgagaagcagagccacaggaggaagctgcacagcttctatgaggtgaaggaggagatcggccggggcgtgtttggatttgtgaagagggtgcagcacaagggcaacaagatcctgtgtgccgccaagttcatccccctgcggagcaggacccgggcccaggcctaccgggagcgggacatcctggccgccctgagccaccccctggtgacaggcctgctggaccagtttgagaccaggaagaccctcatcctgatcctggagctgtgcagcagcgaggagctgctggaccggctgtacaggaagggcgtggtgacagaggccgaggtgaaggtgtacatccagcagctggtggagggcctgcactacctgcacagccatggagtgctgcacctggacatcaagcccagcaacatcctgatggtgcacccagcccgggaggacatcaagatctgtgactttggatttgcccagaacatcaccccagctgagctgcagttcagccagtatggcagccctgagtttgtgtccccagagatcatccagcagaaccctgtgtctgaggccagtgacatctgggccatgggcgtcatctcctacctgagcctgacctgcagcagcccctttgctggggagagtgaccgggccaccctgctgaatgtgctggagggccgggtgtcctggagcagccccatggccgcccacctgtctgaagatgccaaggacttcatcaaggccaccctgcagagggccccccaggcccggcccagcgctgcccagtgcctgagccacccctggttcctgaagtccatgcctgctgaggaggcccacttcatcaacaccaagcagctgaagttcctgctggcccggagccgctggcagaggagcctgatgagctacaagagcatcctggtgatgaggagcatccctgagctgctgcggggccccccagacagccccagcctgggcgtggcccggcacctgtgccgggacaccggcggcagcagcagcagcagcagcagcagtgacaatgagctggccccctttgcccgggccaagagcctgccccccagccctgtgacccacagccccctgctgcacccccggggcttcctgcggcccagcgccagcctgcctgaggaggccgaggccagcgagaggagcacagaggccccagcccccccagccagccctgagggcgccggccccccagctgcccagggctgtgtgcccaggcacagcgtcatccgcagcctcttctaccaccaggccggggagagccctgagcacggggccctggcccctggcagccgccgccacccagcccggcggcggcacctgctgaagggcggctacatcgccggggccctgcccggcctgcgggagcccctgatggagcaccgggtgctggaggaggaggccgcccgggaggagcaggccaccctgctggccaaggcccccagctttgaaacagccctgcggctgcctgccagcggcacccacctggcccctggccacagccacagcctggagcatgacagccccagcaccccccggcccagcagcgaggcctgtggggaggcccagaggctgcccagcgcccccagcggcggggcccccatccgggacatgggccacccccagggcagcaagcagctgcccagcactggaggccaccctggaacagcccagcctgagcggcccagcccagacagcccctggggccagcctgcccccttctgccaccccaagcagggcagcgccccccaggagggctgcagcccccaccctgctgtggccccctgccccccaggcagcttccccccaggcagctgcaaggaggcccccctggtgcccagcagccccttcctgggccagccccaggcccccccagccccagccaaggccagcccccccctggacagcaagatgggccctggggacatcagcctgcccggccggcccaagccaggcccctgcagcagccctggcagcgccagccaggccagcagcagccaggtgagcagcctgcgggtgggcagcagccaggtgggcacagagcccggccccagcctggatgctgagggctggacccaggaggccgaggacctgagtgacagcacccccaccctgcagaggccccaggagcaggccaccatgaggaagttcagcctgggcggccggggcggctacgccggcgtggccggctacggcacctttgcctttggaggagatgctgggggcatgctgggccagggccccatgtgggccagaattgcctgggccgtgtcccagagcgaggaggaggagcaggaggaggcccgggcagagagccagagcgaggagcagcaggaggcccgggcagagagccccctgccccaggtgtctgcccggcctgtgcctgaggtgggccgggcccccaccaggagcagccctgagcccaccccctgggaggacatcggccaggtgtccctggtgcagatccgggacctgtctggagatgctgaggccgctgacaccatcagcctggacatcagcgaggtggaccctgcctacctgaacctgagtgacctgtatgacatcaagtacctgccctttgagttcatgatcttcaggaaggtgcccaagagcgcccagcctgagccccccagccccatggccgaggaggagctggccgagttccctgagcccacctggccctggccaggagagctgggcccccatgctggcctggagatcacagaggagagtgaagatgtggatgccctgctggccgaggccgctgtgggcaggaagaggaagtggagcagccccagccgcagcctcttccacttccctggccgccacctgcccctggatgagcctgctgagctgggcctgcgggagcgggtgaaggcctctgtggagcacatcagccgcatcctgaagggccggcctgagggcctggagaaggagggcccccccaggaagaagccaggcctggccagcttccggctgagcggcctgaagtcctgggaccgggcccccaccttcctgcgggagctgagtgatgaaacagtggtgctgggccagagcgtgaccctggcctgccaggtgtctgcccagcctgctgcccaggccacctggagcaaggatggagcccccctggagagcagcagccgggtgctgatcagcgccaccctgaagaacttccagctgctgaccatcctggtggtggtggccgaggacctgggcgtgtacacctgcagcgtgtccaatgccctgggcaccgtgaccaccaccggggtgctgaggaaggccgagcggcccagcagcagcccctgcccagacattggagaggtgtatgcagatggagtgctgctggtgtggaagcctgtggagagctatggccctgtgacctacatcgtgcagtgcagcctggagggcggctcctggaccaccctggccagtgacatctttgactgctgctacctgaccagcaagctgagcagaggaggcacctacaccttcagaacagcctgtgtgtccaaggccggcatgggcccctacagcagccccagcgagcaggtgctgctgggcggccccagccacctggccagcgaggaggagagccagggccgcagcgcccagcccctgcccagcaccaagacctttgccttccagacccagatccagaggggccgcttctctgtggtgcggcagtgctgggagaaggccagcggccgggccctggccgccaagatcatcccctaccaccccaaggacaagacagctgtgctgcgggagtatgaggccctgaagggcctgcggcacccccacctggcccagctgcatgctgcctacctgagccccaggcacctggtgctgatcctggagctgtgcagcggccctgagctgctgccctgcctggccgagcgggccagctacagcgagagcgaggtgaaggactacctgtggcagatgctgagcgccacccagtacctgcacaaccagcacatcctgcacctggacctgcggtctgagaacatgatcatcacagagtacaacctgctgaaggtggtggacctgggcaatgcccagagcctgagccaggagaaggtgctgcccagcgacaagttcaaggactacctggagaccatggcccctgagctgctggagggccagggcgctgtgccccagacagacatctgggccatcggcgtgacagccttcatcatgctgtctgctgagtaccctgtgtcctctgagggcgcccgggacctgcagaggggcctgaggaagggcctggtgcggctgagccgctgctacgccggcctgagcggcggcgctgtggccttcctgcggagcaccctgtgtgcccagccctggggccggccctgtgccagcagctgcctgcagtgcccctggctgacagaggagggccctgcctgcagcaggcctgcccctgtgaccttccccacagcccggctgcgggtgtttgtgaggaaccgggagaagaggcgggccctgctgtacaagaggcacaacctggcccaggtgaggtag

SEQ ID NO: 39328 - DNA, 23907 bp, Artificial Sequence
  derived and/or modified sequence
atggaccagccccagttcagcggcgccccccggttcctgacccggccgaaagcttttgttgtgtctgtgggcaaggacgccaccctcagctgccagatcgtgggcaacccaactccccaggtctcatgggaaaaggatcagcagccagtcgcggctggagcccgttttcgactcgcacaagacggtgacctgtataggctgaccattctcgacctggccctcggggatagcggacaatacgtctgccgcgcccggaatgccattggagaggccttcgcagctgtagggctgcaggtggatgctgaagcagcgtgcgcagagcaggccccccactttctgctaaggcccaccagtatccgcgtaagagaaggctctgaagccacctttcgatgcagggtgggtggcagtcctcgccccgctgtcagttggtccaaagacggtaggcgactcggggaaccagatggacccagagttagggtggaggagctaggcgaggcctccgccctgcgcataagagccgccaggcctagagacggcggcacatatgaagtgcgggctgaaaacccactgggggcggcttcggctgccgcggctctggtggtcgacagcgacgccgctgatactgcgagtcgccctggaacatctactgctgcactcctggctcacctgcagaggagacgagaggctatgcgagccgaaggcgcaccggcctcacccccttctacaggcacccggacttgcacagtcactgagggaaaacatgcaaggctgtcttgttacgtgaccggagagcctaaacctgagaccgtgtggaaaaaggatggccagctggtgaccgagggacgtagacatgtggtatatgaagatgcccaggagaatttcgtcctgaagatcctgttctgcaagcagtccgaccgcggcctgtacacatgcacagctagcaatcttgtcggacagacttactctagtgtgctggtcgtggtcagggaaccagcagtaccctttaagaagaggctccaggacttggaggtcagagaaaaggagtctgctacatttctttgtgaagtgccacaaccatcaacagaagccgcctggtttaaggaggaaacaagactgtgggcctctgcaaagtacgggatcgaggaggaggggacagagcgtagattaaccgttagaaacgtctcagccgacgatgatgccgtttatatctgcgaaactcccgagggctctagaacagtggcggagctcgcagtgcaaggaaacctcctccgcaagctccctagaaagaccgcggtccgagtgggcgacaccgcaatgttctgtgtagaactggctgtcccagtcgggcccgtacattggctgcgcaatcaggaggaggtagtcgccggcggcagggtggctattagcgccgagggtactcggcataccctgactatctcacagtgttgtttggaggacgtcggccaagtggccttcatggccggggattgtcagacctccacccagttttgtgtgtccgcaccaagaaaaccgcctctgcagccacccgtcgaccccgtggtgaaagcccggatggagtcaagtgttatcctgtcctggagcccacccccccatggggagaggccagtcaccattgatgggtatttggtggagaagaaaaaactcggcacatacacctggatacgttgtcacgaagccgagtgggtggcaacacctgagttgaccgttgccgatgttgctgaagaggggaatttccagtttagggtgtctgcacttaactcatttggccagtccccctatcttgaatttcctggcactgtgcatctcgcacctaagctggcggtacgtacccccctgaaagctgtgcaggcagtcgaaggaggagaggtgacattttcagtcgacctgactgtcgcctccgcgggagagtggtttctggatggacaagcactgaaagcatcatctgtgtatgaaattcactgtgatagaactaggcacaccttgacaattagggaagtgccagcctcgcttcatggcgcgcagctgaagttcgtggctaacggaatcgaaagttctatccgcatggaggttcgcgccgccccaggcttaaccgctaataagcctccagcagccgccgcacgagaagtgctagcccggctacacgaagaagcccagttactcgctgaattatcagaccaggctgcggcggtcacttggctcaaggacgggagaaccttgtctcctggcccaaagtatgaagtccaggcatccgccggcagacgcgtgcttctggttcgcgatgtggcccgcgacgacgccggcctgtatgagtgcgtctctcgaggggggaggattgcctatcaactctccgtccagggcctagccaggtttctgcataaggatatggccggtagttgtgtggacgccgtggccggcgggccggcccagtttgaatgtgagacaagcgaagcccacgtgcacgtccactggtacaaggacggcatggagcttggccacagcggagaacgatttttacaagaggacgtgggaactcggcaccgactggtggcggccaccgtgacacgacaagatgagggcacttattcatgccgggtgggtgaagattccgtggatttccgcttaagagtgagtgagccgaaagttgtgtttgccaaggagcagctggctcgcagaaaattacaagccgaggcaggtgcatcggccaccctgtcttgcgaagtagctcaggcgcagaccgaggtgacctggtacaaggacggcaagaagctgagttccagctccaaagtctgcatggaagcaaccggctgcacccgccgactggtggttcagcaagcgggtcaggccgatgccggagagtactcatgtgaggctgggggccagcgcttgagcttccatctcgatgtaaaggagccgaaagtagttttcgccaaagaccaggttgcacattccgaggtgcaggccgaagcaggcgcctccgccacgttaagctgtgaagtagcccaggctcagactgaggtgatgtggtataaggacggaaagaagctaagctccagtctgaaagttcacgtggaggcgaaagggtgtaggcgtcgcctggtggtccaacaagcaggaaagactgacgctggagactatagctgcgaggcccgcgggcagcgagtatcatttaggctgcacattacagaacccaagatgatgtttgcaaaggagcagagtgtgcacaatgaggtccaggcagaagcaggcgcctctgcaatgctctcgtgcgaggttgcccaggcccaaactgaagtcacttggtacaaagatggcaaaaagctgtcaagctcctccaaagtgggtatggaggttaagggctgcacccggagactggtcttacctcaggccggaaaagccgatgcaggcgagtatagctgcgaggctggtggccagagagtgagcttccacctccatatcaccgagcctaaaggagtgtttgcaaaggagcagtcggttcacaatgaagtacaggccgaggctggcacaaccgcaatgctgagctgtgaagtcgctcagccacagactgaggtgacatggtataaggacggaaagaagctctcgtccagctccaaagttaggatggaggtgaaaggctgcactagaaggctcgttgttcagcaggtgggcaaagccgatgcaggcgagtactcttgcgaagccggggggcagagagtgtcgtttcagctccacatcaccgagcctaaagccgtctttgctaaggagcagcttgttcacaacgaagtgagaacggaagcaggtgccagcgcaacattgtcctgtgaagtcgcgcaggctcagacagaggtgacatggtacaaggacggaaaaaagctctccagcagctctaaagtccgaattgaagccgcagggtgcatgcgacagcttgttgttcagcaggcgggccaagccgacgccggggaatatacctgcgaggccggaggccaacgactgtcgtttcatcttgatgtcagtgaaccaaaggccgtgttcgcgaaggaacagctcgctcaccgtaaggtccaggctgaagcgggagccatcgctaccctctcatgtgaggtggcccaggcccagacggaggtcacgtggtataaagatggcaaaaaactgagctcatcttcaaaggttaggatggaagccgtgggctgtacccggcgcctcgtcgtacaacaagcctgccaggctgatactggagagtactcatgcgaagcagggggtcagagactgtctttcagtctcgacgtggctgaacctaaggtcgtcttcgccaaagagcagccagtacatcgggaggtgcaagctcaggcaggggcctccaccaccctgtcctgtgaggtagcccaggcacagaccgaggtcatgtggtataaggacggcaagaaattatccttttcctcaaaggtgagaatggaagcagtgggctgcacacggcgtctggttgttcaacaggcgggacaggctgttgcaggagagtactcatgcgaagcgggttcgcaaagactgagctttcacctgcacgttgccgagcctaaggccgtgtttgctaaggaacagccagcctccagagaggttcaggccgaagccggaaccagcgcgactttatcctgtgaggtggcccaggcgcagacagaggtgacatggtataaggatggaaaaaaactttcctcatcgagcaaggtccgcatggaggccgtcggctgtactaggaggctagtggtacaggaggctgggcaggcagatgctggtgagtatagctgcaaagccggcgaccagcggttgagcttccatctacatgttgcagagcctaaggtggtctttgctaaggagcagcctgcccacagggaggtccaggcagaggcgggggccagtgcaaccctgagctgcgaggtggctcaggcgcagacggaggttacgtggtataaggacggcaaaaagttatcaagcagcagcaaggtccgtgtggaagccgtgggttgcacgcgcagattggttgttcaacaggctggtcaggcggaggccggtgagtactcatgtgaagcgggcggccagcaactcagtttccgcctccaggtggccgaacttgagcctcagatcagtgaacgcccatgtaggagggagcccctggtcgtgaaagagcacgaggacataatactgaccgcgacgctagcaaccccatccgccgccacggtgacctggcttaaggatggggtagagattaggagaagcaagcgtcacgagacggcgtctcagggagacacccacacactgacagttcacggggctcaggtcctggacagcgccatttattcttgcagggtgggtgcagagggccaagacttccccgtacaggtcgaggaggtagcagcaaaattctgcagactcctggaacctgtgtgcggcgagcttggcggcactgttaccctggcttgcgagctgagccccgcttgcgccgaggtagtgtggagatgtggaaacactcagctgcgggtcggcaagaggttccaaatggtcgcggagggaccagtccggagtctaaccgtgttgggccttcgggccgaggacgcgggagagtacgtttgtgagagtcgagatgatcacactagtgcccagctgaccgtgagcgttcccagggtcgtgaagtttatgtctggactctccactgtggtggccgaagagggcggcgaggccactttccagtgtgtagtctctccatcggatgtggcggtcgtatggtttcgtgatggcgcccttctacagcccagtgaaaagtttgccatctcacaaagcggagcgtctcattccctgaccatctcagatttagtgctggaggatgccggacaaatcactgtggaagcggagggggctagctctagtgccgccctccgcgtaagagaagcacctgttctgttcaagaagaaactggaaccacagactgttgaagaaagatcttctgttaccctggaagtagaactgacaaggccctggcctgaattaagatggacacggaacgcaacggctctcgcccccgggaaaaatgtggagattcacgctgagggagcacggcaccgcctggtccttcataacgttggctttgcggatagaggttttttcggctgcgaaacccccgacgataagacccaggccaagctcactgttgagatgaggcaagtgcgactcgtacgggggcttcaggccgtcgaggctagagagcaagggactgctactatggaggtacaactctcacatgccgacgtggacggtagctggacaagagatggtctgaggtttcagcagggccctacctgccatctggcagttcgggggcccatgcacactctcaccctgtcgggtctccggcccgaggatagcgggctgatggtattcaaagctgaaggggtgcacacatccgcccgacttgttgtcactgaactgcccgtgagcttcagtcgacctctccaggacgtagtcactacggagaaagaaaaggtaacacttgagtgtgaattaagtcggccaaacgttgacgttaggtggcttaaagatggcgtggaactgcgggccggtaagactatggccatcgctgctcagggggcatgccgctccttgacaatttatcggtgtgagtttgccgatcaaggagtatatgtctgcgatgcccacgacgcacagtcctcagctagcgttaaagtccagggccgtacatacaccctgatctatagaagggtgctcgccgaagacgcgggagaaatccaatttgtggccgagaacgccgagtctcgggctcagctgcgagttaaggagctccctgtgaccttagttcgaccactgcgtgataagatcgccatggaaaaacatcgcggcgtcttagaatgccaggtgagtagagctagcgcacaagttaggtggttcaaagggtcacaggagctccagccaggacccaagtacgagctggtgtcagacgggctgtaccgaaaactaattattagtgacgtacacgccgaagacgaggacacttacacgtgcgacgctggagacgtgaaaactagcgcccagtttttcgtggaggagcaaagtataactattgtgagagggctgcaggatgtgaccgtcatggaacccgctcccgcatggtttgaatgcgagacatccatccccagcgtgagaccacccaagtggttactgggtaagaccgtcctgcaggcgggaggtaacgtgggtttggagcaggaaggcacagtacacagactgatgctgagacgcacatgcagcactatgacgggaccagtgcactttacagtcgggaaatcccggagcagtgcccgtttggtggtcagtgatattccggtcgtcctgacacgccccctagagccaaagaccggcagagaacttcagtctgtggtgctctcctgcgactttagaccagcgcctaaagcagtgcaatggtataaggatgatacccccctcagtcctagcgagaaatttaagatgtcactagagggacagatggcagagctacgcatcctccgactgatgccagccgacgcaggcgtgtatcggtgccaggctggcagcgcccattccagcaccgaggtgacagtagaagcccgcgaagtgacagtaactggtcctcttcaggatgcggaggctacggaagagggctgggcgtcattcagttgtgaactgtcccatgaagacgaggaggttgagtggtcactgaatggcatgccactctacaacgactcttttcacgagataagccacaaagggcgtcgtcataccctcgtgctcaagtctatccagagggctgatgctggcatcgtgcgcgcgtcatcgttgaaggtctcaacaagcgcccgcttagaggtcagggtcaagccggtggtttttctgaaggccctggacgatcttagtgcagaggagcgcggcacactggcactccagtgcgaggtttccgacccggaagcgcatgttgtgtggaggaaggatggcgtgcagctgggaccatcagacaagtacgacttccttcacaccgccgggacacgcggtttagtggttcatgatgtgtctcccgaggacgctggcctgtatacatgccacgttggctccgaagagactagagccagagttagagtgcatgatttgcatgtgggcatcacgaagcggcttaaaacgatggaagtgttagagggagaaagctgcagttttgagtgcgtgctgtcccacgagtctgcaagcgatcccgccatgtggaccgtgggaggtaagaccgttggctcttcatctaggttccaggcgactagacaaggaaggaagtacattctagtggtgcgtgaggcagccccttcagacgctggagaggtggtattcagcgtgaggggactgacaagcaaggcgagtctcatagtgcgagagaggccagccgcaatcattaaaccattagaagatcaatgggtcgctccgggtgaggacgtggaattacgctgtgagcttagccgcgctggaacccctgtgcattggctcaaggatcggaaggctatcaggaaaagtcagaagtatgacgttgtatgtgaaggcacgatggcaatgctggtgatacggggagcttcccttaaagatgcaggagagtatacctgtgaagtggaggctagcaaaagtaccgcaagtctgcacgttgaggaaaaggcaaattgtttcacagaggagctgaccaatttgcaagtggaggagaaaggaacggctgtgttcacctgtaagactgagcaccctgcggcgaccgtcacctggagaaagggcctgctcgagctgcgggcttctgggaaacatcagccctctcaagaaggccttacgctcagactgacgatttccgcgctcgagaaggcggattctgatacctacacatgcgatattgggcaggctcagtctcgcgcccagcttctcgtgcaaggaaggagggtccacatcatcgaagatcttgaagacgtggacgtgcaggaaggtagctccgcaaccttcagatgcagaataagtccagcaaactacgagcctgtccactggtttctagacaagaccccccttcacgccaacgaactaaacgagatcgacgcccagcctggaggctaccacgtattaacactgaggcagctggcactcaaagattctggcactatctatttcgaggcgggcgaccaacgcgcctctgccgctctccgcgttactgagaaaccatcagtgttctctcgcgagctgacggatgctaccataaccgaaggggaggacttaacgctggtttgtgaaacttccacctgtgatattccagtgtgctggaccaaagatggcaagaccctgcgggggagtgcacgatgtcagttgtcccacgaaggacatagggcccagctgctgattactggggctacgctgcaggacagcggacgttataagtgtgaggcaggcggagcctgcagttcatccatcgttagggttcatgctaggcccgtcagattccaagaagcactgaaggacctggaagtcctcgagggaggggctgctacgctgaggtgtgtgttgagctctgtggccgctcctgtgaagtggtgctatggaaacaatgtactgcgccccggcgacaagtactccctgcgccaagagggagcgatgcttgaactggtagtccgtaatctcaggccacaggacagtggaaggtactcttgctccttcggcgaccaaaccacgtccgctactctgactgtaaccgccctccccgctcaatttatcggcaagctaaggaacaaggaggccaccgaaggggccacagccacgctgcgctgcgagttgagtaaggcagcgcctgtcgagtggagaaagggatcagaaacactgcgagacggagatcgctattgtctaagacaggatggcgcaatgtgtgagctgcagattcgcgggctcgctatggtggatgctgccgagtatagctgtgtttgtggcgaagagagaacctcggcaagtctgaccataagacctatgcccgcccacttcatcgggcggcttcgccaccaggagtccatcgaaggtgcaacagccaccttacgctgtgaactctctaaggcagcacccgtggagtggaggaagggccgcgaatcactccgggacggtgatcggcatagcttaagacaagacggcgccgtctgcgaactccagatatgtggattggctgtagccgatgctggcgagtactcctgtgtctgcggagaggagagaactagtgccacgctcactgtgaaagccctcccagcaaagttcactgaaggattacggaatgaggaggccgtggaaggcgcgacggctatgctttggtgcgaactgtccaaagtggcccctgtcgaatggcgtaaagggcctgaaaatcttcgcgacggggaccgctacatcctgaggcaggaaggtacacggtgtgagctgcagatttgtggcttggccatggctgacgccggggaatacctttgcgtgtgcggccaggagaggacatcggccacgctcacgataagagccctccccgctcggttcattgaagatgtgaaaaatcaggaggcaagagaaggggctaccgcggtgctccaatgcgagttgaacagcgccgcaccagtggagtggagaaaaggctcagagacacttcgcgatggtgatagatacagtctccgccaggacggtacaaaatgtgagcttcagatcagggggttggctatggccgacaccggagaatactcctgcgtctgcggccaagaacgcacgtctgcgatgctcacagtgagagccttgcctattaaatttactgagggacttcgcaatgaagaagcaacggagggggccactgccgtcctgcggtgcgagctctcgaaaatggcccccgttgaatggtggaaaggccacgagaccctgcgagatggtgatcgccattctctccggcaggatggcgctcggtgcgaactccagatcagaggcttggttgctgaggatgccggtgaatacctttgtatgtgcggtaaagagcgtacaagcgccatgctcacagtccgagcaatgccttccaaattcatcgaggggctgcgcaatgaagaagctacggaaggcgacacagccacactctggtgcgagctaagcaaggccgcgccagtcgagtggcgcaagggacatgagactttaagagatggcgaccgccactccttgaggcaggacggttccagatgcgaactccagattcgggggctggcagtggtggatgccggggaatattcatgtgtgtgcggccaagagcggacttccgccacactgaccgtgagagctttgcccgcccgttttatcgaagacgtgaagaaccaggaggctagagagggggcaactgccgtccttcagtgtgaactgtcaaaggcagctcccgtggagtggagaaaaggtagtgaaactctgagagggggcgaccggtattctctgcggcaggatggaacaaggtgcgagttgcagatacacggcttaagcgtcgcagatacaggcgagtatagctgtgtatgcggccaagaacgtactagcgctacactcactgtccgagctccccagccagtttttagggagcctctgcagagtctgcaggcagaggaaggctctacagctaccctgcagtgcgaactgtcagagcccacagcgaccgttgtctggagcaaaggcgggcttcagttgcaagctaatggtagacgcgagcctaggctccaggggtgtaccgctgaactcgtgctgcaggatctgcagagggaggacacaggcgaatatacatgcacatgtggtagccaggctacttctgccacgctaaccgtgaccgccgcacctgtcagattcctccgtgaactccaacaccaagaggtggacgagggcggcaccgctcacctgtgttgcgagctttcccgcgccggggccagcgtcgaatggcgtaaaggttccttacaattgtttccgtgcgccaagtaccaaatggtccaggacggggctgctgccgagctgcttgttaggggggtggagcaggaggacgccggggactatacctgcgatactggacatactcagagcatggcctcccttagtgtgagggtccctcgtcctaaattcaagaccaggctgcagtcccttgagcaagagactggggacattgcccgcctgtgctgtcagctgtcagacgccgagtccggcgccgtcgtgcagtggcttaaagagggtgttgaactccacgctggcccgaagtacgagatgcggtctcagggagcaaccagggagctgcttattcatcagctggaggcaaaagacacaggggagtacgcttgtgtgaccggcggacagaagactgccgccagcttaagggtaaccgaacccgaggtgacaatcgtccggggactcgtagacgccgaagtcacagctgatgaggacgttgaatttagctgtgaggtcagtagggctggcgcaactggcgtgcagtggtgtctgcaaggcctgcctctacagagcaacgaggtgactgaagtcgctgtgcgcgacgggcgtatccatacactccgcctgaaaggcgttaccccggaggacgcaggcaccgtgagttttcacctggggaatcatgctagctcagcccagctgactgtgcgcgctccagaagtaacaatccttgagcccctgcaggatgtacagttgtccgagggtcaggacgcatcctttcaatgcagactctcacgcgcttctggccaggaggcaagatgggcccttggaggtgtgcccttgcaggcaaacgagatgaacgatatcaccgtagaacagggaactttgcacctgctcacgttgcataaggtgaccttagaggacgctggcaccgtttcgttccatgtgggaacttgttcatcggaggcacagctgaaggtcactgcaaagaatactgtggtacgtggactggagaatgtcgaagccctggagggcggcgaagcactcttcgaatgtcagctatcccagcctgaagtggcagcacatacctggttgctggacgacgaaccagtccacacctcggaaaatgccgaagtcgtgttctttgagaacggtttaagacatctgctcctgctgaagaacttgaggccacaagatagctgccgggtaacttttctggcaggcgacatggtaacttccgcctttctgacagtgaggggctggagactggagatcttagaaccattgaagaatgcagccgttagagctggtgcgcaggcttgtttcacttgtacactcagcgaggcagttcctgtcggggaggcttcgtggtatattaatggggctgctgtgcaaccagatgacagcgactggactgtgaccgccgatggttcccaccatgctttgctacttcggagcgcccagccacatcatgctggagaagtcaccttcgcgtgtagagacgccgtagcctccgcccgcctaacagttttgggcctgcctgatccaccagaggacgcggaggttgtggctagatcaagccacaccgtgactctttcctgggcggccccaatgtcagatggaggtgggggactgtgtggataccgagtggaggtaaaggagggagcaaccggccaatggcgcctctgtcacgagctcgtcccaggacccgagtgtgtggtagacgggctcgcaccaggggaaacataccggttccgagtcgccgccgtgggtccagtgggagctggtgagcccgtccatctgcctcaaacagtgaggctcgctgagccacctaaaccagtgccccctcagccaagtgcacccgaatctcggcaggtggctgctggagaggatgtgtctctggaactggaggtcgtggcagaggcaggcgaggtgatatggcataaaggtatggaaagaatccaacccggaggtcggttcgaagttgtatcacagggacggcagcaaatgctggtgattaagggtttcacagccgaggatcagggtgagtaccactgcgggttggcccaaggatcgatctgtcccgccgctgcgacttttcaagtggccctgagtcccgcatccgtggatgaagctccacagcccagcctgccgccagaggctgctcaggagggcgacctgcacttgctctgggaagccttagccaggaagaggcgcatgtcccgagaaccaactctcgactccatcagcgagctcccagaggaggacggacgcagtcagcgcctacctcaagaggccgaggaggttgctccagatctgtcagagggttatagcacagctgacgaactggctagaacgggtgatgctgatctttcccacacttcctctgacgacgagagtagagctggcacacccagtctggttacatacctgaaaaaagccggcagaccaggtaccagtccacttgcctccaaagtgggcgcccctgccgcaccttcggtgaagccccaacaacagcaggaaccactggcagccgtgaggccacctctaggagaccttagcacaaaagacctgggagatccttcgatggacaaggctgccgtaaagattcaagcggcctttaaaggatataaggtgcggaaggaaatgaagcagcaggaaggcccaatgttttcccacacatttggtgacactgaagcgcaggtgggagatgcattaaggctagaatgtgtggtggctagcaaggccgatgtgcgcgccagatggctcaaagacggggtcgagttgacagatggacggcatcaccatattgaccagcttggagacgggacttgttctcttctgattaccggactggaccgtgcagatgctgggtgttatacatgccaggtgtctaacaaattcggtcaagtaactcactccgcatgcgtcgttgtcagtggcagcgagtcggaggccgaaagctcatcaggaggcgagctggacgatgcatttcggcgcgccgcccgaagattgcaccgcttatttcgcacaaagtctccggccgaagtctccgacgaggagctgtttctgtccgccgacgaagggcccgcggagcctgaagagccagcagattggcaaacttatagggaagatgagcatttcatttgcattaggttcgaggcgctgacggaagctaggcaggctgtcacaaggttccaggaaatgtttgccactctaggcattggtgtggagatcaaacttgttgaacaagggccacgaagagtcgaaatgtgtatctccaaagagaccccagcgcccgtagtccctcccgagccattgcctagcctgttgactagcgacgcagcaccagtgttcctgacagaactccagaatcaggaggttcaggatggctatcctgtaagctttgattgcgtggtaaccggccagcccatgccctccgtgagatggttcaaggacggaaagctgctcgaggaggatgatcattatatgatcaatgaggaccagcaggggggccatcaacttatcattacagcggtcgtccctgctgacatgggggtgtacaggtgtcttgccgaaaattccatgggagttagctctaccaaggctgaactgcgagtggatttaacctccacggattacgacaccgctgctgatgcaacggaaagctcatcatatttctccgcgcaaggctacctgtcttctcgagagcaggaggggaccgagtctaccacagacgaggggcagttgcctcaggtcgtggaagagttgagggatctccaggtagctcctggcactcgcctcgctaagtttcagttgaaagtgaaaggatacccggctccacggctctattggttcaaagatggacagcctctgacagcatccgctcacatcaggatgacagacaagaagatcttgcacactctcgagattatcagcgtaactcgagaggatagcggacagtacgccgcctatatcagcaatgccatgggcgcagcctactcaagtgcccggcttctggtcagagggccagacgaacccgaagagaaacccgcctctgacgttcatgagcaacttgtgcctccaagaatgctggaacgattcacccccaagaaggtgaagaaagggtctagcattactttttcagtcaaggtggagggcagacccgttcccacagttcattggctgcgcgaggaggcggaaaggggcgtgttatggatagggcctgacaccccaggctatacagttgcctcctcagcccagcagcactccctggtcctgcttgatgtgggtagacagcatcaggggacgtacacctgtattgcctcgaatgctgctgggcaggccctttgttccgctagcttacatgtgtccggcctccccaaggtagaggaacaagagaaggttaaagaagctttaatatccactttcttacagggcaccactcaggcgataagcgcccagggcctggaaactgctagcttcgctgaccttggcggacagcgcaaagaagagccccttgcagcgaaagaggccctagggcatctctctctcgcagaagtgggtaccgaagagtttttgcagaaactcacctctcagatcaccgagatggtatcagctaaaatcacgcaagccaaactgcaggtgcctgggggcgactccgatgaagacagcaagacacccagtgcctcaccccgccacggcaggtctcggccgagctcttctatccaggagtcctcatccgagtctgaagacggcgacgctagaggagagatctttgacatctacgttgtgactgcggattatctgcccttgggtgcagaacaggacgcgatcactctgcgcgagggacagtatgttgaagtcctcgacgccgcccacccccttaggtggctagttaggactaagcccacaaagtcatcgcccagcaggcaaggctgggtgtctcccgcatatctagacagacggctaaagctgtctccagaatggggagccgcggaagcccccgagtttccaggagaagctgtttctgaggatgagtacaaagcccgcttgtcgagcgtcattcaggaactcctcagctccgagcaggcatttgtggaagagctgcagttcctccagagccaccacctgcaacacctggaaagatgcccgcatgttccaatcgctgtggcggggcagaaggcagtcattttcaggaatgtgcgtgacattgggcggttccacagttcattcctccaagaactccaacagtgtgatacagacgacgacgtcgcgatgtgtttcatcaaaaatcaggctgcatttgagcaatatcttgaattccttgtaggccgagtccaagcagaatctgtggtcgtaagcacggctatccaggaattctacaaaaagtacgcagaggaggcacttctggctggcgacccttctcagcctccaccaccccccctgcagcattacctggagcagccagtcgaaagggtacagaggtatcaggccctcctcaaagaattgatccggaataaagcacggaatagacagaattgtgcgctgttagagcaagcctacgctgtggtgagcgcgttgccccaacgggcggagaacaagctgcatgtgagcctgatggaaaattatcctggcacactccaggcactaggggagccaattagacaggggcacttcattgtgtgggagggcgcccccggggctcgcatgccctggaaaggtcataatagacacgtgttcctctttcgcaatcacctggtgatctgcaaaccccgtcgcgattcgaggactgatacagtgagctacgttttcaggaatatgatgaagctgtccagcattgatctcaatgatcaagtggaaggagatgaccgggcttttgaggtttggcaggaaagagaagactcagtccggaaatatctgctccaagcgaggacagcgattattaagtcatcctgggtgaaagagatctgtgggatccagcagcggctggcactgccagtatggagacctcctgacttcgaagaagaactggcagactgtacagctgaacttggcgaaacagttaaactagcatgccgggtcactggcacccccaagccagtgattagttggtataaggatggaaaggctgtgcaggtggatccccaccacatcctgatcgaagaccccgacggctcatgcgcgctcatcttggactccctcactggcgtcgactctggccagtacatgtgttttgcagcttccgccgccggcaactgctccacactcggaaagatcctagtgcaggtccccccgcgatttgtgaataaggtgcgggccagtccctttgtagagggagaagatgcgcagttcacttgcacaattgagggcgctccctatccacagattagatggtacaaggacggcgccttgttgaccactggaaataagtttcagacactgtccgagccccgttccggcttgcttgtgctggttattagagcagcgtccaaagaggatctgggcctgtacgagtgcgagctggttaaccggttagggagcgcacgagccagcgccgaactgcggattcaaagcccaatgttacaggcacaggaacaatgccatcgagaacagctggtcgctgcagtcgaagacacaactttggagcgtgccgatcaagaagtaacttctgtactcaaaaggcttcttggacctaaagccccggggccaagcactggagacctgaccggaccaggaccttgccctcggggtgcccctgctttacaggaaaccggctcccagcctccggttaccggtacctccgaagcaccggccgttccacctagagtcccccagccactgctccacgagggaccggagcaggaacccgaagcaatagcgcgcgcgcaggagtggacagttcctataaggatggagggtgctgcatggcccggggctggcacgggcgaattactgtgggatgtgcatagtcacgtcgtgcgggagaccacccagcgtacttatacctatcaggccatagacacacacactgctcgccccccaagcatgcaggtgactattgaagacgtccaggcacagactggcgggacagctcagttcgaagcgataatcgagggcgacccgcaaccatccgtcacttggtacaaggacagcgtccagctggtggattcaacccgcctctcacaacagcaagaaggaaccacctattcacttgtattgagacacgtggcttccaaggacgccggagtctatacctgtttggcccaaaatacggggggccaggtgctctgtaaggctgaactgctggttttgggaggggacaacgagcccgactcagagaagcaatcccatcgacgtaagctacattccttttacgaggtaaaagaggaaatcgggcggggagtcttcgggtttgtgaagcgcgtgcagcacaaaggcaacaagattctctgtgccgcgaaatttattcctctcaggagcaggacccgggcccaggcctaccgtgagagagacattttagcggcactttcacatccgctggtgactggcctgttagaccagttcgagaccagaaagacactgattcttatactggagctttgtagtagtgaggagctgctggataggctttatcgcaagggcgtcgtaaccgaggccgaggtcaaggtgtatattcagcagctggttgaaggactgcactatcttcattcccacggggtcctgcatctcgatatcaaaccttccaacatcctgatggtgcaccccgctagagaagatattaaaatttgcgactttggttttgcccagaacatcacaccagcagaattgcagttcagtcagtatggctcccctgagttcgtgagtcctgaaatcatacagcagaatcccgtaagcgaggcgagtgatatttgggcgatgggcgtaatatcttacctttcgttaacatgctcctccccgttcgcaggtgaatccgacagagcaacgcttctcaacgttctggaaggccgcgtgagctggagttcccccatggccgcccacttgagtgaggacgccaaagactttatcaaggcgactcttcagagagccccacaagcccgaccctctgccgcacaatgcctgagccacccatggtttctgaaatcaatgcctgctgaggaggcccacttcataaataccaaacagctcaaattccttctcgccagaagtcggtggcaacggtctctgatgagctacaagtcgattttggtaatgagatctattcctgagctgctgagaggaccacccgattctccctcactgggagtcgcccggcatctctgtagggatacgggcggatcctcttcctcttcttcctcctccgataacgaactcgctccgttcgcgcgagcaaagagccttcccccgtccccagtcacacactctccgttactgcacccaagaggttttcttcgcccgtccgcatccttgcccgaggaggctgaggccagcgagcgcagcaccgaagctcctgctccacctgcttcccctgaaggcgcaggcccaccagcagctcaagggtgcgtgcctcggcactctgttatccgatctttgttttaccatcaagccggagaatcccctgagcatggggccctggcgcctggctcacgacgccacccagcacggagacgacatcttctgaaaggggggtatatagctggggcccttccaggcctgcgggagccactaatggagcaccgcgtcctggaagaggaggcagcccgggaggagcaggcgactcttcttgcgaaagcaccttcatttgagacagcacttcgtctcccagcttcgggaactcacctcgcccctggccactctcactctttagagcacgatagccccagcactcccagaccttcctctgaggcctgtggagaggctcagaggctgccaagcgccccttcaggcggcgcccccattcgcgacatgggccacccacagggcagtaaacagctgccttcaaccggtggccatcccgggactgcccagccagagcggcctagtcctgacagtccttggggtcaacccgcccccttctgccatcctaagcagggaagtgcaccgcaagagggttgctctccacaccccgccgtagccccctgtccgccaggctctttcccccctggatcttgtaaagaggcacctttggtaccttcttcccctttcctgggacaaccgcaggccccgccagcacctgcaaaagcttccccaccactggatagcaagatgggccccggcgatatatcccttcccggtcgccccaaacctggcccttgctcatcacctggcagtgcgtcacaggcatccagcagtcaggtgagttcattgagagttggaagttcccaggttggtacagagcctggcccgagcttggatgccgaagggtggactcaagaggcagaggatttatctgacagcacgcccacactccagagaccacaagagcaggccactatgcgcaagttctccctcggcggaagggggggatatgccggcgtggcaggatatggaacattcgcgtttggtggtgatgcgggtggaatgttaggacaaggccctatgtgggcacggattgcatgggctgtgagtcaatccgaagaggaagagcaagaggaggcccgtgcagagtcacagtccgaggaacagcaggaagctcgcgccgaatctcctctgcctcaggtgagcgccagaccagttcccgaggtggggagggctcctacccggtccagtcctgagccgacaccctgggaggatattggacaggtcagtctggtacagattcgagaccttagcggagacgctgaggccgccgacaccatatctctggatatctccgaagttgaccctgcgtacctgaacctgtcagatctgtacgatatcaaatatttgccatttgagttcatgatatttcgaaaagtccccaagtccgcgcagcccgagcctccatctcccatggcagaagaggaattagcagaattcccagagcccacttggccatggcccggcgaactcggaccacatgctggactggagattacagaagagagcgaagatgtggacgccctgctggcagaggcagcggtgggtcgcaagcgtaagtggtcatctccctcacggtcactcttccactttccaggtagacatctcccactggacgaacccgctgagctcgggctgcgcgagcgagtgaaagctagcgttgagcacatttcccgcattctcaaaggcagacccgagggcttggaaaaggaaggaccaccccggaaaaagcctggcttagccagcttcaggttatcgggtctgaagagttgggaccgcgcccctacatttctgcgggagctgtctgatgagaccgtggtacttggccagtcggtgacactggcttgtcaagtgagcgcgcagcccgcagcacaggcaacatggtcaaaggacggcgcaccactagaaagcagctccagagttcttatctccgcaactttaaagaacttccagctgcttacaattttggtcgttgtggccgaagatctaggggtctacacctgctctgtaagcaatgccctgggtactgtgaccaccaccggggtgctacgcaaagccgagaggcctagcagcagcccatgtccagatattggtgaagtgtacgcagatggcgtgttactggtttggaaacccgtggagagctatgggcctgtgacttacattgtccaatgctctctcgaggggggctcctggaccactttagctagcgacatctttgattgttgctatttgacaagcaagctatctagaggcggaacttacaccttccgaactgcgtgcgtgagcaaagctggtatgggaccctacagcagcccttcggagcaagtcctcctggggggcccaagccatttggcctcagaggaagagtcccagggacgctcagcccagcccttaccatctacaaagacttttgccttccaaacccaaattcagcggggtcgattctccgtcgtacgtcagtgctgggaaaaagcctcggggcgtgccctggctgcaaaaattataccctatcaccccaaggataagactgcagttctccgagagtacgaggcgctaaaaggattgaggcacccacacctggcccagttgcatgccgcatatcttagtccaagacatctcgtgttaatcctcgagctgtgcagcggacccgagctcctaccctgcttggccgaaagggccagttattctgagtccgaggttaaagattacctttggcaaatgctttccgctacccaataccttcacaaccagcacattctgcacctggatctccggtctgaaaatatgatcatcaccgagtacaaccttctcaaggtggtggacctagggaacgcccagtcactcagccaggagaaggtgctgccctccgataagttcaaagattacctggaaacaatggctccggagcttctggaggggcaaggcgccgttccgcagaccgatatctgggcaatcggggtcacagccttcattatgctgagtgcagaatacccagtgagctcagagggtgctcgtgacctgcagcgcgggctgagaaagggactcgtcagactgagccggtgctacgctggcctgagcggcggggctgtggcgtttctgaggtctacgctttgtgcccagccctggggccggccctgcgcgagctcctgcctgcagtgtccctggctaaccgaagagggacctgcttgctcccggcctgcccccgtgacgtttccgacagccaggctgagagtcttcgtgcggaatagggaaaagagacgcgccctgctttataagcgccataacttagcccaggtgaggtag

SEQ ID NO: 39329 - DNA, 24030 bp, Artificial Sequence
  derived and/or modified sequence
gctgcccagagcccccatagagagaggtccccgccgccaccctcatggatcagccacagttcagcggggcgccccgctttctcacccggcccaaggccttcgtggtgtcggtgggcaaggacgccaccctcagctgccagatcgtgggtaatcccacgccacaggtgagctgggagaaggaccagcagccggtggcggccggcgcgcgcttccgtctggcccaggacggcgacctctaccgcctcactatcctggacctggcgctgggcgacagtgggcaatacgtgtgccgcgcgcgcaatgccataggcgaggccttcgctgctgtgggcctgcaggtggacgcggaggccgcgtgcgccgagcaggcgccgcacttcctgctgcggcccacgtccatccgcgtgcgcgagggctcagaggccaccttccgctgccgcgtgggtggctccccgaggccggcagtgagctggtccaaggacgggcggcgcctgggtgagcccgacggcccccgcgtgcgcgtggaggagctcggcgaggcaagtgcgctgcgcattcgggcggcgcggccgcgcgacggcggcacttacgaggtccgcgccgagaacccgctgggcgctgccagcgccgccgcggcgctagtggtggactcggacgccgcggacacggccagccggcccgggacctccacggccgcgctcctggcgcacctgcagcggcggcgcgaggctatgcgcgccgagggcgcccccgcctcaccgcccagcaccggcacgcgcacctgcacggtgactgaaggcaagcacgcgcgcctcagctgctacgtgaccggcgagcccaagcccgagacggtgtggaagaaggacggccagctggtgaccgagggccggcgccacgtggtgtacgaggacgcgcaggagaacttcgtgctcaagatcctcttctgcaagcagtcggaccgcggcctctacacctgcacggcgtccaacctcgtgggccagacctacagctctgtgctggtcgtagtgcgcgagcccgcggttcccttcaaaaagcggctgcaagatctggaggtgcgggagaaggagtcggccacgttcctatgtgaggtgccccagccgtccactgaggccgcgtggttcaaggaggagacgcggttgtgggcgagcgccaagtacggcatcgaggaggagggcaccgagcgccgcctgaccgtgcgcaatgtctcggccgacgacgacgcggtgtacatctgcgagacgccagagggcagccgcacggtggcggagctcgcagtccaaggaaacctcctccgaaagctccctcggaagacggcggtgcgcgtgggcgacacggctatgttttgcgtggagctggcggtcccggtgggccccgtccactggctgcggaaccaggaggaagtggtggcggggggccgcgtggccatctccgcggagggcacgcgccacacactaaccatctcccagtgctgcctggaggatgtgggccaggtggcctttatggctggcgactgccagacgtccacccagttctgcgtgtcggcccccaggaagcctcccctgcaaccccctgtggatcctgtggtaaaggccaggatggagagttccgtgattctcagctggtccccaccaccccatggggaacgccctgtcactatcgacggctacctggtagagaagaagaagcttggcacctacacctggatcaggtgccacgaggctgaatgggtggctacacctgagctgaccgtggctgatgtggcggaggaggggaacttccagttccgagtgtccgctctcaacagctttggtcagagtccctacctcgagttcccggggactgtccacctggcccccaagctggccgtgaggacaccgctgaaggcggtgcaggcggtagagggtggcgaggtcactttctccgtggacctcacggtggcctcagcgggtgagtggttcctggatgggcaggccctgaaggccagcagtgtgtatgagatccactgtgatcgcacccggcacacgctcaccatccgggaggtgcccgccagcctgcacggggcgcagctgaagttcgtggccaacggcattgagagcagcatccggatggaggtccgggcggccccagggctgactgccaacaagccgccagccgcagctgcccgggaggtgctggctcggctgcacgaggaggcgcagctgctggctgagctgtcagatcaggctgcggctgtgacgtggctgaaggatggtcgcacactgtccccaggccccaagtatgaggtgcaggcatcggccgggcggcgggtgctccttgtgcgagatgtggcccgggacgatgcaggcctctacgagtgcgtcagccgcgggggccgcatcgcctaccagctctccgtgcaaggcctcgcgcgctttctgcacaaggacatggcgggcagctgtgtggatgccgtggctgggggcccggcgcagtttgagtgtgagacctccgaagcccacgtccacgtgcactggtacaaggatggcatggagctgggccactccggtgagcgcttcttgcaggaggatgtggggacgcggcaccggctggtggcagccacagtcaccaggcaggatgaaggcacctactcctgccgcgtgggcgaggactctgtggacttccggctccgcgtctctgagcccaaggtggtgtttgctaaggagcagctggcacgcaggaagctgcaggcagaggcaggagccagtgccacactgagctgcgaggtggcccaggcccagacggaggtgacgtggtacaaggatgggaagaagctgagctccagctcgaaagtgtgcatggaggccacaggctgcacgcgcaggctggttgtgcagcaggcaggccaggcggatgccggggagtatagctgcgaggctgggggccagcggctctccttccatctggatgtcaaagagcccaaggtggtgtttgccaaggaccaggtggcacacagtgaggtgcaggctgaggcaggggccagtgccacgctgagctgcgaggtggcccaggcccagacggaggtgatgtggtacaaagatgggaagaagctgagctccagcttgaaagtgcatgtagaggccaagggctgcagacggaggctggtggtgcagcaggcaggcaagacagatgccggggactacagctgcgaggccaggggccagagggtctccttccgcctgcacatcacagagcccaagatgatgtttgcaaaggagcagtcagtgcataatgaggtgcaggctgaggcgggggccagtgccatgctgagctgtgaggtggcccaggcccagacggaggtgacgtggtacaaggatgggaagaagctgagctccagctcaaaagtgggcatggaggtcaaagggtgcacacggaggctggtgctgccacaggcgggcaaagcagatgctggggagtacagctgtgaggctgggggccagagagtctccttccacctgcacatcacagagcccaagggggtgtttgcgaaggagcagtcagtgcataatgaggtgcaggctgaggcggggaccactgccatgctgagctgtgaggtggcccagccccagacagaggtgacgtggtacaaggacgggaagaagctgagctccagctcaaaagtacgcatggaggtcaagggctgcacacgaaggctggtagtgcagcaggtgggcaaagcagatgctggggagtacagctgcgaggctgggggccagagagtctcctttcaactgcacatcacagagcccaaggcagtgtttgccaaggagcagttggtgcataatgaggtgcggactgaggcaggggccagtgccacactgagctgtgaggtggcccaggcccagacagaggtgacgtggtacaaggatgggaagaagctgagctccagttcgaaagtgcgcatagaggctgcgggctgcatgcggcagctggtggtgcagcaggcaggccaggcagatgctggggagtacacctgtgaggctgggggccagcggctctccttccacctggatgtttcagagcccaaggcggtgtttgcaaaggagcagctggcacacaggaaggtgcaggccgaggcgggggccattgccacgctgagctgcgaggtggcccaggcccagacagaggtgacgtggtacaaggacgggaagaagctgagctccagctcgaaagttcgaatggaggctgtgggctgcacacggaggctggtggtgcagcaggcatgccaggcggacaccggggagtatagctgcgaggccgggggccagcggctctccttcagcctggacgtggcagagcccaaggtggtgtttgccaaggagcagccagtgcacagggaggtgcaggcccaggcgggggccagcaccacactcagctgcgaggtggctcaggcccagacggaggtgatgtggtacaaggacgggaagaagctgagcttcagctcgaaagtgcgcatggaggctgtgggctgcacacggaggctggtggtgcagcaggcgggccaggcggtcgccggggagtacagctgcgaggcggggagccagcggctctccttccacctgcacgtggcagagcccaaggcggtgtttgccaaggagcagccagcgagcagggaggtgcaggctgaggcggggaccagtgccacgctgagctgcgaggtggcccaggcccagacagaggtgacgtggtacaaggacgggaagaaactgagctccagctcgaaagtgcgaatggaggccgtgggctgcacacggaggctggtggtgcaggaggcaggccaggcggacgccggggagtacagctgcaaggccggggatcagcggctgtccttccacctgcacgtggcagagcccaaggtggtgtttgccaaggagcagccagcacacagggaggtgcaggctgaggcgggggccagtgccacgctgagctgcgaggtggcccaggcccagacagaggtgacgtggtacaaggatgggaagaagctgagttccagctcgaaagtgcgcgtggaggccgtgggctgcacacggaggctggtggtgcagcaggcgggccaggcagaggccggggagtacagctgcgaggcagggggtcagcagctctccttccgcctgcaggtggcagagctggagccccaaatttcagagagaccctgccgcagggagcctctggtggtcaaggagcatgaagacatcatcctgaccgccacactggccacaccctctgcggccacggtgacctggctcaaggatggtgtggagattcgccgcagcaagcggcatgagacagccagccagggggacacccacaccctgaccgtgcatggcgcccaggttctggacagcgccatctacagctgccgtgtgggcgcagaggggcaggacttcccagtgcaggtggaagaggtggccgccaagttctgccggctgctggagcctgtgtgcggcgagctgggtggcacggtgacactggcctgcgagctaagcccagcgtgtgcagaggtggtgtggcgctgcggcaacacgcagcttcgggtgggcaagcgcttccagatggtggccgaggggcccgtgcgctcactcactgtgttggggctgcgcgcagaggacgcaggggagtacgtgtgtgagagccgtgatgaccacaccagtgcgcagctcaccgtcagtgtgccccgagtggtgaagtttatgtctgggctgagcaccgtggtcgcagaggagggcggcgaggccaccttccagtgcgtggtgtcccccagtgatgtggcagtcgtgtggttccgggacggtgccctgcttcagcccagcgagaagtttgccatatcacagagtggcgccagccacagcctgaccatctcagacctggtgctggaggacgcgggccagatcaccgtggaggctgagggcgcctcatcctctgctgccctgagggtccgagaggcgcctgtgctgttcaaaaagaagctggagccgcagacggtggaggagcggagctcggtgaccctggaggtggagctgacgcggccgtggccggagctgaggtggacacggaacgcgacggccctggcgccgggaaagaacgtggagatccacgccgagggcgcccgccaccgcctggttctgcacaacgtaggttttgccgaccgtggcttctttggctgcgagacgccggatgacaagacacaggccaaactcaccgtggagatgcgccaggtacggctcgtacggggcctgcaggcagtggaggcacgggagcagggcacggctaccatggaggtgcagctgtcgcatgcggacgtggatggcagctggactcgtgacggtctgcggttccagcaggggcccacgtgccacctggctgtgcggggccccatgcacaccctcacactctcggggctgcggccagaggatagtggccttatggtcttcaaggccgaaggagtgcacacgtcggcgcggctcgtggtcaccgagcttcccgtgagcttcagccgcccgctgcaggacgtggtgaccactgagaaggagaaggttaccctggagtgcgagctgtcgcgtcctaatgtggatgtgcgctggctgaaggacggtgtggagctgcgggcaggcaagacgatggccatcgcagcccagggcgcctgcaggagcctcaccatttaccggtgcgagttcgcggatcagggagtgtatgtgtgtgatgcccatgatgcccagagctctgcctccgtgaaggtacaaggaaggacatacactctcatctaccggagagtcctggcggaagatgcaggagagatccaatttgtagccgaaaatgcagaatcgcgagcccagctccgagtgaaggagctgccagtgaccctcgtgcgcccgctgcgggacaagattgccatggagaagcaccgcggtgtgctggagtgtcaggtgtcccgggccagcgcccaggtgcggtggttcaagggcagtcaggagctgcagcccgggcccaagtacgagctggtcagtgatggcctctaccgcaagctgatcatcagtgatgtccacgcagaggacgaggacacctacacctgtgacgccggtgatgtcaagaccagtgcacagttcttcgtggaagagcaatccatcaccattgtgcggggtctgcaggacgtgacagtgatggagcccgctcctgcctggtttgagtgtgagacctccatcccctcagtgcggccacctaagtggctcctggggaagacggtgttgcaggctggggggaacgtgggcctggagcaggagggcacggtgcaccggctgatgctgcggcggacctgctccaccatgaccgggcccgtgcacttcaccgttggcaagtcgcgctcctctgcccgcctggtggtctcagacatccccgtagtcctcacacggccgttggagcccaagacagggcgtgagctgcagtcagtggtcctgtcctgcgacttccggccagcccccaaggctgtgcagtggtacaaggatgacacgcccctgtctccctctgagaagtttaagatgagcctggagggtcagatggctgagctgcgcatcctccggctcatgcctgctgatgctggtgtctaccggtgccaggcgggcagtgcccacagcagcactgaggtcactgtggaagcgcgggaggtgacagtgacagggccgctacaggatgcagaggccacggaggagggctgggccagcttctcctgtgagctgtcccacgaggatgaggaggtcgagtggtcgctcaacgggatgcccctgtacaacgacagcttccatgagatctcacacaagggccggcgccacacgctggtactgaagagcatccagcgggctgatgcgggcatagtacgcgcctcctccctgaaggtgtcgacctctgcccgcctggaggtccgagtgaagccggtggtgttcctgaaggcgctggatgacctgtccgcagaggagcgcggcaccctggccctgcagtgtgaagtctctgaccccgaggcccatgtggtgtggcgcaaagatggcgtgcagctgggccccagtgacaagtatgacttcctgcacacggcgggcacgcgggggctcgtggtgcatgacgtgagccctgaagacgccggcctgtacacctgccacgtgggctccgaggagacccgggcccgggtccgcgtgcacgatctgcacgtgggcatcaccaagaggctgaagacaatggaggtgctggaaggggaaagctgcagctttgagtgcgtcctgtcccacgagagtgccagcgacccggccatgtggacagtcggtgggaagacagtgggcagctccagccgcttccaggccacacgtcagggccgaaaatacatcctggtggtccgggaggctgcaccaagtgatgccggggaggtggtcttctctgtgcggggcctcacctccaaggcctcactcattgtcagagagaggccggccgccatcatcaagcccctggaagaccagtgggtggcgccaggggaggacgtggagctgcgctgtgagctgtcacgggcgggaacgcccgtgcactggctgaaggacaggaaggccatccgcaagagccagaagtatgatgtggtctgcgagggcacgatggccatgctggtcatccgcggggcctcgctcaaggacgcgggcgagtacacgtgtgaggtggaggcttccaagagcacagccagcctccatgtggaagaaaaagcaaactgcttcacagaggagctgaccaatctgcaggtggaggagaaaggcacagctgtgttcacgtgcaagacggagcaccccgcggccacagtgacctggcgcaagggcctcttggagctacgggcctcagggaagcaccagcccagccaggagggcctgaccctgcggctcaccatcagtgccctggagaaggcagacagcgacacctatacctgcgacattggccaggcccagtcccgggcccagctcctagtgcaaggccggagagtgcacatcatcgaggacctggaggatgtggatgtgcaggagggctcctcggccaccttccgttgccggatctccccggccaactacgagcctgtgcactggttcctggacaagacacccctgcatgccaacgagctcaatgagatcgatgcccagcccgggggctaccacgtgctgaccctgcggcagctggcgctcaaggactcgggcaccatctactttgaggcgggtgaccagcgggcctcggccgccctgcgggtcactgagaagccaagcgtcttctcccgggagctcacagatgccaccatcacagagggtgaggacttgaccctggtgtgcgagaccagcacctgcgacattcctgtgtgctggaccaaggatgggaagaccctgcgggggtctgcccggtgccagctgagccatgagggccaccgggcccagctgctcatcactggggccaccctgcaggacagtggacgctacaagtgtgaggctgggggcgcctgcagcagctccattgtcagggtgcatgcgcggccagtgcggttccaggaggccctgaaggacctggaggtgctggagggtggtgctgccacactgcgctgtgtgctgtcatctgtggctgcgcccgtgaagtggtgctatggaaacaacgtcctgaggccaggtgacaaatacagcctacgccaggagggtgccatgctggagctggtggtccggaacctccggccgcaggacagcgggcggtactcatgctccttcggggaccagactacttctgccaccctcacagtgactgccctgcctgcccagttcatcgggaaactgagaaacaaggaggccacagaaggggccacggccacgctgcggtgtgagctgagcaaggcagcccctgtggagtggagaaaggggtccgagaccctcagagatggggacagatactgtctgaggcaggacggggccatgtgtgagctgcagatccgtggcctggccatggtggatgccgcggagtactcgtgtgtgtgtggagaggagaggacctcagcctcactcaccatcaggcccatgcctgcccacttcataggaagactgagacaccaagagagcatagaaggggccacagccacgctgcggtgtgagctgagcaaggcggcccccgtggagtggaggaaggggcgtgagagcctcagagatggggacagacatagcctgaggcaggacggggctgtgtgcgagctgcagatctgtggcctggctgtggcagatgctggggagtactcctgtgtgtgtggggaggagaggacctctgccactctcaccgtgaaggccctgccagccaagttcacagagggtctgaggaatgaagaggccgtggaaggggccacagccatgttgtggtgtgaactgagcaaggtggcccctgtggagtggaggaaggggcccgagaacctcagagatggggacagatacatcctgaggcaggaggggaccaggtgtgagctgcagatctgtggcctggccatggcggacgccggggagtacttgtgtgtgtgcgggcaggagaggacctcagccacgctcaccatcagggctctgcctgccaggttcatagaagatgtgaaaaaccaggaggccagagaaggggccacagctgtgctgcagtgtgagctgaacagtgcagcccctgtggagtggagaaaggggtctgagacccttagagatggggacagatacagcctgaggcaggacgggactaaatgtgagctgcagattcgtggcctggccatggcagacactggggagtactcgtgcgtgtgcgggcaggagaggacctcggctatgctcaccgtcagggctctacccatcaagttcacagagggtctgaggaacgaagaggccacagaaggggcaacagccgtgctgcggtgtgagctgagcaagatggcccccgtggagtggtggaaggggcatgagaccctcagagatggagacagacacagcctgaggcaggacggggccaggtgtgagctgcagatccgcggcctcgtggcagaggacgctggggagtacctgtgcatgtgcgggaaggagaggacctcagccatgctcaccgtcagggccatgccttccaagttcatagagggtctgaggaatgaagaggccacagaaggggacacggccacgctgtggtgtgagctgagcaaggcggcaccggtggagtggaggaaggggcatgagaccctcagagatggggacagacacagcctgaggcaggacgggtccaggtgtgagctgcagatccgtggcctggctgtggtggatgccggggagtactcgtgtgtgtgcgggcaggagaggacctcagccacactcactgtcagggccctgcctgccagattcatagaagatgtgaaaaaccaggaggccagagaaggggccacggccgtgctgcaatgtgagctgagcaaggcggcccccgtggagtggaggaaggggtctgagaccctcagaggtggggacagatacagcctgaggcaggatgggaccagatgtgagctgcagattcatggcctgtctgtggcagacactggggagtactcgtgtgtgtgcgggcaggagaggacctcggccacactcaccgtcagggccccacagccagtgttccgggagccgctgcagagtctgcaggcggaggagggctccacggccaccctgcagtgtgagctgtctgagcccactgctacagtggtctggagcaagggtggcctgcagctgcaggccaatgggcgccgggagccacggcttcagggctgcaccgcggagctggtgttacaggacctacaacgtgaagacactggcgaatacacttgcacctgtggctcccaggccaccagtgccaccctcactgtcacagctgcgcctgtgcggttcctccgagagctgcagcaccaggaggtggatgagggaggcaccgcacacttatgctgcgagctgagccgggcgggtgcgagcgtggagtggcgcaagggctccctacagctcttcccttgtgccaagtaccagatggtgcaggatggtgcagctgcagagctgctggtacgcggagtggagcaggaggatgcgggtgactacacgtgtgacacgggccacacgcagagcatggccagcctctctgtccgtgtccccaggcccaagttcaagacccggcttcagagtctggagcaggagacaggtgacatagcccggctgtgctgtcagctgagtgatgcagagtcgggggccgtggtgcaatggctcaaggagggcgtggagctgcatgcgggccccaagtacgagatgcggagccagggggccacgcgggagctgctgatccaccaactggaggccaaggacacgggcgagtatgcctgtgtgacaggcggccagaaaaccgctgcctccctcagggtcacagagcctgaggtgaccattgtacgggggctggttgatgcggaggtgacggccgatgaggatgttgagttcagctgtgaggtgtccagggctggagccacaggcgtgcagtggtgcctacagggcctgccactgcaaagcaatgaggtgacagaggtggctgtgcgggatggccgcatccacaccctgcggctgaagggcgtgacgcccgaggacgctggcactgtctccttccatttgggaaaccatgcttcctctgcccagctcaccgtcagagctcctgaggtgaccatcctggagcccctgcaggacgtgcagctcagtgagggccaggatgccagcttccagtgccggctatccagagcttcaggccaggaggcccgctgggctttaggaggggtgcccctgcaggccaacgagatgaatgacatcactgtggagcagggcacactccacctgctcaccctgcacaaggtgacccttgaggatgctggaactgtcagtttccacgtgggcacgtgtagctctgaggcccagctgaaagtcacagccaagaacacggtggtgcgggggctggagaatgtggaggcgctggagggcggcgaggcgctgttcgagtgccagctgtcccagcccgaggtggccgcccacacctggctgctggacgacgaacccgtgcacacctcggagaacgccgaggtggtcttcttcgagaacggcctgcgccacctgctgctgctcaaaaacttgcggccacaagacagctgccgggtgaccttcctggctggggatatggtgacgtccgcattcctcacggtccgaggctggcgcctggagatcctggagcctctgaaaaacgcggcggtccgggccggcgcacaggcatgcttcacctgcacgctcagcgaggcggtgcccgtgggagaggcgtcctggtacatcaatggcgcggcagtgcagccggatgacagcgactggactgtcaccgccgacggcagtcaccacgccctactgctgcgcagcgcccagccccaccacgccggggaggtcaccttcgcttgccgcgacgccgtggcctctgcgcggctcaccgtgctgggcctccctgatcccccagaggatgctgaggtggtggctcgcagcagccacactgtgacactgtcttgggcagctcccatgagtgatggaggcggtggtctctgtggctaccgcgtggaggtgaaggagggggccacaggccagtggcggctgtgccacgagctggtgcctggacccgagtgtgtggtggatggcctggcccccggggagacctaccgcttccgtgtggcagctgtgggccctgtgggtgctggggaaccggttcacctgccccagacagtgcggcttgcagagccaccgaagcctgtgcctccccagccctcagcccctgagagccggcaggtggcagctggtgaagatgtctctctggagcttgaggtggtggctgaggctggtgaggtcatctggcacaagggaatggagcgcatccagcccggtgggcggttcgaggtggtctcccagggtcggcaacagatgctggtgatcaagggcttcacggcagaagaccagggcgagtaccactgtggcctggctcagggctccatctgccctgcggctgccaccttccaggtggcactgagcccagcctctgtggatgaggcccctcagcccagcttgccccccgaggcagcccaggagggtgacctgcacctactgtgggaggccctggctcggaaacgtcgcatgagccgtgagcccacgctggactccattagcgagctgccagaggaggacggccgctcgcagcgcctgccacaggaggcagaggaggtggcacctgatctctctgaaggctactccacggccgatgagctggcccgcactggagatgctgacctctcacacaccagctctgatgatgagtcccgggcaggcaccccttccctggtcacctacctcaagaaggctgggaggccaggcacctcaccactggccagcaaggttggggccccagcagccccctctgtgaagccacagcagcagcaggagccactggctgctgtgcgcccaccactgggagacctgagcaccaaagacctgggtgatccctcaatggacaaggcagctgtgaagatccaggctgcctttaagggctacaaggtccggaaggagatgaagcagcaggaagggcccatgttctcccacacatttggggacaccgaggcacaggtgggggatgccctgcggctggagtgtgtcgtggccagcaaggcagatgtgcgagcccgctggctgaaggatggtgtggagctgaccgatgggcggcaccatcacatcgaccagcttggggatggcacctgctctctgctgatcactggcctggaccgtgctgatgctggctgctacacctgtcaggtgagcaacaagtttggccaggtgacccacagtgcctgtgtggtggtcagtgggtcagagagtgaagccgagagctcctctgggggtgagctggacgatgccttccgccgggctgcccgtcggctgcaccggctcttccgcaccaaaagtccggctgaagtttcagatgaggagctcttcctgagtgcagacgagggccctgcagagccagaggagcccgcggactggcagacataccgcgaagatgagcatttcatctgcatccgttttgaggcgctcactgaggcccgccaggcggtaactcgcttccaggagatgtttgccacactgggcattggggtggagatcaagctggtggaacaggggcctcggagggtagagatgtgcatcagcaaagagactcctgcccctgtggtgcctccagagccattgcccagcctactgacttctgacgctgccccagtgttcctgactgagttgcagaaccaagaagtgcaggatgggtatcctgtgagctttgactgcgtggtgacaggtcagcccatgcccagtgtgcgctggttcaaggatgggaagttgttggaggaggatgatcactacatgattaatgaagaccaacagggtggccatcagctcatcatcacagccgtggtgccagcagacatgggcgtctaccgctgcctggccgagaacagcatgggtgtctcctccaccaaggctgagctccgtgtggacttgacaagcacagactatgacactgcagcagatgccacggagtcctcatcctacttcagtgcccaaggctacctgtccagccgggagcaggagggaacagagtccaccactgatgagggccagctgccccaggtggtggaggagctgagagacctccaggtggcccctggcacacgcctggccaagttccagctcaaggtgaaaggctaccctgctcccagattatactggttcaaagatggccagcccctgaccgcatctgcccacatccgcatgactgacaagaagatcctgcacaccctggagatcatctccgtcacccgggaggactctggccagtatgcagcctatatcagcaatgccatgggtgctgcctactcgtctgcccggctgctggttcgaggccctgatgagccagaagagaagcctgcatcagatgtgcatgagcagctggtgccgccccgaatgctggagaggttcacccccaagaaagtgaagaaaggctccagcatcaccttctctgtgaaggtagaaggacgcccggtgcccaccgtgcactggctcagggaggaggctgagagaggcgtgctgtggattggccctgacacaccgggctacaccgtggccagctctgcgcagcagcacagcctggtcctgctggacgtgggccggcagcaccagggcacctacacatgcattgccagcaacgctgccggccaggccctctgctccgccagcctgcacgtctcgggcctgcctaaggtggaggagcaggagaaagtgaaggaagcgctgatttccactttcctgcaggggaccacacaagccatctcagcacaggggttggaaactgcgagttttgctgaccttggtgggcagaggaaagaagagcctctggctgccaaggaggccctcggccacctgtccctcgctgaggtgggcacagaggagttcctgcagaaactgacctcccagatcactgagatggtatcggccaagatcacgcaggccaagctgcaggtgcccggaggtgacagtgatgaggactccaagacaccatctgcatccccccgccatggccgatcacggccatcctccagcatccaggagtcttcctcagagtcagaggacggcgatgcccgaggcgagatctttgacatctacgtggtcaccgctgactacctgcccctaggggctgagcaggatgccatcacgctgcgggaaggccagtatgtggaggtcctggatgcagcccacccactgcgctggcttgtccgcaccaagcccaccaagtccagcccctcacggcagggctgggtgtcaccagcctacctggacaggaggctcaagctgtcacctgagtggggggccgctgaggcccctgagttccctggggaggctgtgtctgaagacgaatacaaggcaaggctgagctctgtgatccaggagctgctgagttctgagcaggccttcgtggaggagctgcagttcctgcagagccaccacctgcagcacctggagcgctgcccccacgtgcccatagctgtggccggccagaaggcagtcatcttccgcaatgtgcgggacatcggccgcttccacagcagcttcctgcaggagttgcagcagtgcgacacggacgacgacgtggccatgtgcttcatcaagaaccaggcggcctttgagcagtacctggagttcctggtggggcgtgtgcaggctgagtcggtggtcgtcagcacggccatccaggagttctacaagaaatacgcggaggaggccctgttggcaggggacccctctcagcccccgccaccacctctgcagcactacctggagcagccagtggagcgggtgcagcgctaccaggccttgctgaaggagctgatccgcaacaaggcgcggaacagacagaactgcgcgctgctggagcaggcctatgccgtggtgtctgccctgccacagcgcgctgagaacaagctgcacgtgtccctcatggagaactacccaggcaccctgcaggccctgggcgagcccatccgccagggccacttcatcgtgtgggagggtgcaccgggggcccgcatgccctggaagggccacaaccgtcacgtgttcctcttccgcaaccacctggtaatctgcaagccccggcgagactcccgcaccgataccgtcagctacgtgttccggaacatgatgaagctgagcagcatcgacctgaacgaccaggtggagggggatgaccgcgccttcgaggtgtggcaggagcgggaggactcggtgcgcaagtacctgctgcaggcacggacagccattatcaagagctcgtgggtgaaggagatctgtggcatccagcagcgtctggccctgcctgtgtggcggcccccggactttgaagaggagctggccgactgcacagccgagctgggtgagacagtcaagctggcctgccgcgtgacgggcacacccaagcctgtcatcagctggtacaaagatgggaaagcagtgcaggtggacccccaccacatcctcattgaagaccctgatggctcgtgtgcactcatcctggacagcctgaccggtgtggactctggccagtacatgtgcttcgcggccagcgccgctggcaactgcagtaccctgggcaagatcctggtgcaagtcccaccacggttcgtgaacaaggtccgggcctcaccctttgtggagggagaggacgcccagttcacctgcaccatcgaaggcgccccgtacccgcagatcaggtggtacaaggacggggccctgctgaccactggcaacaagttccagacactgagtgagcctcgcagcggcctgctagtgctggtgatccgggcggccagcaaggaggacctggggctctacgagtgtgagctggtgaaccggctgggctccgcgcgggctagtgcggagctgcgcattcagagccccatgctgcaggcccaggagcagtgtcacagggagcagctcgtggctgcagtggaagacaccaccctggagcgagcggaccaggaggtcacatctgtcctgaagagactgctgggccccaaggcgccaggcccctccacaggggacctcactggccctggcccctgccccaggggggcacccgcactccaggaaaccggctcccagcccccagtcaccggaacttcggaggcacctgccgtgcccccgagggtgccacagcccctcctccacgaaggcccagagcaggagccggaggccattgccagagcccaggaatggactgtgcccattcggatggagggtgcagcctggcccggggcaggcacaggggagctgctctgggacgtccacagccacgtggtcagagagaccacacagaggacctacacataccaggccatcgacacgcacaccgcacggcccccatccatgcaggtaaccatcgaggatgtgcaggcacagacaggcggaacggcccaattcgaggctatcattgagggcgacccacagccctcggtgacctggtacaaggacagcgtccagctggtggacagcacccggcttagccagcagcaagaaggcaccacatactccctggtgctgaggcatgtggcctcgaaggatgccggcgtttacacctgcctggcccaaaacactggtggccaggtgctctgcaaggcagagctgctggtgcttgggggggacaatgagccggactcagagaagcaaagccaccggaggaagctgcactccttctatgaggtcaaggaggagattggaaggggcgtgtttggcttcgtaaaaagagtgcagcacaaaggaaacaagatcttgtgcgctgccaagttcatccccctacggagcagaactcgggcccaggcatacagggagcgagacatcctggccgcgctgagccacccgctggtcacggggctgctggaccagtttgagacccgcaagaccctcatcctcatcctggagctgtgctcatccgaggagctgctggaccgcctgtacaggaagggcgtggtgacggaggccgaggtcaaggtctacatccagcagctggtggaggggctgcactacctgcacagccatggcgttctccacctggacataaagccctctaacatcctgatggtgcatcctgcccgggaagacattaaaatctgcgactttggctttgcccagaacatcaccccagcagagctgcagttcagccagtacggctcccctgagttcgtctcccccgagatcatccagcagaaccctgtgagcgaagcctccgacatttgggccatgggtgtcatctcctacctcagcctgacctgctcatccccatttgccggcgagagtgaccgtgccaccctcctgaacgtcctggaggggcgcgtgtcatggagcagccccatggctgcccacctcagcgaagacgccaaagacttcatcaaggctacgctgcagagagcccctcaggcccggcctagtgcggcccagtgcctctcccacccctggttcctgaaatccatgcctgcggaggaggcccacttcatcaacaccaagcagctcaagttcctcctggcccgaagtcgctggcagcgttccctgatgagctacaagtccatcctggtgatgcgctccatccctgagctgctgcggggcccacccgacagcccctccctcggcgtagcccggcacctctgcagggacactggtggctcctccagttcctcctcctcctctgacaacgagctcgccccatttgcccgggctaagtcactgccaccctccccggtgacacactcaccactgctgcacccccggggcttcctgcggccctcggccagcctgcctgaggaagccgaggccagtgagcgctccaccgaggccccagctccgcctgcatctcccgagggtgccgggccaccggccgcccagggctgcgtgccccggcacagcgtcatccgcagcctgttctaccaccaggcgggtgagagccctgagcacggggccctggccccggggagcaggcggcacccggcccggcggcggcacctgctgaagggcgggtacattgcgggggcgctgccaggcctgcgcgagccactgatggagcaccgcgtgctggaggaggaggccgccagggaggagcaggccaccctcctggccaaagccccctcattcgagactgccctccggctgcctgcctctggcacccacttggcccctggccacagccactccctggaacatgactctccgagcaccccccgcccctcctcggaggcctgcggtgaggcacagcgactgccttcagccccctccgggggggcccctatcagggacatggggcaccctcagggctccaagcagcttccatccactggtggccacccaggcactgctcagccagagaggccatccccggacagcccttgggggcagccagcccctttctgccaccccaagcagggttctgccccccaggagggctgcagcccccacccagcagttgccccatgccctcctggctccttccctccaggatcttgcaaagaggcccccttagtaccctcaagccccttcttgggacagccccaggcaccccctgcccctgccaaagcaagccccccattggactctaagatggggcctggagacatctctcttcctgggaggccaaaacccggcccctgcagttccccagggtcagcctcccaggcgagctcttcccaagtgagctccctcagggtgggctcctcccaggtgggcacagagcctggcccctccctggatgcggagggctggacccaggaggctgaggatctgtccgactccacacccaccttgcagcggcctcaggaacaggcgaccatgcgcaagttctccctgggtggtcgcgggggctacgcaggcgtggctggctatggcacctttgcctttggtggagatgcagggggcatgctggggcaggggcccatgtgggccaggatagcctgggctgtgtcccagtcagaggaggaggagcaggaggaggccagggctgagtcccagtcggaggagcagcaggaggccagggctgagagcccactgccccaggtcagtgcaaggcctgtgcctgaggtcggcagggctcccaccaggagctctccagagcccaccccatgggaggacatcgggcaggtctccctggtgcagatccgggacctgtcaggtgatgcggaggcggccgacacaatatccctggacatttccgaggtggaccccgcctacctcaacctctcagacctgtacgatatcaagtacctcccattcgagtttatgatcttcaggaaagtccccaagtccgctcagccagagccgccctcccccatggctgaggaggagctggccgagttcccggagcccacgtggccctggccaggtgaactgggcccccacgcaggcctggagatcacagaggagtcagaggatgtggacgcgctgctggcagaggctgccgtgggcaggaagcgcaagtggtcctcgccgtcacgcagcctcttccacttccctgggaggcacctgccgctggatgagcctgcagagctggggctgcgtgagagagtgaaggcctccgtggagcacatctcccggatcctgaagggcaggccggaaggtctggagaaggaggggccccccaggaagaagccaggccttgcttccttccggctctcaggtctgaagagctgggaccgagcgccgacattcctaagggagctctcagatgagactgtggtcctgggccagtcagtgacactggcctgccaggtgtcagcccagccagctgcccaggccacctggagcaaagacggagcccccctggagagcagcagccgtgtcctcatctctgccaccctcaagaacttccagcttctgaccatcctggtggtggtggctgaggacctgggtgtgtacacctgcagcgtgagcaatgcgctggggacagtgaccaccacgggcgtcctccggaaggcagagcgcccctcatcttcgccatgcccggatatcggggaggtgtacgcggatggggtgctgctggtctggaagcccgtggaatcctacggccctgtgacctacattgtgcagtgcagcctagaaggcggcagctggaccacactggcctccgacatctttgactgctgctacctgaccagcaagctctcccggggtggcacctacaccttccgcacggcatgtgtcagcaaggcaggaatgggtccctacagcagcccctcggagcaagtcctcctgggagggcccagccacctggcctctgaggaggagagccaggggcggtcagcccaacccctgcccagcacaaagaccttcgcattccagacacagatccagaggggccgcttcagcgtggtgcggcaatgctgggagaaggccagcgggcgggcgctggccgccaagatcatcccctaccaccccaaggacaagacagcagtgctgcgcgaatacgaggccctcaagggcctgcgccacccgcacctggcccagctgcacgcagcctacctcagcccccggcacctggtgctcatcttggagctgtgctctgggcccgagctgctcccctgcctggccgagagggcctcctactcagaatccgaggtgaaggactacctgtggcagatgttgagtgccacccagtacctgcacaaccagcacatcctgcacctggacctgaggtccgagaacatgatcatcaccgaatacaacctgctcaaggtcgtggacctgggcaatgcacagagcctcagccaggagaaggtgctgccctcagacaagttcaaggactacctagagaccatggctccagagctcctggagggccagggggctgttccacagacagacatctgggccatcggtgtgacagccttcatcatgctgagcgccgagtacccggtgagcagcgagggtgcacgcgacctgcagagaggactgcgcaaggggctggtccggctgagccgctgctacgcggggctgtccgggggcgccgtggccttcctgcgcagcactctgtgcgcccagccctggggccggccctgcgcgtccagctgcctgcagtgcccgtggctaacagaggagggcccggcctgttcgcggcccgcgcccgtgaccttccctaccgcgcggctgcgcgtcttcgtgcgcaatcgcgagaagagacgcgcgctgctgtacaagaggcacaacctggcccaggtgcgctgagggtcgccccggccacacccttggtctccccgctgggggtcgctgcagacgcgccaataaaaacgcacagccgggcgag

SEQ ID NO: 39330 - DNA, 23907 bp, Artificial Sequence
  derived and/or modified sequence
atggatcagccccagtttagcggtgcgcctagattcctgaccaggcccaaggcattcgtagtgtctgttgggaaggacgctactctctcctgtcaaattgtgggtaaccccacccctcaagtctcctgggagaaggaccaacaaccagtcgccgctggcgctcgctttcggctagcgcaagacggtgacttatatcggctgacgattctggaccttgctctgggagatagcggccagtacgtgtgcagagccaggaacgccatcggtgaggcttttgccgcagttggtctgcaggttgacgctgaagccgcatgcgctgagcaggcccctcatttcctcctcagaccaacgtccatacgggtgagggaggggagcgaagccactttcagatgccgtgtggggggaagccctcgcccagcagtgtcctggtccaaggatgggaggagactaggagagcccgatggcccaagagtgcgcgtggaggagctgggtgaggccagcgccctgagaattcgtgcagcacgccctcgagatggcggtacatacgaggttcgagcggaaaatcccctgggtgccgcttcggcggctgcagcactcgttgtggactctgacgcagctgacaccgcttcccgccctggcacaagtacagccgcactgctggcccacctccagagacgacgcgaggctatgagggccgagggagcccctgcctcgcccccttccaccggtactcgcacatgtacagtgactgagggcaaacacgcacggttgtcttgctacgtaactggtgagccgaagcctgagacagtctggaaaaaggacgggcagctcgtgaccgaaggcaggaggcacgtggtgtacgaggacgcacaggagaatttcgtcctgaagattctgttttgtaaacagtctgaccgcggactctacacctgtacagcctctaacctcgtgggtcagacatattcctctgtcctggtggtcgtcagggagccagcggtcccattcaagaaacgcttgcaggatctggaggttagggaaaaggagtcagccacttttctctgtgaggtgccccagccttccaccgaggccgcatggttcaaagaagaaacaagactttgggcctcagccaaatatggcatcgaagaggaaggcactgagcgcagacttacagtgcggaatgtcagtgccgatgacgacgctgtctacatttgcgaaaccccagaaggcagccggaccgtggctgagcttgcagtgcagggcaatctgctccgcaagctgcctagaaaaactgcagtcagagtcggagacacggccatgttttgcgtagagttagccgtgccagtggggccagtccattggctgcgtaatcaggaggaggtcgtggccggaggtcgggtggcgatttctgcggaggggactcgtcacacactcactattagccaatgctgtcttgaggatgtgggacaggtggcctttatggcaggcgactgtcagacctccacacagttttgcgtctctgcccctagaaaacctcccctgcagcctccagtcgacccagtggtcaaggccaggatggagtcatcggtcattctgtcttggtctcctcccccacacggagaaagaccggtgactatcgatggctacttggtcgagaaaaaaaaattgggcacctatacctggatccgatgccatgaggcagagtgggtggccacaccggagcttacggtggccgatgtcgccgaagaaggcaatttccagtttagagtgtctgccctcaacagctttggccagtctccctacttagagttccccggaaccgttcacctggctccgaagctggctgtgcgtacccccttgaaggcagttcaggcagtggagggaggagaggtgactttctccgtggacctaacagtggcctcagcgggtgaatggtttcttgatgggcaggcacttaaggcaagctcagtatacgagattcattgcgacaggacacggcataccctgaccattcgggaggtgccagcctctcttcacggcgctcagctgaagttcgtggcgaatgggattgagtcaagcatccgcatggaagttcgtgcggctcccggtctgacggctaacaagccacctgctgccgctgctcgagaagttttggcacgcctgcatgaagaagcccagctcttggcggaactgagtgaccaagctgccgcagtgacgtggctaaaagacggtaggaccctgagcccaggtcctaagtatgaagtgcaggccagcgcgggtcgccgagtcttactcgttcgcgacgtagccagagacgatgctggcctgtatgagtgcgtgagcaggggcggtagaatcgcctaccaactgtcggttcaaggcctagcaagattcttacataaggacatggccggttcatgtgtcgacgctgttgcaggtggccctgcccagtttgagtgtgaaacaagtgaggcgcacgtccatgtgcactggtacaaggacggcatggaacttggacactccggcgagaggttcctccaggaagatgtgggaacccggcaccggctagtggcagccacagtgactcgccaagacgaggggacatactcgtgtcgcgtgggcgaggacagtgtggatttcagactgagagtttcagagccgaaggttgttttcgcgaaagaacaactggctaggcgcaaacttcaggctgaggcaggcgctagtgcaacactgagttgtgaggtcgcccaggcacaaactgaggtcacttggtacaaagacggtaaaaagctgtcatccagctccaaagtgtgtatggaggcaactgggtgtacccgcagattggtggttcaacaggccggacaagctgacgctggggaatactcctgtgaggccggagggcagcgccttagcttccacctagatgtcaaagagcctaaagttgttttcgctaaagatcaggtcgcgcactccgaggtgcaggcggaagccggagcaagtgccacgctgagctgtgaggtggcacaagcacaaaccgaggtcatgtggtataaagacggcaagaagcttagcagtagtctaaaagtacacgtcgaagctaagggatgtaggagacggctggtggtgcagcaagcaggtaagacagacgcgggtgactacagctgcgaggcccgagggcaacgggttagctttcgcctccatattaccgaacccaaaatgatgttcgccaaagagcagagcgtacataacgaggtgcaggctgaagcaggcgcaagcgccatgctttcctgcgaagtggcccaggcccaaaccgaagtgacatggtataaggatggcaagaaactgtcctcatcaagtaaggtggggatggaagtcaaggggtgcaccagaaggctggtgctcccgcaggccggtaaagccgacgccggagaatattcttgtgaggctggcggtcaacgcgtgtcgtttcatctgcatataactgaacctaaaggcgtgtttgcaaaagagcagtctgtgcacaacgaggtgcaggccgaggccggaaccaccgctatgctcagctgtgaagtggcccagccccagaccgaagtcacatggtataaagacgggaagaaactgagctcctctagcaaggtccgaatggaagtaaaggggtgcaccaggcgcctcgttgttcagcaggttgggaaggctgacgcaggagaatattcgtgcgaggcgggaggccaacgggtgtctttccagctgcacattactgagcctaaagccgtgtttgcgaaagagcagctggtccacaacgaggttcggaccgaggcaggcgcttcagctactctgtcttgtgaggtggctcaggctcagacagaggtgacttggtataaagacggtaaaaaactaagttcttcttccaaagtcaggatcgaggccgctggctgtatgcgccagctcgtggtgcaacaagcaggccaggcggacgccggtgagtatacgtgtgaggctggcggacagcggctgtccttccacctcgacgtgagtgagccaaaggccgtgttcgccaaggaacaacttgcacaccgcaaggttcaagccgaagccggagccatcgctacattgtcttgtgaggtggctcaagcccaaacagaggtaacctggtacaaagacggcaagaagcttagcagctcttccaaggtcaggatggaagctgttggctgtacccggcgactcgtcgttcagcaagcctgtcaagctgacacaggcgagtactcttgtgaagccggagggcagcggctgagcttctccctggacgtggcagagcccaaagtggtcttcgcgaaagaacagccagtacaccgggaagtgcaagcccaggcaggagcaagcacgacactgtcgtgtgaggtcgcacaggcacagacagaggtaatgtggtataaggacggaaagaaactcagctttagcagcaaggtcaggatggaggctgtcgggtgtacccgccgactagtggtacagcaggcaggccaagctgtggccggtgagtatagttgtgaggccggttcacagaggctctcttttcacctgcacgtggctgaacctaaggcggtgtttgccaaggaacagcccgcatcccgagaggtccaagctgaggcagggacttctgccaccctctcttgtgaagtggcgcaagcacagacagaggttacttggtataaggacggcaaaaagttaagtagctccagtaaggtgcggatggaggccgtcgggtgcacgagacgactcgttgttcaggaggccggacaggcagacgctggcgaatactcctgcaaagctggggatcaacggctgagtttccacttacatgttgcagaaccaaaggtcgtcttcgccaaggagcagccagcccacagagaggtgcaggcagaggccggtgccagcgcaaccttatcttgtgaggtcgcccaggctcagaccgaagtcacatggtacaaggacggcaaaaaactgagctcatcaagtaaggtgcgagtcgaggctgtgggctgcacgcgaagactggtcgtgcagcaagccggacaggccgaggccggagaatatagctgcgaggccggaggccagcagctctcgttccggttgcaggtagctgagttggagccccaaatatcagagagaccatgccgccgagagccactcgtggtcaaggagcacgaggatattattctgaccgcgacccttgcaactccttccgccgcaactgtgacgtggcttaaggacggagtcgagatacggaggtccaaacgacatgaaacggcatcacaaggggacacacataccctgaccgttcacggcgctcaggtacttgattccgccatctacagttgccgcgtaggagctgaagggcaggattttcccgtgcaagtggaggaagttgccgcaaagttctgccgccttctggaacccgtgtgcggagagttggggggtactgtcaccctcgcatgcgaattgagtcccgcatgtgcagaagtagtgtggcgatgtggaaatactcagctccgcgtgggcaaaaggtttcaaatggtagcggagggaccagttaggagccttacagtgctggggcttagagctgaagatgcaggcgaatatgtgtgcgagtccagggatgatcacacatcggcccagctcactgtcagcgtacctcgggttgtgaagttcatgtccggcctttccacagtcgtagccgaggagggaggagaggctaccttccagtgcgtcgtttcaccatccgatgtcgcggtcgtgtggttccgggacggcgcactactacagccttcagagaagtttgcaatctcacagagtggagctagccattcattgacaatcagcgatcttgtgcttgaagatgctggccagattactgtggaagctgagggcgcttctagttccgctgctctccgggttcgagaagctccagtattgttcaagaaaaaactggagccacaaaccgtggaggaacgcagttccgttacactggaagtagagctgacaagaccatggccggaactaaggtggactagaaatgccactgcattagcccctggaaagaatgtcgagatccatgccgaaggtgcgagacacaggctggtactacataacgttgggtttgccgatcgtggatttttcggatgtgagactcccgacgataaaacacaggccaagctgactgtggagatgagacaggttcgcttggtgagaggactccaggccgtcgaggcgagagagcagggaactgccaccatggaggtgcagctcagccatgcggatgtcgacgggtcttggaccagagacggcctgcgcttccagcaaggtcccacatgccacctcgctgtgcgaggacctatgcatacactgacactttccgggctgcgccctgaagattcgggtcttatggtcttcaaggctgaaggggtccacacgtccgccagactggtcgtgaccgagctgcctgtctcattttcccggcctctgcaggacgtcgttactactgagaaagagaaagttacgctggaatgtgagttgtcacgacctaacgtggacgtgcgatggctgaaagacggggtcgagttaagggctggaaaaacaatggcaatcgctgcacagggagcatgtagatccctcacaatctatagatgcgagttcgccgaccagggagtgtacgtctgcgatgctcacgatgcccagagttccgcttctgtgaaagtgcaaggacggacctacactttgatctacaggagggtgctggctgaggatgccggagagattcagtttgtcgcagaaaatgccgaatctagagcgcaactgagggttaaagaactgcccgttaccttggtccgaccattgcgggataagattgccatggaaaaacacagaggggttctggaatgccaagtcagtagagccagtgcgcaggtgagatggttcaagggatcgcaggaactgcaaccagggcctaaatatgagctggtatccgacggactatataggaaactgatcatcagcgatgttcatgccgaagacgaggacacatacacttgtgatgccggagacgtcaaaacttccgctcagttcttcgtggaggagcagtccatcaccatcgtcaggggactccaagatgtaaccgtgatggagcctgcgccagcatggtttgaatgtgagacatctattccctcggttcgccctcccaagtggttgcttgggaaaaccgtgttacaagcaggcggtaacgtcgggctcgaacaagaaggcaccgtgcaccggttgatgcttaggagaacttgcagtactatgaccggtccggtccacttcaccgtcgggaaaagtcgaagctccgctaggttagtggtgtctgatattccagttgtgctgacgcgacccctggagcccaagactgggagagaacttcagtccgtggtgctgtcttgtgactttcgcccagccccaaaggccgtgcagtggtacaaagatgacacgccccttagcccttccgaaaagtttaaaatgtccctcgaaggccagatggctgagctgcgaattctgcggttgatgccagctgatgctggagtctatcggtgccaagcgggaagcgcacacagctcaacagaagtgactgttgaagcgcgagaggttactgtgacaggtccactccaagatgcagaggcaaccgaagaggggtgggccagcttcagctgcgagctgagccacgaagacgaggaagtggagtggtcactgaacggcatgccactgtataacgacagctttcacgaaatctctcataagggcagacgtcataccctggtcctgaagtcaatccagagggccgacgcagggattgtgcgagccagtagtctgaaggtgtccacctccgcgagacttgaagtgcgggttaaacctgttgtatttcttaaggcactggatgacctttcagccgaggagcggggaaccctcgccctgcagtgcgaagtgagtgaccctgaagcacatgttgtgtggagaaaggatggagtccagctgggcccatctgataagtacgatttcctgcacactgccggtacacgcggtctggtggttcatgatgtgagcccagaggacgccggactgtatacttgccacgtgggaagcgaagagactcgcgcacgcgtgcgggttcacgacctgcacgtaggcatcactaaacgactgaaaacaatggaggtgctggagggagaaagttgctctttcgaatgcgttctcagccacgagagtgccagtgatcccgctatgtggactgttggcggtaagaccgtagggagctcttcacgctttcaagcaacgcgacaaggccgtaagtacattttggtggtaagggaggccgcaccatccgatgccggtgaagtagtgtttagcgtgcggggtttgaccagtaaggcaagccttattgtgagggaaagaccggctgctataatcaagccgctggaggatcagtgggtcgctccgggtgaagacgtcgagttgcgctgtgaactgtctcgtgcaggcaccccagtacactggctcaaggataggaaggccattagaaaatctcagaaatacgatgtggtttgtgagggtacaatggccatgctcgttataagaggagcttccctcaaggatgccggagaatacacctgcgaggtggaagcctcaaagtcgacagcaagtctgcacgtcgaagagaaggccaactgttttactgaagaattgaccaaccttcaggtggaagagaaggggacagcagtatttacttgcaaaaccgagcatccagctgctacagtgacatggcggaagggcctgctggagctgcgggcaagcggaaaacaccagcctagccaggaaggcctgaccctgcggctcaccatttcggctctcgagaaggctgacagcgacacttatacttgcgatatcggtcaggcccagtcccgcgctcagctacttgttcagggccgtcgcgtgcacataattgaagatctggaagatgtggacgtgcaagaaggatctagcgctacgtttagatgcagaatttctcctgccaattatgaacccgtacactggtttcttgataaaaccccattgcacgctaacgagctaaacgaaatagatgctcaaccaggcggatatcatgtgctgacactaagacagctagccctgaaagacagcggtaccatctacttcgaagcaggcgatcagcgggcatctgccgcactaagggtgacagaaaagccctcagttttttctcgagagttgactgatgccaccatcactgaaggagaggacttaacccttgtgtgcgagactagtacttgcgacatacctgtctgctggaccaaagacggaaagacgctgcgtggcagcgccagatgccagctctcgcacgaggggcacagggcccaactgcttataacaggggcaacactgcaggatagtggtagatataagtgtgaggcaggaggtgcatgctcatcttctattgtgagggtccatgccaggccagtaagatttcaggaggcactgaaagacctggaggtccttgaaggcggtgctgctacactgcgttgcgtcctatcatccgtcgcagctcctgtcaagtggtgttacggaaataacgtgctgcggccaggcgataaatactcactccgacaagagggcgctatgctagagttggtcgttagaaatttgcgtccacaggactcgggacgctattcttgtagctttggcgatcagaccacgtcagcaaccctaaccgtcacagctttacctgcccagttcatcggcaaactacgaaataaagaggcgacagaaggcgcaacagccaccctgcgctgcgaactgtccaaggccgctccagtggagtggcggaaaggctcagagacccttagagacggggaccgctattgccttagacaggacggagccatgtgtgagctgcagatcagaggtctcgctatggttgatgcggcagagtactcttgcgtgtgcggggaggagcggacaagcgcctccctcactatccgacccatgccggcacatttcattggaaggttgagacaccaagagtccattgagggcgctacagctacgctgcgttgcgaactgtctaaggcagcaccggtggagtggaggaaggggcgtgaaagcctgcgtgacggggacagacactctctgagacaagatggcgctgtgtgcgagctgcaaatctgcggcttagctgttgccgatgcaggggaatacagctgcgtgtgcggagaggagcggacttccgccacactgacagtaaaagctcttcctgcaaaattcacagagggactgcggaatgaagaagccgtggagggcgcaaccgcgatgctttggtgcgagttgtctaaagtagcgcctgtcgaatggcgaaagggcccagagaaccttcgcgacggggatcgctacattctgcgacaggaaggcacccggtgcgagcttcagatatgcggcttggctatggccgacgcaggcgaatatctctgtgtctgcgggcaagaacggacatcagctacgctgaccatccgcgctctgcctgctaggttcattgaagatgtgaagaatcaggaagcccgagaaggtgccactgccgtgctacagtgcgaactgaattcagctgcccctgtagaatggcgcaagggttcggagacactccgcgatggtgacaggtatagcttgcgccaggacggcacgaaatgtgaacttcaaatccgaggcctggctatggccgatacaggggagtattcctgtgtgtgcggccaagaacgtaccagtgctatgctgaccgtccgagcgctgcccatcaagtttacagagggcttaaggaacgaagaggccacagaaggagctactgccgtgcttagatgtgagctgagtaaaatggctcctgtggaatggtggaagggtcacgagacactgcgagatggggataggcatagcctgaggcaagatggcgcacgatgtgagctgcagatcagagggctcgtcgcggaggacgccggtgaatatctgtgtatgtgcggaaaagagcgaacgagcgcgatgcttactgttcgtgccatgccctcaaagtttattgaggggctcagaaacgaggaggccacagagggagatacggcaactctctggtgtgaactgagtaaggctgccccagttgaatggagaaaggggcacgagacgctcagggacggggacagacactctctccggcaagacggaagccgatgtgagctgcagatccgtggtctggccgttgtcgatgcgggagagtactcttgcgtgtgtggccaagagaggacatctgcaacgctcacagtgcgcgctctccccgctaggtttattgaagacgtgaaaaatcaggaggctagggagggggctacagccgtgctccagtgcgagctgtccaaggccgcacctgtagagtggcggaaaggctcagagactctacggggaggcgacagatactccttgagacaggatggcaccaggtgcgaattacagatacacggcctaagtgtggctgataccggggaatactcatgtgtttgtggacaggagcggacaagtgccaccctcacagttcgggctccccagccggtcttccgggaaccactccagagtcttcaggccgaagaaggctcaaccgctacccttcagtgtgaattgtccgagcctactgccaccgtcgtgtggtccaaaggcggactccagttgcaggcaaacggccgtcgcgagcctcggctccagggatgcactgccgagcttgtccttcaagatctgcaacgagaggacaccggagagtacacgtgtacatgcggatctcaggcaacttctgccactctgactgtaaccgccgcacccgtacgctttctaagggagctacagcaccaggaggtcgatgagggtggcactgctcatttgtgctgcgagctcagtagagctggtgcttctgttgaatggagaaaaggcagcctgcagctgttcccgtgcgccaaatatcaaatggtccaagatggagccgctgcggaacttcttgttagaggtgtggagcaggaggacgccggtgactacacttgcgacacaggacacacccaaagtatggctagtctgtccgtaagagtgccacgcccaaagtttaaaacccgcttgcaaagtctggaacaggaaactggcgatatcgcacgcctctgctgccagttgtcagatgctgaatcgggcgcagtggtgcagtggctgaaagaaggtgtggagctgcacgctgggcctaaatacgagatgcgaagtcaaggagctaccagggaacttcttattcaccaactggaagctaaggatacgggagagtacgcctgtgttaccggtgggcagaaaactgccgcatcgctgagagtgacagagcctgaggtcacgatagtcaggggactcgtcgacgcagaagtgaccgctgatgaggacgtagaattcagttgcgaggtgtccagagccggtgccaccggcgtgcagtggtgtcttcagggattaccgctgcagagcaatgaggtgacagaagtcgcagttagagacggcaggatacatactctgcgattaaagggcgtgactccagaagacgccggaactgtgtctttccacttgggcaatcacgccagttccgctcagctaacagtgcgcgcacccgaagtcaccatcctggagccactccaggatgttcagctcagcgagggtcaggacgcgtcattccagtgcagattgagtagggccagcgggcaggaggctcgttgggctctcggcggagtgcctttgcaggctaacgagatgaatgacatcaccgtagagcagggaacgttacaccttctgaccctgcacaaggttaccctcgaggacgcgggtacagtcagcttccacgtgggaacctgctcatcggaagcacagctgaaggtaacagccaagaataccgtggtgcggggactcgagaatgtcgaagctttggaaggcggagaagctctctttgaatgtcagctctcacagcctgaggtcgcagcccacacctggctactggatgacgagcccgtgcatacatctgagaatgccgaagtggttttctttgagaacggtctcagacatctgcttctgttgaagaacctccgtccccaggatagctgccgcgttacatttttagccggtgatatggtcacatctgcgttcctgaccgtccgcggttggcgtctggagatccttgagccgctgaagaatgccgctgtgcgagctggggctcaggcctgcttcacttgcaccctaagcgaagcagtgcccgtgggtgaggcatcttggtatatcaacggcgctgccgtccagcccgacgattccgattggacagtgaccgcagacggatcacaccatgccctgcttttgcggagcgcccaaccacaccacgcaggagaggtcacctttgcttgccgagacgctgtcgcatcagctcggctcacagttcttggcctcccagatccacccgaggatgcagaggtggttgcaagaagctcccatactgtcacattgtcttgggccgcaccgatgtctgatgggggaggagggttatgtggatatagggtggaagtgaaggagggagcaacaggccagtggcggctttgtcacgagttagtgcctggacctgagtgtgtagtggatgggctcgcccctggcgagacttacagatttcgcgtcgccgctgtgggccctgtgggcgcaggtgagcctgtccatctgccacaaaccgttcgcctagccgagccgcctaagcccgtgcctccacagccgtccgcccctgaatcaaggcaagtggctgccggagaagacgtctcacttgagctggaagtcgtcgctgaggccggtgaggttatctggcataagggcatggaaaggatccaacctggaggtcgcttcgaagtggtgagtcaagggagacaacagatgcttgtgatcaaaggtttcacagcagaagatcagggtgagtatcattgtggattagctcagggttccatctgccctgctgcggcaactttccaggtcgcgcttagtcccgcatcggtcgacgaagcccctcagccttctctcccgccagaggctgcccaggagggcgatctccacctactgtgggaggcccttgcacgcaaacgcaggatgtctcgcgagcccacactggacagtatctctgagctcccggaggaggatggaagatcccaaaggctgccgcaagaagctgaggaagttgcacccgatttatcagaaggatatagcaccgctgatgagcttgccagaacaggggacgctgacttgtctcacacatccagcgatgatgagtctcgcgctggaacgccaagcttagtgacctacctgaaaaaggccggacgtccaggcacttcgccattggcatccaaagtgggtgcccctgcagcacccagcgtcaagccgcagcagcagcaggaacctttggctgccgttaggccacctctgggcgacctctcgaccaaggacttgggagatccgagtatggacaaagccgctgtcaagatccaggccgctttcaaaggttacaaggtgcgcaaagaaatgaaacagcaagagggccctatgttttcccacacgttcggagatacagaagcccaggtgggtgacgcactcaggttggagtgtgtggtggcgtctaaggctgatgtgcgcgctagatggttaaaggatggggttgagctcaccgatggcagacaccaccacattgatcagttgggagacgggacctgctctctgttaattaccgggcttgacagagccgacgcaggctgctacacctgtcaagtttccaataaattcgggcaagtgacccactctgcctgcgtggtcgtctcaggatccgaatccgaggccgagagttcatctggaggcgaattggacgatgctttccgaagagccgctcgcagactgcataggctctttcggactaagtctccagccgaagtgtctgacgaggagctttttctgagtgccgacgaagggccagcagagccagaggaacctgcagattggcagacataccgcgaggacgaacactttatttgtatcagatttgaagcacttacagaggcccgtcaggctgtgacacggttccaggagatgtttgctacactgggcattggtgttgaaattaaactggtcgagcagggccctcgacgcgttgaaatgtgtatttccaaggagaccccagcccctgttgttccgcctgagccattgccctccctgcttacttccgatgccgcacccgtttttctaaccgaactgcaaaatcaggaagtgcaggacgggtaccccgtttccttcgactgcgttgtgactggccagccaatgccttccgtcaggtggttcaaagacggaaaactcctcgaggaagatgaccactacatgattaatgaggaccagcagggaggacatcaactcatcattaccgcagttgtccctgcggatatgggcgtgtacagatgcctggcagaaaacagtatgggagtttcctcgacgaaggccgagcttagggttgatttaaccagcactgactatgatacagccgcagacgctaccgagtcaagctcgtatttcagcgcccaaggctatctgagcagcagggagcaggagggcacggagagcacaacagatgagggtcagttgccacaggtggtcgaggaactgcgggatctccaggtcgcacctggaaccaggctagcaaagtttcaactgaaggtcaagggctatcccgcacccaggctgtattggtttaaggatgggcagcccctgacggcttccgcccacatacgaatgacagataagaagattctgcacaccctggagatcatatccgttacccgtgaagactccggacagtatgccgcatatattagcaacgccatgggggctgcttacagcagcgctaggctgctggtccgtggtccggacgagcccgaggagaagccagcaagcgacgtacacgagcagcttgtgccacctcggatgttggagcggtttacccctaagaaggtgaagaaaggttctagtattaccttttctgtcaaagtggagggaagacccgtgcctacagtccactggctgcgagaagaggccgagaggggagtgctatggatcggcccagacacacctggctatacagtcgcttcctccgctcagcagcactctctggtgctgctagacgtgggcagacagcaccagggcacgtacacatgcatcgcctcaaacgccgctggccaggccctctgttcagcctctttgcacgtctctggccttcctaaagttgaagagcaggaaaaggttaaggaggccctgatctccacgtttctacagggtactactcaggctattagcgcacaggggctcgagacagctagtttcgccgaccttggcggacagagaaaagaggagcccctggccgcaaaggaggctctcggtcatctgagcctagctgaggtcgggactgaggagtttctacagaagctcacatcccagattacagaaatggtctcggccaaaatcacccaagctaaattgcaggttcccggaggtgattccgatgaagattccaaaactccttcagctagccccaggcatggacggtcacgcccatcttcctctattcaagagagcagctcagaaagtgaggacggagacgcgcgtggggagatctttgatatctatgtagtcacagccgactatctaccacttggtgctgaacaggacgcaattacactgagggagggacagtacgtggaggtgctggacgctgcacacccactgcggtggctggtaagaaccaagcctaccaaatccagcccctcccgtcagggatgggtgtcacccgcttatctcgataggaggctgaagctttcccccgagtggggcgcagccgaagccccagagtttcctggagaggccgtgagtgaagacgagtataaggccaggctgagctcagtcattcaggagctcctgtcatcagaacaggcctttgtggaggagctgcaattcctccagagccaccacctgcagcatcttgaacgctgccctcacgtacccattgcagttgccggacagaaggccgttatcttccggaacgtgagggatattggacgctttcattcatcttttctgcaagaactccaacagtgcgacaccgacgatgacgttgccatgtgctttatcaagaatcaggctgcttttgagcagtatctcgaattcctggtagggagagtacaggcagagtctgtggtggtctccaccgctattcaagagttttacaagaagtacgccgaggaggcgctcctggcaggcgatcctagtcagcctcctcctcctcctctgcagcactacttagaacaaccagtggagcgagtgcagcgttaccaagctcttcttaaggagctcatacggaacaaagccaggaaccgacagaactgtgctttgctggagcaagcttatgccgtcgtttccgccttgcctcagcgcgctgagaataagctgcacgtgtctctgatggagaattatccgggaaccttacaggccctgggggaaccgataaggcagggacacttcatcgtgtgggaaggtgccccaggggctaggatgccctggaagggacataacaggcacgtttttttattcaggaaccacttggtcatttgcaagccgagaagagattcaaggaccgataccgtgagctatgtgtttcgaaacatgatgaagctgtcctcaattgacttaaacgaccaagttgaaggcgatgacagggccttcgaggtatggcaggagcgcgaagattctgtcagaaagtacttacttcaagccaggacggcaatcattaagtcatcttgggtcaaggagatttgcggaatacagcagagactcgccctccccgtgtggcggcctcccgatttcgaggaagagctggccgactgcaccgcggaactgggtgagactgtgaagctagcatgtcgggttaccggaactccgaaacccgtcatctcctggtacaaggacgggaaggcagtacaagtagacccgcaccatattctgatcgaggacccggatggctcctgcgccctgatcctggactctttaaccggcgtcgacagcgggcaatatatgtgttttgctgccagtgctgcaggaaactgctcaactttagggaaaattttagtgcaagtaccacctcggtttgttaacaaggtgcgggcttctccattcgtggagggggaagacgcccagttcacttgtactatagaaggggcaccttatccccaaatcaggtggtataaagatggcgctttgttgactacgggcaataaattccagactctctcagagccacgctctggcctgctggttcttgtgatacgcgcagcttctaaggaagatctgggcctctacgagtgtgagttggtaaatagactcggaagcgccagggcctctgctgaactcaggatccagtcccccatgctccaggctcaagaacagtgtcacagagagcagttagtggcagccgtcgaggacacgactttggagcgggcagaccaggaggtcacctcggtgttaaaacgactgctggggccaaaagcacctgggccatccaccggcgacctcaccggccctggaccctgtccacggggtgccccagccctgcaggagaccggcagtcagcccccagtcactggtacatcagaggctcccgctgtccccccacgggtcccccagcccctgttgcacgaaggaccagaacaggagccagaggctatagcacgcgctcaggaatggacagttccgatcaggatggagggcgcagcatggcctggagcgggaacaggcgagctgctttgggacgttcacagtcacgtggtgcgagagaccactcagagaacctatacttaccaggcaatcgatacccacaccgctcgccctcccagcatgcaggttacaatcgaagatgtgcaggcccagactgggggtaccgcccagttcgaagcaataattgagggggatccccagcctagcgtcacctggtataaggattctgtccagttagtggattctacccgactttctcaacaacaggagggtaccacctattcattggtcctgaggcacgtggcctccaaagatgcgggagtctacacatgcctagcacaaaacacggggggacaggtcctgtgtaaagccgaattactcgtactgggcggtgacaacgagcctgattctgaaaagcaaagccacaggaggaaacttcatagcttctacgaggtcaaagaggagattggccgtggggtattcggtttcgtgaaacgggtacagcataaaggaaataagattctttgcgccgcaaagtttatccctctgcggagccgtacacgggcacaggcatacagagaaagggatatactggcagccctgtcacaccccctcgtgaccggcctgttggaccagttcgaaacccggaaaacactgatccttattttagagctatgcagttcggaagagctactggatagattataccgtaagggtgtcgtgaccgaagcagaggtgaaggtgtacattcaacaactggtggaaggcctacactacctgcacagccacggagtgctccatctggacataaaacccagtaacatcctaatggttcatccagcacgtgaggacattaaaatctgcgactttggctttgcccaaaacattacacctgcagagctccagttctcccagtacggctccccagagtttgtatcccccgagataatacagcagaaccccgtcagcgaggcctccgacatctgggcaatgggcgtgattagttatctgagtctcacatgcagctctccctttgcaggcgaatctgaccgggcaaccctcttaaacgtcctcgaaggccgagtctcatggtcctcaccaatggccgctcacctttcagaggacgctaaggattttataaaggctacactacagcgggctccacaggccaggccatctgctgctcagtgcttgagtcacccctggtttcttaaaagcatgcccgcagaagaagctcacttcataaacacgaaacagctcaagttccttctcgcaagaagtaggtggcaaagatcattgatgtcttataaaagtattctagtcatgcgcagcatcccggaactcttgaggggtccacccgattccccatcactcggcgtagcgagacacttgtgtagggacacgggtggatcttcatctagcagctcaagcagtgacaatgagctcgctccatttgcgcgtgcaaagtccctgcctccgtctcccgtgactcactccccactcttacatccccgaggattccttcgcccttcagcttccttgcccgaagaagctgaagccagcgagcgcagcaccgaagccccagcccctcccgctagcccggagggagccggacctcccgctgcacagggatgcgtgccgaggcacagtgtcatacgatccctcttctatcaccaagctggtgagtctccagagcatggggctctggcaccaggaagcaggaggcaccccgctaggcggagacacctgctcaaaggtggatacatcgcaggagcactgccaggtttgcgcgagcctttaatggagcacagggttctcgaagaagaggccgcacgcgaggaacaggccactctgctcgcaaaggcccctagtttcgaaaccgccctccgtctgcctgcaagtggcacccacctggctccaggacacagccacagtttagaacatgattccccctccactccccgaccctcttccgaggcttgtggtgaggcccaacggcttccctctgccccatccgggggagccccaattcgggatatggggcatcctcaagggtctaagcaattgccctctaccgggggacacccagggacagcacaacccgagaggccttcgccggattcaccctggggacagcctgcgcctttctgtcacccaaaacaaggcagcgctccgcaggagggatgttctccccaccccgctgtggccccttgccccccaggatcttttccacccggatcgtgtaaagaggccccactggttccgagcagtccctttcttgggcagcctcaggcaccacctgccccagcgaaggcctcccccccacttgattctaaaatgggacctggcgatatttctttgcctgggcgtcccaaaccaggcccatgctcctcacctggtagcgcaagtcaggcatcctcatctcaagtgtctagcctacgcgtagggtcaagccaggtgggcaccgagcctgggcctagcctggatgccgaagggtggactcaggaggctgaggacctgagcgacagtacccctaccctccagcgccctcaggaacaagccacgatgagaaaatttagcctgggaggcaggggaggctatgcgggagttgcagggtatgggacattcgccttcggtggggacgcaggcggaatgttgggtcagggcccaatgtgggctcggatagcttgggcagtctcacaatccgaggaggaggagcaggaggaggcccgagctgaaagccagagtgaagaacaacaggaagctagggccgagtctcccctgccacaggtgtcagcccgaccggtgcctgaagttggaagagctcccacacgaagttccccagagcccactccctgggaagatatcggccaggtgtccctggtccaaatacgggatctcagtggtgatgctgaggccgcagacactattagcctcgatataagtgaggtggatcccgcttatctgaacttaagcgatctgtatgacataaaatacctacctttcgaatttatgatctttcgaaaagtcccgaagtcggcacagccggagcctccctcgcccatggcagaagaggaactcgcagaattcccagagccaacctggccatggcccggtgagttgggacctcatgccggtctggaaattaccgaggagagcgaagacgtggacgccctgctcgctgaggctgcagtgggaagaaagaggaaatggagttcgccctctagatctctgttccacttcccaggcaggcatttgcctcttgacgagcccgctgaactcgggctgcgagagagggttaaggcttcagtggagcatataagccggattctgaaggggaggccagagggtcttgaaaaggaaggccctcctcggaaaaagcccggtctcgctagctttagactgtctggcctgaagtcatgggatcgcgcacccacctttctgagggagctgagcgacgagacagtggttctgggacaatctgttacactggcctgtcaggtgagtgctcagccagccgctcaggccacgtggtcgaaggacggagcaccgctggaaagcagctcaagggtcttaatcagcgcaacactgaagaatttccagctcttgacaatcctcgtcgtcgtggctgaggacttgggagtgtacacttgctctgtgtcaaacgctctaggaacagtcacgacaacgggcgtcctgaggaaagccgagcgcccttcgagcagcccttgtccagacattggggaggtgtatgccgacggagtcctgctagtatggaaaccagtcgaatcgtacggcccagttacttatattgtgcaatgctctctggagggaggcagctggaccaccttagcctcagatatctttgactgctgctatctcacctccaagttaagccgtggcggtacctacacctttagaaccgcctgcgtgtctaaggcgggtatgggcccatattcttccccctcggagcaggtcttgttggggggaccctctcacttagcttcggaagaggaaagtcaggggcgttcagcacagccactgccgtcgaccaagactttcgccttccagactcagatacaacgtggcagatttagcgtggtcaggcagtgttgggaaaaagcctccggtcgggcactcgcagcgaaaatcatcccttatcacccgaaggacaagacggcagtgttaagggagtatgaggccttaaagggacttcgccaccctcatctggctcagctacacgccgcatacctctcccctcggcacctggtgctgatcctggaattgtgtagcggtcctgagctgctgccttgtctggctgaaagagcatcctacagcgagtcagaggtgaaagactacctgtggcagatgctgtctgctacacaatacctgcacaatcagcatattctccatctggacctcagatccgagaatatgattatcaccgagtataacctgctgaaggtggtggacctggggaacgcccaatccttgagccaggaaaaggtcttaccttccgataaattcaaggactacctggagactatggctcccgagctcctggaaggacagggtgctgtgccccagactgacatttgggcgattggcgtgacagcgtttatcatgctgagtgccgagtaccccgtttcctcagaaggtgccagggatcttcagagaggacttaggaaagggctggtaagacttagccggtgctatgccggtctctctgggggtgctgttgcattcctccgctccaccctgtgcgcccagccgtggggtcgtccttgcgcctcgagctgtctccaatgtccgtggctcaccgaggagggccctgcttgctcccgcccagcccctgtgacgttccccacggctagactgagggtgtttgttcgcaaccgcgaaaagcgcagggcgctcctctacaagcgccacaatctcgcacaggtcagatag

SEQ ID NO: 39331 - protein, 500 aa, Artificial Sequence
  derived and/or modified sequence
LFLFLAVVCSYFAQDFWPKQGIKNCFQKVILKRYKKCGHENLQLGKYCKSMDECKVHEECYNGLNQCLRTTQSKILQCDKYVKVFHKFSNSNRYKIRHTGKKPFKCKECEKSFCMLSHLAQHKRIHTREKPYKCKECGKAYNEASNLSTHKRIHTGKKPYKCEQCGKAFNRLSHLTTHKIIHTGKKPYICEDCGKAFNQSANLTTHKRIHTGEKPYKCEESGKAFSQSSTLTTHKIIHAGEKPYKYEECGKSFNQSSTLTTRKIIHTGEKFCKCEEWGKAFSRLSHLTTHKRIHSGEKPYKCEECGKAFKQSSTLTTHKRIHSGEKFYKCEVCSKAFSRFSHLTTHKRIHSGEKPYKCEECGKAFNLSSHLTTHKIIHTGEKPYKCEECGKAFNLSSHLTTHKIIHTGEKPYKCEECGKAFNQSSTLSKHKVIHTGEKPYKCGECGKAFNQSSHLTTHKIIHTGEKPYKCEECGKAFNNSSILNRHKMIHTGEKFYKPES

SEQ ID NO: 39332 - protein, 572 aa, Artificial Sequence
  derived and/or modified sequence
MPGPLGSLEMGVLTFRDVALEFSLEEWQCLDTAQQNLYRNVMLENYRNLVFVGIAASKPDLITCLEQGKEPWNVKRHEMVTEPPVVYSYFAQDLWPKQGKKNYFQKVILRTYKKCGRENLQLRKYCKSMDECKVHKECYNGLNQCLTTTQNKIFQYDKYVKVFHKFSNSNRHKIGHTGKKSFKCKECEKSFCMLSHLAQHKRIHSGEKPYKCKECGKAYNEASNLSTHKRIHTGKKPYKCEECGKAFNRLSHLTTHKIIHTGKKPYKCEECGKAFNQSANLTTHKRIHTGEKPYKCEECGRAFSQSSTLTAHKIIHAGEKPYKCEECGKAFSQSSTLTTHKIIHTGEKFYKCEECGKAFSRLSHLTTHKRIHSGEKPYKCEECGKAFKQSSTLTTHKRIHAGEKFYKCEVCSKAFSRFSHLTTHKRIHTGEKPYKCEECGKAFNLSSQLTTHKIIHTGEKPYKCEECGKAFNQSSTLSKHKVIHTGEKPYKCEECGKAFNQSSHLTTHKMIHTGEKPYKCEECGKAFNNSSILNRHKMIHTGEKLYKPESCNNACDNIAKISKYKRNCAGEK

SEQ ID NO: 39333 - DNA, 4245 bp, Artificial Sequence
  derived and/or modified sequence
gtctttgtctctcgctgcagtcggagtatggtctagtgttcgctgttctgcgtcctctggtcctagaggcccatcctctgtggccctgtgacctgcaggtattgggagatccacagctaagacgctaggaccccctggaagcctagaaacgggagtgttgacatttagggatgtggccatagaattctctctggaggagtggcaatgcctggacaccgcacagcagaatttatataggaatgtgatgttagagaactacagaaacctggtcttcgtgggtattgctgcctctaagccagacctgatcacctgtctggagcaaggaaaagaaccttggaatgtgaagagacatgagatggtagctgaacccccagttgtatgttcttattttgcccgagacctttggccaaagcagggcaaaaaaaattatttccaaaaagtgatactgagaagatataaaaaatgtggatgtgaaaatttacagttaagaaaatactgtaaaagcatggatgagtgtaaggtgcacaaagaatgttacaatggacttaaccagtgtttgacgactacccagaacaaaatatttcaatgtgacaaatatgtgaaagtctttcataaattttcaaattcaaacagacatacgataagacatactggaaagaaatctttcaaatgtaaagaatgtgaaaagtcattttgcatgctttcacacttagctcaacataaaagaattcatagtggagagaaaccctacaaatgtaaagaatgtgggaaagcctataatgagacctcaaacctttctacacataaaagaattcatactggaaagaaaccctacaaatgcgaagagtgtggaaaagcctttaaccggctctcacaccttactacacataagataattcatactggaaagaaaccctacaaatgtgaggagtgtggcaaagcttttaaccaatctgcaaaccttactacacataagagaattcatactggagagaaaccctacaaatgtgaagaatgtggcagagcttttagccagtcctcaacccttactgcacataagataattcatgctggagagaaaccttacaaatgtgaagaatgtggcaaagcttttagccagtcctcaacccttactacacataagataattcatactggagagaaattctacaaatgtgaagaatgtggtaaggcctttagccagttatcccaccttactacacataagagaattcattctggagagaaaccctacaagtgtgaagaatgtggcaaagcttttaaacaatcctcaacccttactacacataagagaattcatgctggagagaaattctacaaatgtgaagtatgtagcaaagcctttagccggttctcacaccttactacacataagagaattcatactggagagaagccctacaaatgtgaagaatgtggcaaagcttttaacctatcgtcacaacttactacacataagataattcatactggagagaaaccctacaaatgtgaagaatgtggcaaagcttttaaccagtcctcaactctttctaaacataaggtaattcatactggagagaagccctacaaatatgaagaatgtggcaaagcttttaaccagtcctcacaccttactacacataagatgattcatactggagagaaaccctacaagtgtgaagaatgtggcaaagcctttaacaactcctctattcttaacagacataagatgattcatactggagagaaactctacaaacctgaaagttgtaacaatgcttgtgacaacattgcaaagatttccaaatataaaagaaattgtgctggtgagaaataatagaaatatgaatgtgacaaagcctttaaatggttatcacactggattgtaggtaaggtaattcattctggagaaaacttctacaagtgtgaatgaacagtgtggcaaaacttacacaatgctcaaaccttattgcacaggaaagcctttatacttgagaacaaatgtacaaatataaagaaagtaaaaaagtgattaatatctgtgcacatcttattcaacatcagagtttatattaatagcattaaaagtgcaattactgtcaaaagagttcaaaaaataagcatttaaagtgctgaagaggatttattttgaagacaaacattacaaatataaacgaagttgtggtaactttacttgtaacacagatcttgttgtattcattctgtattagagcaaaccctgaggcaattgctcaaactttgttcaacatcagagaatttatatcgaagaaaaaccctgtaaatgtaataaatttagaaaaaaacatttattcaaaaactacaggttagaaaattccagagagttcatattaaaatatttttgcatatacagtaaatagaaaaaaatatttaattcaatggtaagtttatgtaaatatcagagaatttatgttagaaatatataaggcaatgacacttcagactttacactgaatcagagttctgagtttagaaagtaatccaaaactaaacttggcagaaaaattatttgtttataactttaaaagagtagaagattttttggagagttacaagtatacttttttttagaaagattacagattttttttaaaagtaaataactctcaaattacttcatacaaataatgttgtaattaactcaaattacttcgtgttaatgttgtaattaactctcaaattacttcatgctaaggaaattagtttttctttttcttcttctttttttttttttttttagatggagtcttgctctatcgcccccccaggctggagtacagtggcacgatctcagctcactgcaacctccgtctccagggttcaagtgattctcctgcctcagcctcccaagtggctgggattacaggcgcaaaccaccatgcgtggctaaattttgtatttttaatagagccagggttttgccatgttggccaggctggtctcgaactcgagactttaggtgatccgcccagcttggcctcccgcaatgctgcaattacaggtgttagccactgcgcctgcctgatgttgtttctttattcctattgtattcatatgtgaaagcatgtgaccaaaagatatgaggattattttttattaggtgagcatttatgacctcttctatgaaagagtaaggacattaaaatgcatgatgaaaatctaagtaaagaggttctttgtgattcacttacagtactgagtgatgcatgaggtaggtgttctgagtaatattctgcattatattgagagacaaatttttagttttagttaaaattaaaaataaattagtatattattttactaattttacttttatgaaaatgcagtacatgttaaaaattttagattatgtgtgaacttaatttcttaattcaacatttttaacagtttaaatattgtgcattcaatcaagtcacattattccacttactttaacctagtccaccttactcaagggtgtaggtaaaaggtggtaacaaggccgggcacggtggctcacgcctgtaatcccagcactttgggaggcaaaggtgggtagatcacctgaggtcgggagttcaagaccagcctgaccaacatggagaaacgccatctctactaaaaatacaaaattagccaggcatggtggcgcatgcctgtaatcccagctactcgggaggctgaggcaggagaatcacttgaacccgggaagcagaggttgcggtgagccgagatcatgccatggcactccgtcctgggtgacaaagtgagactccctctcaaaaaataaataagtaaataaaataaatggtggtaacaatacactatttggtaaaagaatgcactaacatctgtagtactaatcttttttccagtggctttaaactgcaaataaggaatgttgtttctgtaggtaaaatttttatttattttttcccatttaaatttacttttgttagttttttcaggcatataatatttatgttatatatggcatattctgataagaggcatacaatatgtaataatcacattagggtaaatgaggtatccatcacctttagaatttattttttgtattatgaacagttcaattgtacagttttagtttttttaaaatatacgattgttattgactacagggttatttttataataaaaattatatacaagtataaaatttacacatttctgagtcctgaataaataaaaataatttcttgt

SEQ ID NO: 39334 - DNA, 1719 bp, Artificial Sequence
  derived and/or modified sequence
atgcccggccccctgggcagcctggagatgggcgtgctgaccttcagagacgtggccctggagttcagcctggaggagtggcagtgcctggacaccgcccagcagaacctgtacagaaacgtgatgctggagaactacagaaacctggtgttcgtgggcatcgccgccagcaagcccgacctgatcacctgcctggagcagggcaaggagccctggaacgtgaagagacacgagatggtgaccgagccccccgtggtgtacagctacttcgcccaggacctgtggcccaagcagggcaagaagaactacttccagaaggtgatcctgagaacctacaagaagtgcggcagagagaacctgcagctgagaaagtactgcaagagcatggacgagtgcaaggtgcacaaggagtgctacaacggcctgaaccagtgcctgaccaccacccagaacaagatcttccagtacgacaagtacgtgaaggtgttccacaagttcagcaacagcaacagacacaagatcggccacaccggcaagaagagcttcaagtgcaaggagtgcgagaagagcttctgcatgctgagccacctggcccagcacaagagaatccacagcggcgagaagccctacaagtgcaaggagtgcggcaaggcctacaacgaggccagcaacctgagcacccacaagagaatccacaccggcaagaagccctacaagtgcgaggagtgcggcaaggccttcaacagactgagccacctgaccacccacaagatcatccacaccggcaagaagccctacaagtgcgaggagtgcggcaaggccttcaaccagagcgccaacctgaccacccacaagagaatccacaccggcgagaagccctacaagtgcgaggagtgcggcagagccttcagccagagcagcaccctgaccgcccacaagatcatccacgccggcgagaagccctacaagtgcgaggagtgcggcaaggccttcagccagagcagcaccctgaccacccacaagatcatccacaccggcgagaagttctacaagtgcgaggagtgcggcaaggccttcagcagactgagccacctgaccacccacaagagaatccacagcggcgagaagccctacaagtgcgaggagtgcggcaaggccttcaagcagagcagcaccctgaccacccacaagagaatccacgccggcgagaagttctacaagtgcgaggtgtgcagcaaggccttcagcagattcagccacctgaccacccacaagagaatccacaccggcgagaagccctacaagtgcgaggagtgcggcaaggccttcaacctgagcagccagctgaccacccacaagatcatccacaccggcgagaagccctacaagtgcgaggagtgcggcaaggccttcaaccagagcagcaccctgagcaagcacaaggtgatccacaccggcgagaagccctacaagtgcgaggagtgcggcaaggccttcaaccagagcagccacctgaccacccacaagatgatccacaccggcgagaagccctacaagtgcgaggagtgcggcaaggccttcaacaacagcagcatcctgaacagacacaagatgatccacaccggcgagaagctgtacaagcccgagagctgcaacaacgcctgcgacaacatcgccaagatcagcaagtacaagagaaactgcgccggcgagaagtag

SEQ ID NO: 39335 - DNA, 1719 bp, Artificial Sequence
  derived and/or modified sequence
atgccgggtcctctcggcagcctagagatgggggtgctcaccttccgagatgtcgcactcgaattctctttagaggagtggcagtgcctggacaccgcccaacaaaatctttaccgaaacgtgatgctggagaattacagaaacctcgtgtttgtaggcatagcagcctctaagcccgacctgatcacatgtcttgagcagggcaaggagccctggaacgtgaaaagacacgagatggtaactgagcccccggtcgtgtactcatattttgcacaggacctctggccaaaacaggggaagaagaattactttcagaaagtgatcctccgaacatataagaaatgtgggcgcgagaacttacagctgcgcaagtattgtaaatccatggatgagtgtaaggttcacaaggagtgttataatggactgaatcagtgtcttacaacaacccagaacaaaattttccagtacgacaagtatgtcaaagtttttcataagtttagcaattccaaccgacataaaatcggacacacgggcaaaaaaagtttcaagtgcaaggagtgtgaaaagagtttctgtatgctgtcccaccttgcacaacacaagcggatccacagtggtgagaagccatacaaatgcaaggaatgtggcaaagcctacaatgaagcgagtaacctctctactcacaagcgaatccacaccggcaagaagccatataagtgtgaggagtgtggaaaagccttcaatcgcctgagccacctgactacccacaagatcattcatacaggcaagaagccttataaatgcgaggaatgcggaaaggcgtttaaccaatcagctaacctgacaactcacaaacgcattcacacaggggagaagccgtacaaatgtgaggagtgcgggcgcgcgttctcccaatctagcactctcactgctcataaaattatccatgctggagaaaaaccatacaagtgcgaagaatgcgggaaagccttctcccagagctcaactttgactacacacaagatcatccataccggagagaagttttacaagtgtgaagaatgcggcaaagctttctcccgcttgtcccacctgactacccacaagcgcatccattccggcgaaaagccatataaatgcgaggaatgtggcaaggcctttaaacagtcaagcacacttactacgcacaagcgcatccatgccggagagaagttttataagtgtgaggtgtgctccaaagccttctcgcgattttcccacctgacaactcataaaaggatccacacgggcgaaaaaccttacaaatgtgaagaatgtggtaaggcctttaacctgtcgtctcaattaaccacacataagatcattcatactggagagaaaccatataagtgcgaagagtgtggaaaagcatttaaccaaagctctactctgtctaagcacaaggttatacatacaggcgagaagccttacaagtgtgaggagtgtggaaaggcttttaaccaatcttcccatcttacgacgcataagatgatccataccggagagaaaccgtacaagtgcgaagagtgcggtaaagcatttaacaattcctcaatcctaaaccggcataaaatgattcacacaggagagaaactctacaagccagaaagttgtaataacgcttgtgataatattgcgaagattagcaagtacaaaagaaattgcgctggtgagaaatag

SEQ ID NO: 39336 - DNA, 1719 bp, Artificial Sequence
  derived and/or modified sequence
atgcctggccccctgggcagcctggagatgggcgtgctgaccttcagagatgtggccctggagttcagcctggaggagtggcagtgcctggacacagcccagcagaacctgtacagaaatgtgatgctggagaactacagaaacctggtgtttgtgggcattgctgccagcaagccagacctgatcacctgcctggagcagggcaaggagccctggaatgtgaagagacatgagatggtgacagagccccctgtggtgtacagctactttgcccaggacctgtggcccaagcagggcaagaagaactacttccagaaggtgatcctgcggacctacaagaagtgtggccgggagaacctgcagctgaggaagtactgcaagtccatggatgagtgcaaggtgcacaaggagtgctacaacggcctgaaccagtgcctgaccaccacccagaacaagatcttccagtatgacaagtatgtgaaggtgttccacaagttcagcaacagcaacagacacaagattggccacacaggcaagaagagcttcaagtgcaaggaatgtgagaagagcttctgcatgctgagccacctggcccagcacaagaggatccacagcggggagaagccctacaagtgcaaggaatgtgggaaggcctacaatgaggccagcaacctgagcacccacaagaggatccacacaggcaagaagccctacaagtgtgaggagtgtgggaaggccttcaaccggctgagccacctgaccacccacaagatcatccacacaggcaagaagccctacaagtgtgaggagtgtgggaaggccttcaaccagagcgccaacctgaccacccacaagaggatccacactggagagaagccctacaagtgtgaggagtgtggccgggccttcagccagagcagcaccctgacagcccacaagatcatccatgctggggagaagccctacaagtgtgaggagtgtgggaaggccttcagccagagcagcaccctgaccacccacaagatcatccacactggagagaagttctacaagtgtgaggagtgtgggaaggccttcagccggctgagccacctgaccacccacaagaggatccacagcggggagaagccctacaagtgtgaggagtgtgggaaggccttcaagcagagcagcaccctgaccacccacaagagaattcatgctggggagaagttctacaagtgtgaggtgtgcagcaaggccttcagccgcttcagccacctgaccacccacaagaggatccacactggagagaagccctacaagtgtgaggagtgtgggaaggccttcaacctgagcagccagctgaccacccacaagatcatccacactggagagaagccctacaagtgtgaggagtgtgggaaggccttcaaccagagcagcaccctgagcaagcacaaggtgatccacactggagagaagccctacaagtgtgaggagtgtgggaaggccttcaaccagagcagccacctgaccacccacaagatgatccacactggagagaagccctacaagtgtgaggagtgtgggaaggccttcaacaacagcagcatcctgaacagacacaagatgatccacactggagagaagctgtacaagccagagagctgcaacaatgcctgtgacaacatcgccaagatcagcaagtacaagaggaactgtgccggggagaagtag

SEQ ID NO: 39337 - DNA, 1719 bp, Artificial Sequence
  derived and/or modified sequence
atgcccggccccctgggcagcctggagatgggcgtgctgaccttccgcgatgtcgccttggagttctctctggaagagtggcaatgtctcgacaccgcccagcagaatctctaccgaaatgtgatgctagagaattatcggaatctcgtgttcgttggcatagcagcaagcaagccagacctgattacctgcctggagcagggcaaagaaccttggaatgtgaaacgtcatgagatggtcaccgagccgcctgtggtctatagctactttgctcaggacctttggccgaagcaggggaaaaaaaattactttcagaaggtcatattgaggacctacaagaagtgtggacgggagaatttgcagctcagaaagtactgtaagagtatggacgagtgcaaagttcataaggaatgttacaatggtctaaaccagtgtctcaccacaactcagaacaagattttccagtacgacaaatacgtcaaggtgtttcacaaattctctaattctaatcgccacaagattggacatactggaaagaaaagttttaaatgtaaggaatgtgagaaaagcttttgcatgcttagtcatctggctcagcataagagaatccacagtggcgagaagccatataagtgtaaggaatgcggaaaggcctacaacgaagccagcaacttgtccacccataagaggattcacacggggaagaaaccatataaatgtgaagagtgtggcaaggctttcaaccgcttatctcacctaacaactcataagataatccatacaggcaagaaaccttacaagtgcgaggaatgtggcaaggcattcaaccagagtgctaacctcaccacacacaagcggatccacactggggagaagccgtataagtgcgaggagtgtggacgtgctttttcccagagctcaacgctcactgcacacaaaattatacacgccggcgagaagccctacaaatgcgaggagtgtgggaaagcattttcccagtcgtccaccctaacaacgcataagatcatccacaccggtgagaagttttataaatgcgaggagtgcggtaaagcattttctcgcctttctcacctgaccactcataagcgcattcatagcggggaaaaaccttacaagtgcgaagagtgcggcaaagcttttaaacagagttccacccttaccactcacaagcggatccacgccggagagaagttctataaatgcgaggtttgttcaaaggccttctctagatttagtcatctgacaacccataaaaggatccatacaggggaaaaaccttacaagtgcgaggagtgtgggaaagcatttaacctatccagtcagctgacaacccataagattatccacactggggagaagccttataaatgcgaagaatgcggcaaagctttcaatcagagctctaccttgagtaaacacaaggtcatacatacaggagagaagccttataagtgtgaggagtgcggtaaggcatttaaccaatctagccatctcaccacgcacaaaatgattcatacaggcgaaaaaccatacaaatgtgaggaatgtggtaaagcgtttaacaactcttccatcctcaataggcataagatgattcacactggagaaaagctatacaaaccggagtcatgcaacaacgcctgtgataacatagccaagatctccaagtacaagaggaattgtgcaggcgagaaatag

SEQ ID NO: 39338 - DNA, 1719 bp, Artificial Sequence
  derived and/or modified sequence
atgccgggacccttgggctccctggagatgggagtgttgaccttccgggatgtagctctcgagttctcgctggaagaatggcaatgtctggacactgcccaacaaaatctctatcgcaacgtgatgctcgagaactacagaaacttagtgtttgttgggattgcagcttccaaacctgacttgatcacctgcctcgagcagggcaaagaaccttggaacgttaaacgccatgaaatggtaacagaacccccagttgtctactcctacttcgctcaggatctctggcccaagcagggaaaaaaaaattatttccagaaggtgatcctgcgcacctacaaaaagtgtggcagggagaatcttcagctgcgaaagtattgtaagtccatggatgagtgtaaagttcataaggaatgctataacggcctaaaccagtgcctgactaccacacagaataagatatttcagtatgacaaatacgtaaaagtgttccataaattcagcaattctaataggcataaaatagggcatactggaaagaaatcgttcaaatgcaaggaatgtgaaaaatcgttctgtatgctcagccatctggctcaacataagcgcatccatagcggtgagaagccctataagtgtaaggaatgtggcaaggcttacaatgaagccagcaacctctcgacacacaagagaattcatactggtaaaaagccttataaatgcgaggagtgcggtaaggccttcaatcgcctgagccacctgacgacacacaaaattattcacaccgggaaaaaaccctataagtgcgaagagtgtggcaaagccttcaaccaatcagcaaacctgacaacacacaaacgtattcacactggggagaaaccctataagtgtgaggaatgcggcagagcattttcgcagtcctctacactgaccgctcataagatcattcatgccggagagaagccttataagtgcgaagaatgcggcaaggccttcagccagtcctctactctaactacccataagatcatccatactggcgagaaattctacaaatgcgaggaatgtgggaaagccttctccagattatctcatctgactacgcataagcggattcactcaggagagaagccgtataaatgtgaggagtgcggaaaggcgtttaaacagtcttctaccctgaccacgcacaagcgtattcacgccggtgagaagttttataagtgtgaagtgtgcagcaaggccttctcccgattcagtcatcttaccacacataagcgtatccataccggggaaaagccttataagtgcgaggaatgcggcaaggccttcaacctaagctcccagctgaccactcacaaaattatccacacaggcgagaagccttataagtgcgaagaatgcggaaaagcattcaatcagtcttcaacactaagtaagcacaaggttatccacacaggcgaaaagccatataagtgcgaagaatgcgggaaagccttcaatcaaagtagccatctaactacccacaagatgatccacaccggtgaaaaaccttacaaatgtgaagagtgcggtaaggcttttaataactcaagcattctgaacaggcacaagatgatacacaccggagagaaactctataaaccggaatcttgcaacaacgcctgcgataatatagccaagatttccaaatacaagcggaattgcgccggtgaaaaatag

SEQ ID NO: 39339 - DNA, 2260 bp, Artificial Sequence
  derived and/or modified sequence
gtctttgtctctcgctgcagccggagttcctggtctcgtcttcgcccttctgtgtcctctgctcgtagaggcccagcctctgtggccctgtgacctgcaggtattgggaatccacagctaagatgccaggaccccttggaagcctagaaatgggagtgttgacatttagggatgtggccttagaattctctctggaggagtggcaatgcctggacaccgcacagcagaatttatataggaatgtgatgttagagaactacagaaacctggtctttgtgggtattgctgcctctaagccagacctgatcacctgtctggagcaaggaaaagaaccttggaatgtgaagagacatgagatggtaactgaacccccagttgtatattcttattttgcccaagacctttggccaaagcagggcaaaaaaaattatttccaaaaagtgatactgagaacatataaaaaatgtggacgtgaaaatttacagttaagaaaatactgtaaaagcatggatgagtgtaaggtgcacaaagaatgttacaatggacttaaccagtgtttgacaactacccagaacaaaatatttcaatatgacaaatatgtgaaagtctttcataaattttcaaattcaaacagacataagataggacatactggaaagaaatctttcaagtgtaaagaatgtgaaaagtcattttgcatgctttcacacttagctcaacataaaagaattcatagtggagagaaaccctacaaatgtaaagaatgtgggaaagcctataatgaggcctcaaacctttctacacataaaagaattcatactggaaagaaaccctacaaatgcgaagagtgtggaaaagcctttaaccggctctcacaccttactacacataagataattcatactggaaagaaaccctacaaatgtgaggagtgtggcaaagcttttaaccaatctgcaaaccttactacacataagagaattcatactggagagaaaccctacaaatgtgaagaatgtggcagagcttttagccagtcctcaacccttactgcacataagataattcatgctggagagaaaccttacaaatgtgaagaatgtggcaaagcttttagccagtcctcaacccttactacacataagataattcatactggagagaaattctacaaatgtgaagaatgtggtaaggcctttagccggttatcccaccttactacacataagagaattcattctggagagaaaccctacaagtgtgaagaatgtggcaaagcttttaaacaatcctcaacccttactacacataagagaattcatgctggagagaaattctacaaatgtgaagtatgtagcaaagcctttagccggttctcacaccttactacacataagagaattcatactggagagaagccctacaaatgtgaagaatgtggcaaagcttttaacctatcatcacaacttactacacataagataattcatactggagagaaaccctacaaatgtgaagaatgtggcaaagcttttaaccagtcctcaactctttctaaacataaggtaattcatactggagagaagccctacaaatgtgaagaatgtggcaaagcttttaaccagtcctcacaccttactacacataagatgattcatactggagagaaaccctacaagtgtgaagaatgcggcaaagcctttaacaactcctctattcttaacagacataagatgattcatactggagagaaactctacaaacctgaaagttgtaacaatgcttgtgacaacattgcaaagatttccaaatataaaagaaattgtgctggtgagaaataatagaaatatgaatgtgacaaagcctttaaatggttatcacactggattgtaggtaaggtaattcattctggagaaaacttctacaagtgtgaacagtgtggcaaaacttacacaatgctcaaaccttattgcacaggaaagcctttatacttgatgagaacaaatgtacaaatataaagaaagtaaaaaagtgattaatatctgcacacatcttattcagcatcagagaatttatacttaatagcattaaaggtgcaattactgtcaaaagagttcagaaaatataagcatttaaagtgctgaagaggatttattttgaagacaaacattacaaatataaacgaagttgtggtaactttacttgtaacacagatcttgttgtattcattctgtattagagcaaaccctgaggcaattgc

SEQ ID NO: 39340 - protein, 498 aa, Artificial Sequence
  derived and/or modified sequence
MNQSIPVAPTPPRRVRLKPWLVAQVNSCQYPGLQWVNGEKKLFCIPWRHATRHGPSQDGDNTIFKAWAKETGKYTEGVDEADPAKWKANLRCALNKSRDFRLIYDGPRDMPPQPYKIYEVCSNGPAPTDSQPPEDYSFGAGEEEEEEEELQRMLPSLSLTEDVKWPPTLQPPTLRPPTLQPPTLQPPVVLGPPAPDPSPLAPPPGNPAGFRELLSEVLEPGPLPASLPPAGEQLLPDLLISPHMLPLTDLEIKFQYRGRPPRALTISNPHGCRLFYSQLEATQEQVELFGPISLEQVRFPSPEDIPSDKQRFYTNQLLDVLDRGLILQLQGQDLYAIRLCQCKVFWSGPCASAHDSCPNPIQREVKTKLFSLEHFLNELILFQKGQTNTPPPFEIFFCFGEEWPDRKPREKKLITVQVVPVAARLLLEMFSGELSWSADSIRLQISNPDLKDRMVEQFKELHHIWQSQQRLQPVAQAPPGAGLGVGQGPWPMHPAGMQ

SEQ ID NO: 39341 - DNA, 1497 bp, Artificial Sequence
  derived and/or modified sequence
atgaaccagagcatccccgtggcccccaccccccccagaagagtgagactgaagccctggctggtggcccaggtgaacagctgccagtaccccggcctgcagtgggtgaacggcgagaagaagctgttctgcatcccctggagacacgccaccagacacggccccagccaggacggcgacaacaccatcttcaaggcctgggccaaggagaccggcaagtacaccgagggcgtggacgaggccgaccccgccaagtggaaggccaacctgagatgcgccctgaacaagagcagagacttcagactgatctacgacggccccagagacatgcccccccagccctacaagatctacgaggtgtgcagcaacggccccgcccccaccgacagccagccccccgaggactacagcttcggcgccggcgaggaggaggaggaggaggaggagctgcagagaatgctgcccagcctgagcctgaccgaggacgtgaagtggccccccaccctgcagccccccaccctgagaccccccaccctgcagccccccaccctgcagccccccgtggtgctgggcccccccgcccccgaccccagccccctggcccccccccccggcaaccccgccggcttcagagagctgctgagcgaggtgctggagcccggccccctgcccgccagcctgccccccgccggcgagcagctgctgcccgacctgctgatcagcccccacatgctgcccctgaccgacctggagatcaagttccagtacagaggcagaccccccagagccctgaccatcagcaacccccacggctgcagactgttctacagccagctggaggccacccaggagcaggtggagctgttcggccccatcagcctggagcaggtgagattccccagccccgaggacatccccagcgacaagcagagattctacaccaaccagctgctggacgtgctggacagaggcctgatcctgcagctgcagggccaggacctgtacgccatcagactgtgccagtgcaaggtgttctggagcggcccctgcgccagcgcccacgacagctgccccaaccccatccagagagaggtgaagaccaagctgttcagcctggagcacttcctgaacgagctgatcctgttccagaagggccagaccaacacccccccccccttcgagatcttcttctgcttcggcgaggagtggcccgacagaaagcccagagagaagaagctgatcaccgtgcaggtggtgcccgtggccgccagactgctgctggagatgttcagcggcgagctgagctggagcgccgacagcatcagactgcagatcagcaaccccgacctgaaggacagaatggtggagcagttcaaggagctgcaccacatctggcagagccagcagagactgcagcccgtggcccaggccccccccggcgccggcctgggcgtgggccagggcccctggcccatgcaccccgccggcatgcagtag

SEQ ID NO: 39342 - DNA, 1497 bp, Artificial Sequence
  derived and/or modified sequence
atgaatcaaagcatccctgtggcaccaaccccgcctagacgggtgcggctcaagccttggctagtggcccaagtcaacagctgccaatacccaggactccagtgggtgaatggcgaaaagaagcttttctgtataccatggcggcatgcaacccgccacggaccctctcaggatggagacaataccatttttaaggcctgggccaaggagaccggcaagtataccgaaggcgtagacgaggctgatccagccaaatggaaagcaaacctccgctgcgccctgaacaaaagtcgggattttagactgatctacgacggtccacgggacatgccaccacaaccttacaaaatttatgaagtgtgtagcaatggaccagcccccactgactcccaacctccagaagattactcctttggtgccggggaagaggaggaagaagaggaagaactgcaaagaatgctcccgtctctgagccttacggaggacgtgaaatggccacctaccctgcagcccccgacactcaggcctcctacgctgcagccccctacacttcagcctcccgtggttctcgggccacccgcccccgatcctagtcccctcgctccccctcccggaaatcctgcgggattccgggagttactctcggaagtgctcgagcccggtccgttgcctgcgtcactaccgcccgctggtgagcagttactgccagacttgctgatcagcccccacatgttacccctcaccgacctcgaaatcaaatttcaatatcgagggagacccccgcgcgctctcactatcagtaatccacatggctgccgcctgttctactcccagctggaggcgactcaggaacaggtggaactattcggcccaatctctcttgagcaggtccggttcccttcccctgaagacatcccgtctgacaaacagaggttctatacaaatcagctgcttgatgtcctggatcgcggactcatcttacagttacagggccaggatctctacgctatccgcctgtgccagtgcaaggttttctggtccggcccttgtgcatcagctcatgattcctgccctaatcccatccagagagaggtaaaaactaaattgttcagtctggaacatttcctgaatgaactgatcctcttccagaagggccagacgaacactccgccaccattcgagatcttcttctgctttggagaagaatggcctgataggaagcctcgcgagaaaaaacttatcactgtccaggttgttccagtggcggccaggctcttactggaaatgttttccggggagctgagctggtccgccgacagtatccgcttgcaaatatcaaatcctgatttaaaagaccgcatggtggaacagtttaaagaattgcaccatatctggcaatcccagcagcgactccaacctgttgcccaggcaccccctggcgccggtctcggtgtaggacagggcccttggccaatgcatcccgctggcatgcagtag

SEQ ID NO: 39343 - DNA, 1497 bp, Artificial Sequence
  derived and/or modified sequence
atgaatcagtccatcccagttgcccctactcccccacggagagtccggctgaaaccttggctggttgcccaggtgaattcttgtcagtacccaggactccaatgggtgaacggcgagaagaagctattttgcatcccttggcgacacgctaccaggcatgggcccagtcaggatggggacaatacaattttcaaagcgtgggccaaggagaccggtaagtacactgagggagtcgacgaggctgatcccgcaaagtggaaggccaaccttcggtgtgctttaaataaatcaagggacttcaggctgatttacgatgggcctcgcgatatgcccccccagccctacaagatctatgaggtctgcagtaacggtccagctccaactgactcccagcctcccgaggactactctttcggcgctggtgaggaggaggaagaagaggaagaactgcaaagaatgttgccttcgctttcacttaccgaagacgtgaaatggccaccaacactgcagcccccaacgctgaggcccccaaccctgcaacctccgacgctccagccgcccgtggtgcttggcccccccgctcccgaccctagccctttagctcccccacctggtaacccggccgggtttcgggaactactcagcgaagtcctggagcctggcccactgcctgcgtccttaccacctgccggagaacaactgctccctgatctcttaatctccccacatatgctccctttgaccgatctggaaattaaatttcaatatcggggacgacccccaagagcattgactatttcgaaccctcacggctgtcgcttgttttattcccaactggaggccacccaggagcaggtcgagctcttcgggccaataagtctggaacaggtacgcttccccagccctgaggatattccttcagacaaacagcgcttttataccaaccaactgctagacgtcctggacagaggtctcattctgcagctgcaaggccaggacctctatgccatcagactgtgccaatgtaaagtgttttggtccggcccttgcgcaagtgctcacgacagctgtcccaaccctattcagcgagaagtcaaaaccaaattgttcagcttggaacactttttgaacgaattgatccttttccagaagggccagaccaacaccccccccccctttgaaatctttttctgtttcggagaggagtggcccgatcgcaagccacgcgagaagaagctcatcactgtgcaggttgtcccagtagcggcaaggttgctgctggagatgttctccggcgagttgagctggagtgccgatagcattcgactccagatatccaatcccgatctcaaagatcggatggtggagcagttcaaggagttgcaccatatctggcaatcacagcagagacttcagccagttgcccaggcgcctccaggggctgggttgggagtagggcagggcccttggcccatgcaccctgccggaatgcagtag

SEQ ID NO: 39344 - DNA, 1497 bp, Artificial Sequence
  derived and/or modified sequence
atgaatcagagcatcccggtcgcgcccacaccaccccgccgagtccgactgaagccatggttagtcgcccaggtgaatagctgtcagtatccaggcttgcaatgggtgaacggggaaaagaaattattctgcattccttggagacacgcaactcgtcatggccccagccaggacggcgataatacgatattcaaagcgtgggctaaggaaacggggaagtatacagagggagtcgacgaggcggatccagcaaaatggaaagccaatctgaggtgtgctctgaataagagtcgggactttcgccttatctacgatggaccaagggacatgccacctcagccttataaaatttatgaggtctgctctaacgggccagctcctacagacagtcagccacccgaggattatagtttcggagcgggagaggaggaagaggaggaagaagagttgcagagaatgttgccctctctcagccttacggaggacgtgaagtggcctccgacgctgcaacctcccacactgcgcccacctacgttgcagccaccaactctgcagccgcccgtggttcttggacccccagctcctgacccaagtcctctggcaccaccaccagggaaccctgccggcttcagagaattgctgtcagaggtgctggagcccggccccctgcctgcaagcctgccacccgcaggggagcagttgctgcccgatctgttgatcagcccgcatatgctccccctgactgatcttgaaatcaaatttcagtatagaggccggccaccacgcgcactgacaatcagtaacccccacggctgtcgccttttttatagtcagctcgaagccacccaggaacaggtagaacttttcgggcctatcagcctggaacaggtgagatttccatcgcctgaggacattccctctgataagcagcgattttacacgaatcagcttctggacgtgctagaccgcgggctgattctgcagctgcagggacaggacctgtatgcaatacgcttgtgtcagtgcaaggtcttctggtccgggccgtgtgctagcgcccatgactcctgtcccaaccccattcaacgtgaggtgaagacaaagcttttctcccttgagcacttcttaaatgagctaattttgtttcaaaaagggcagactaacaccccacccccttttgagatctttttttgctttggggaggaatggcccgatcggaaacccagggaaaaaaagctgataacagtgcaagtggtccccgtcgccgcccggctattactggagatgttcagtggcgaacttagctggtcagctgattctatccgcttgcagatcagcaacccagatctgaaggaccggatggtggagcagtttaaggagcttcatcacatttggcagtcccagcagaggctgcaacccgtagctcaggcacctccgggcgctggccttggagtggggcaggggccctggccgatgcatccagctggcatgcaatag

SEQ ID NO: 39345 - DNA, 1497 bp, Artificial Sequence
  derived and/or modified sequence
atgaaccagagcatccctgtggcccccaccccaccaagaagagtgcggctgaagccctggctggtggcccaggtgaacagctgccagtacccaggcctgcagtgggtgaatggagagaagaagctgttctgcatcccctggaggcatgccaccaggcatggccccagccaggatggagacaacaccatcttcaaggcctgggccaaggagaccgggaagtacacagaaggagtggatgaagctgaccctgccaagtggaaggccaacctgcgctgtgccctgaacaagagccgggacttccgcctcatctatgatggcccccgggacatgccaccccagccctacaagatctatgaggtgtgcagcaatggacctgcccccacagacagccagcccccagaggactacagctttggagctggggaggaggaggaggaggaggaggagctgcagaggatgctgcccagcctgagcctgacagaagatgtgaagtggccacccaccctgcagccccccaccctgcggccccccaccctgcagccccccaccctgcagccccctgtggtgctgggccccccagccccagaccccagccccctggcccctcctcctggcaacccagctggcttccgggagctgctgtctgaggtgctggagcccggccccctgcctgccagcctgcccccagctggggagcagctgctgcctgacctgctgatcagcccccacatgctgcccctgacagacctggagatcaagttccagtaccggggccggcccccccgggccctgaccatcagcaacccccacggctgccgcctcttctacagccagctggaggccacccaggagcaggtggagctgtttggccccatcagcctggagcaggtgcgcttccccagccctgaggacatccccagcgacaagcagcgcttctacaccaaccagctgctggatgtgctggaccggggcctcatcctgcagctgcagggccaggacctgtatgccatccggctgtgccagtgcaaggtgttctggagcggcccctgtgccagcgcccatgacagctgccccaaccccatccagcgggaggtgaagaccaagctgttcagcctggagcacttcctgaatgaactcatcctcttccagaagggccagaccaacaccccacctccatttgagatcttcttctgctttggagaggagtggccagacaggaagccccgggagaagaagctgatcaccgtgcaggtggtgcctgtggccgcccggctgctgctggagatgttttctggagagctgtcctggagcgctgacagcatccggctgcagatcagcaacccagacctgaaggacaggatggtggagcagttcaaggagctgcaccacatctggcagagccagcagaggctgcagcctgtggcccaggcccctcctggagctggcctgggcgtgggccagggcccctggcccatgcaccctgctggcatgcagtag

SEQ ID NO: 39346 - DNA, 2749 bp, Artificial Sequence
  derived and/or modified sequence
gtccagctgcgcctggaaagcgagctcggacccctctgccatgaaccagtccatcccagtggctcccaccccaccccgccgcgtgcggctgaagccctggctggtggcccaggtgaacagctgccagtacccagggcttcaatgggtcaacggggaaaagaaattattctgcatcccctggaggcatgccacaaggcatggtcccagccaggacggagataacaccatcttcaaggcctgggccaaggagacagggaaatacaccgaaggcgtggatgaagccgatccggccaagtggaaggccaacctgcgctgtgcccttaacaagagccgggacttccgcctcatctacgacgggccccgggacatgccacctcagccctacaagatctacgaggtctgctccaatggccctgctcccacagactcccagccccctgaggattactcttttggtgcaggagaggaggaggaagaagaggaagagctgcagaggatgttgccaagcctgagcctcacagaggatgtcaagtggccgcccactctgcagccgcccactctgcggccgcctactctgcagccgcccactctgcagccgcccgtggtgctgggtccccctgctccagaccccagccccctggctcctccccctggcaaccctgctggcttcagggagcttctctctgaggtcctggagcctgggcccctgcctgccagcctgccccctgcaggcgaacagctcctgccagacctgctgatcagcccccacatgctgcctctgaccgacctggagatcaagtttcagtaccgggggcggccaccccgggccctcaccatcagcaacccccatggctgccggctcttctacagccagctggaggccacccaggagcaggtggaactcttcggccccataagcctggagcaagtgcgcttccccagccctgaggacatccccagtgacaagcagcgcttctacacgaaccagctgctggatgtcctggaccgcgggctcatcctccagctacagggccaggacctttatgccatccgcctgtgtcagtgcaaggtgttctggagcgggccttgtgcctcagcccatgactcatgccccaaccccatccagcgggaggtcaagaccaagcttttcagcctggagcattttctcaatgagctcatcctgttccaaaagggccagaccaacaccccaccacccttcgagatcttcttctgctttggggaagaatggcctgaccgcaaaccccgagagaagaagctcattactgtacaggtggtgcctgtagcagctcgactgctgctggagatgttctcaggggagctatcttggtcagctgatagtatccggctacagatctcaaacccagacctcaaagaccgcatggtggagcaattcaaggagctccatcacatctggcagtcccagcagcggttgcagcctgtggcccaggcccctcctggagcaggccttggtgttggccaggggccctggcctatgcacccagctggcatgcaataacaaggctgcagacggtgactggccctggcttcctgggtggcggtgcggactgatgtggagatgtgacagccccgatgagcacctggctggctgcagggtcctacctctgggtttcctggaagtggatttgggccaagaaggagagggagaaaggcccgagcccctgccttcccgggcctttctctcctgggctgtctctggtctggtcagcctggctctcgggaaattcagccatgagcagggaaagaactctcccaaccctggggcctagctgtataggaggaattgcctaagggtggcccactcttgtgattgccccatttcctctggcaacaaaagccagagtgttgtgggccaagtccccccacagggcctctgcagggcatggccctgatttccctggtttgagactcacttcctcatctccctgtcctctgagataatatgagtgagcacttaggtatcatatcagatgctcaaggctggcagctacccccttcttgagagtccaagaacctggagcagaaataatttttatgtatttttggattaatgaatgttaaaaacagactcagctgtttctttccttttactactaccagttgctcccatgctgctccaccaggccctgtttcggatgccaactggcccactccccaagcacttgcccccagcttgcgaccattggcactgggagggcctggcttctgggctgatgggtcagttgggccttcataaacactcacctggctggctttgccttccaggaggaagctggctgaagcaagggtgtggaattttaaatgtgtgcacagtctggaaaactgtcagaatcagttttcccataaaagggtgggctagcattgcagctgcatttgggaccattcaaatctgtcactctcttgtgtatattcctgtgctattaaatatatcagggcagtgcatgtaaatcatcctgatatatttaatatatttattatattgtcccccgaggtggggacagtgagtgagttctcttagtccccccagagctggttgttaaagagcctggcacctacccgctctcacttcatctgtgtcatctctgcacactccagcccactttctgccttcagccattgagtggaagctgccccaggcccttaccaggtgcagatgcccaatcttgatgcccagccatcagaactgtgagccaaataaacctttttctgt

SEQ ID NO: 39347 - DNA, 2786 bp, Artificial Sequence
  derived and/or modified sequence
gcttggtcccgccgcccggccggtgctccctggcgcagccacgcaggcgcaccgcagacagacccctctgccatgaaccagtccatcccagtggctcccaccccaccccgccgcgtgcggctgaagccctggctggtggcccaggtgaacagctgccagtacccagggcttcaatgggtcaacggggaaaagaaattattctgcatcccctggaggcatgccacaaggcatggtcccagccaggacggagataacaccatcttcaaggcctgggccaaggagacagggaaatacaccgaaggcgtggatgaagccgatccggccaagtggaaggccaacctgcgctgtgcccttaacaagagccgggacttccgcctcatctacgacgggccccgggacatgccacctcagccctacaagatctacgaggtctgctccaatggccctgctcccacagactcccagccccctgaggattactcttttggtgcaggagaggaggaggaagaagaggaagagctgcagaggatgttgccaagcctgagcctcacagaggatgtcaagtggccgcccactctgcagccgcccactctgcggccgcctactctgcagccgcccactctgcagccgcccgtggtgctgggtccccctgctccagaccccagccccctggctcctccccctggcaaccctgctggcttcagggagcttctctctgaggtcctggagcctgggcccctgcctgccagcctgccccctgcaggcgaacagctcctgccagacctgctgatcagcccccacatgctgcctctgaccgacctggagatcaagtttcagtaccgggggcggccaccccgggccctcaccatcagcaacccccatggctgccggctcttctacagccagctggaggccacccaggagcaggtggaactcttcggccccataagcctggagcaagtgcgcttccccagccctgaggacatccccagtgacaagcagcgcttctacacgaaccagctgctggatgtcctggaccgcgggctcatcctccagctacagggccaggacctttatgccatccgcctgtgtcagtgcaaggtgttctggagcgggccttgtgcctcagcccatgactcatgccccaaccccatccagcgggaggtcaagaccaagcttttcagcctggagcattttctcaatgagctcatcctgttccaaaagggccagaccaacaccccaccacccttcgagatcttcttctgctttggggaagaatggcctgaccgcaaaccccgagagaagaagctcattactgtacaggtggtgcctgtagcagctcgactgctgctggagatgttctcaggggagctatcttggtcagctgatagtatccggctacagatctcaaacccagacctcaaagaccgcatggtggagcaattcaaggagctccatcacatctggcagtcccagcagcggttgcagcctgtggcccaggcccctcctggagcaggccttggtgttggccaggggccctggcctatgcacccagctggcatgcaataacaaggctgcagacggtgactggccctggcttcctgggtggcggtgcggactgatgtggagatgtgacagccccgatgagcacctggctggctgcagggtcctacctctgggtttcctggaagtggatttgggccaagaaggagagggagaaaggcccgagcccctgccttcccgggcctttctctcctgggctgtctctggtctggtcagcctggctctcgggaaattcagccatgagcagggaaagaactctcccaaccctggggcctagctgtataggaggaattgcctaagggtggcccactcttgtgattgccccatttcctctggcaacaaaagccagagtgttgtgggccaagtccccccacagggcctctgcagggcatggccctgatttccctggtttgagactcacttcctcatctccctgtcctctgagataatatgagtgagcacttaggtatcatatcagatgctcaaggctggcagctacccccttcttgagagtccaagaacctggagcagaaataatttttatgtatttttggattaatgaatgttaaaaacagactcagctgtttctttccttttactactaccagttgctcccatgctgctccaccaggccctgtttcggatgccaactggcccactccccaagcacttgcccccagcttgcgaccattggcactgggagggcctggcttctgggctgatgggtcagttgggccttcataaacactcacctggctggctttgccttccaggaggaagctggctgaagcaagggtgtggaattttaaatgtgtgcacagtctggaaaactgtcagaatcagttttcccataaaagggtgggctagcattgcagctgcatttgggaccattcaaatctgtcactctcttgtgtatattcctgtgctattaaatatatcagggcagtgcatgtaaatcatcctgatatatttaatatatttattatattgtcccccgaggtggggacagtgagtgagttctcttagtccccccagagctggttgttaaagagcctggcacctacccgctctcacttcatctgtgtcatctctgcacactccagcccactttctgccttcagccattgagtggaagctgccccaggcccttaccaggtgcagatgcccaatcttgatgcccagccatcagaactgtgagccaaataaacctttttctgtataaa

SEQ ID NO: 39348 - DNA, 2282 bp, Artificial Sequence
  derived and/or modified sequence
agaaagcggaactgagcccgcgtgttctgaggccagggcagggctggagcgttctgaacacctccccgtcccagcccctgggccaggcaagggccggccttacctctcctgggttggtggcagcagagctgggctctgagggaggcctgcaatgtgagacagtagcagctcagaggcggcactaggcaggtgcaaccccaaaagacccctctgccatgaaccagtccatcccagtggctcccaccccaccccgccgcgtgcggctgaagccctggctggtggcccaggtgaacagctgccagtacccagggcttcaatgggtcaacggggaaaagaaattattctgcatcccctggaggcatgccacaaggcatggtcccagccaggacggagataacaccatcttcaaggcctgggccaaggagacagggaaatacaccgaaggcgtggatgaagccgatccggccaagtggaaggccaacctgcgctgtgcccttaacaagagccgggacttccgcctcatctacgacgggccccgggacatgccacctcagccctacaagatctacgaggtctgctccaatggccctgctcccacagactcccagccccctgaggattactcttttggtgcaggagaggaggaggaagaagaggaagagctgcagaggatgttgccaagcctgagcctcacagaggatgtcaagtggccgcccactctgcagccgcccactctgcggccgcctactctgcagccgcccactctgcagccgcccgtggtgctgggtccccctgctccagaccccagccccctggctcctccccctggcaaccctgctggcttcagggagcttctctctgaggtcctggagcctgggcccctgcctgccagcctgccccctgcaggcgaacagctcctgccagacctgctgatcagcccccacatgctgcctctgaccgacctggagatcaagtttcagtaccgggggcggccaccccgggccctcaccatcagcaacccccatggctgccggctcttctacagccagctggaggccacccaggagcaggtggaactcttcggccccataagcctggagcaagtgcgcttccccagccctgaggacatccccagtgacaagcagcgcttctacacgaaccagctgctggatgtcctggaccgcgggctcatcctccagctacagggccaggacctttatgccatccgcctgtgtcagtgcaaggtgttctggagcgggccttgtgcctcagcccatgactcatgccccaaccccatccagcgggaggtcaagaccaagcttttcagcctggagcattttctcaatgagctcatcctgttccaaaagggccagaccaacaccccaccacccttcgagatcttcttctgctttggggaagaatggcctgaccgcaaaccccgagagaagaagctcattactgtacaggtggtgcctgtagcagctcgactgctgctggagatgttctcaggggagctatcttggtcagctgatagtatccggctacagatctcaaacccagacctcaaagaccgcatggtggagcaattcaaggagctccatcacatctggcagtcccagcagcggttgcagcctgtggcccaggcccctcctggagcaggccttggtgttggccaggggccctggcctatgcacccagctggcatgcaataacaaggctgcagacggtgactggccctggcttcctgggtggcggtgcggactgatgtggagatgtgacagccccgatgagcacctggctggctgcagggtcctacctctgggtttcctggaagtggatttgggccaagaaggagagggagaaaggcccgagcccctgccttcccgggcctttctctcctgggctgtctctggtctggtcagcctggctctcgggaaattcagccatgagcagggaaagaactctcccaaccctggggcctagctgtataggaggaattgcctaagggtggcccactcttgtgattgccccatttcctctggcaacaaaagccagagtgttgtgggccaagtccccccacagggcctctgcagggcatggccctgatttccctggtttgagactcacttcctcatctccctgtcctctgagataatatgagtgagcacttaggtatcatatcagatgctcaaggctggcagctacccccttcttgagagtccaagaacctggagcagaaataatttttatgtatttttggattaatgaatgttaaaaacaga

SEQ ID NO: 39349 - DNA, 1497 bp, Artificial Sequence
  derived and/or modified sequence
atgaaccagagcatccccgtggcccccacccccccccggcgggtgcgcctgaagccctggcttgtggcacaagtcaatagctgccagtaccctggactccaatgggtgaatggtgaaaagaagctgttttgcatcccgtggaggcatgctactcggcacggccctagccaagatggagataatactatcttcaaggcctgggccaaggagactgggaaatacacagagggggtcgacgaggctgatccagccaagtggaaggctaacttgaggtgtgcgttgaataaaagcagggactttcgcctgatctatgacgggccacgggatatgcctccccagccctataagatctacgaggtgtgtagcaacggcccagctcccacagattcccagcccccagaagactatagctttggtgcaggagaggaggaggaagaagaggaggaattgcagagaatgctgccctcattgtccctaaccgaggacgttaagtggccaccaacgctccagccgcccacgttgcgtcctccaacactgcaacccccaaccctgcagcctccagtagtgctgggaccgcccgctccagatccctcaccactggcccctccccctggaaatcctgctggctttagggagctgctgtccgaggtgctggagccgggtcctctcccagcgagtctgcccccggccggtgagcaactgctacctgacctgctgatcagccctcatatgctccctcttacagatctggagattaagtttcagtacagagggagaccccccagggcactcaccatttcgaacccccacgggtgcaggcttttttacagtcagcttgaggcgacacaggagcaagttgaactgttcggacccatttctctcgagcaagttaggtttccaagtccagaagatatccccagtgacaagcagcgtttttataccaaccagttactggacgtcctggaccgcgggctgatcttgcagctgcaggggcaggatctgtacgcaattagactatgccagtgcaaggtattctggagtggcccctgtgcgtctgcacatgactcttgcccaaatcctatacaacgggaagtgaaaactaaactgtttagccttgagcattttcttaatgaactcatattgtttcagaaaggacagaccaacaccccacccccgttcgaaatcttcttctgctttggggaggagtggcctgaccgtaaaccccgcgagaagaagcttattactgttcaggtggttccagtggccgcccgcctactcctggagatgttcagcggagagctgtcttggagcgctgacagcattaggcttcagataagcaatcccgatctaaaagaccggatggtcgagcagtttaaggagctacatcacatttggcagtcccaacagagactgcagccggttgcccaagctcctccaggggcgggccttggtgtcgggcaagggccctggccgatgcatcccgccgggatgcagtag

SEQ ID NO: 39350 - DNA, 1497 bp, Artificial Sequence
  derived and/or modified sequence
atgaaccagagcatccccgtggcccccacccccccccggcgggtgcggctcaaaccttggcttgtagctcaggtgaacagctgtcagtatcctggtttgcagtgggtgaatggggagaagaagttattttgtatcccctggaggcacgcaactagacatggcccttcacaggacggtgataacaccatatttaaagcatgggcgaaagagactggcaagtatactgaaggggtggacgaggccgatcccgccaagtggaaagcaaacctgagatgcgctctgaataaatctcgtgatttcagattaatctatgacggtccccgcgacatgcccccccagccatacaaaatttatgaagtatgttctaatgggcctgctcctacggatagccagccaccagaggattactcctttggagccggggaggaagaggaagaggaagaagagctccaaaggatgctcccatccctgtctcttaccgaggacgtaaagtggccacctacattacagccccctaccctgcgaccaccgacactgcagcctcccacgctacagccaccagttgtattaggccctccagccccagatcctagtcctctagctcccccccctggaaaccccgccggtttccgggagttattaagtgaggtgctcgagcccgggcccctccctgcttctcttcctccagcgggtgaacaattgctgcctgacctgctgattagcccacacatgctcccgcttacagatctagaaattaagtttcagtaccgtggccgtcctccccgggcactgaccatatcaaacccacacgggtgccggttgttctatagccagctcgaagccacgcaggagcaggttgagctctttgggcccatttctctcgagcaggtgcggttcccctcccccgaagacatcccgagtgacaaacagaggttttacaccaatcaattgctagatgtgctggatagaggtctcattctacaactgcagggacaggacctgtacgccatacgcctgtgccaatgcaaagtattctggagtggtccatgtgctagcgcgcatgactcatgtccaaacccaatccagcgcgaggttaaaactaaactctttagcctagagcacttcctgaatgaacttatattgtttcagaaagggcagactaatacaccacccccctttgagatatttttctgctttggggaagagtggccagaccgaaaacctcgggaaaagaagctcataactgttcaagttgtgcccgtggcagcacgcctgctgctggagatgttttcaggggagctgagttggtctgctgacagcattcgcctacagatttcgaatccagacctgaaggatcgaatggtggagcaattcaaggagctgcaccacatctggcaatcacaacagagattacaaccagtagcacaggcccccccgggcgctgggttgggcgtaggtcaaggaccatggccaatgcaccctgcgggcatgcaatag

SEQ ID NO: 39351 - DNA, 1497 bp, Artificial Sequence
  derived and/or modified sequence
atgaaccagagcatccccgtggcccccacccccccccggcgggtgagattaaagccctggctggtcgcccaggtcaacagttgtcagtaccctggcctccaatgggtgaacggggaaaagaagctgttttgtatcccttggcgtcatgctactagacatgggcccagccaggacggagacaacacaatttttaaggcatgggctaaagaaaccgggaagtatacggaaggggtggatgaggccgatcctgctaagtggaaagccaacttacgttgcgcattgaataaaagcagagacttcagacttatctatgacgggcccagagacatgcctcctcagccctataagatttatgaagtctgctctaacggccccgcccctacggattcccagccccccgaagactattcgtttggagctggcgaggaggaggaagaagaagaggagctgcaaagaatgctgccatctctcagcctgactgaagacgttaagtggccacccaccctgcaaccgccaacactgcgaccaccaaccctgcaacccccgacgctgcagccccccgtagtgcttggaccacccgctcccgatccaagccctctggccccgccacctggaaaccctgctggatttcgcgagttgttgtccgaagtactcgagccaggccctctgccagcaagtctacccccagccggtgagcagcttttgccagacctcttaatttccccacacatgctgccattaactgatcttgagataaagttccaataccgcggcaggccaccgcgtgcacttaccatttctaacccacacgggtgcaggctgttctatagtcaactggaagctacccaggaacaagtggaattattcggtcccattagccttgagcaagtccggtttcccagtccggaggatatcccgtctgacaagcaaaggttttataccaaccagctgttagacgtattggatcggggattgatcttgcagctccagggtcaggacctctacgctatcaggctttgccagtgcaaagtcttctggagcggcccatgcgcaagcgctcacgattcttgccctaaccctattcaacgggaggtgaaaactaagctgttctccctggagcatttccttaacgagctgattctgttccagaaaggacaaaccaatacccccccccctttcgagattttcttttgctttggggaggagtggcctgacaggaagccccgcgaaaaaaaactgatcactgtacaggttgttccggtggcggcccgtcttctgctggagatgtttagcggcgaactgagttggtctgccgattccatccgcttgcagattagcaaccccgacctcaaagatcgaatggtcgagcagttcaaggagctacaccatatctggcagtctcagcagaggcttcagcccgtggctcaagctcccccgggtgcaggccttggcgtggggcagggcccatggccaatgcatccagccggaatgcagtag

SEQ ID NO: 39352 - DNA, 1497 bp, Artificial Sequence
  derived and/or modified sequence
atgaatcagtctatacctgtcgcgcctacccctcctcggcgagtgcgtctcaaaccgtggttggttgctcaggtaaatagttgtcagtaccccggtctgcaatgggttaacggtgaaaaaaagctcttttgcatcccctggcgtcacgcgacgcggcacgggccatctcaagatggagacaacaccatatttaaagcatgggcgaaagagactgggaagtacacggagggagtggacgaagctgatcccgctaagtggaaagctaatctgagatgtgctctgaacaagtcaagagattttagactgatttatgatgggcctagagatatgcctccacagccctataagatttacgaggtctgcagtaacggccctgccccaactgattcccaaccacccgaagattattccttcggcgctggagaggaggaagaagaggaagaggaacttcagaggatgctgccctctctgagtctgacagaagacgtgaagtggcccccaactctgcagcccccaaccttgcggcctcctacgctgcaaccccctaccttacagcctcctgtcgtcctcggccctccagctccagatccgagtcccctggctcccccaccaggcaaccctgctgggtttcgcgaattgctctctgaggttttggagccgggtccactgcctgcatctctgcctccggctggtgaacagctgctgcctgatctgctcataagcccccacatgctccctcttacagatctggaaatcaagtttcagtatcgtggcaggccaccaagagccctgacgatctcaaacccacacggctgccgcctgttttattcacagctagaagcgacccaagagcaggtggaactgttcgggcctatctctcttgaacaggttcggtttccctcccctgaggacatccccagcgataaacagcggttttatacaaaccagctcctggatgtcctagaccgagggctgattctgcagctgcaagggcaagacctttatgcaattcgcttgtgtcagtgtaaggtcttctggagtgggccttgcgcttctgcgcacgactcttgtcccaatccgatacagagagaagtgaagaccaaactgttctccctcgagcacttcctgaatgagcttattctgttccagaaaggccagactaacacaccgccacctttcgagatttttttttgctttggggaggaatggcccgacaggaaaccacgcgaaaagaagctcattacagttcaagtcgtgccggtggcagcccgtcttcttctcgagatgtttagtggcgaactgagctggtctgccgactctataaggctccagatcagcaaccctgacctgaaggacaggatggtggagcagttcaaggagctgcaccacatctggcaaagtcagcaacggctccagcccgttgcccaggctccaccgggtgctggcctcggagtcggacaaggaccctggcccatgcatcccgcaggtatgcaatag

SEQ ID NO: 39353 - DNA, 1497 bp, Artificial Sequence
  derived and/or modified sequence
atgaaccagtcgataccagtggcgcctacacccccaaggagagtgcggctgaaaccatggttagtggcacaggtgaactcctgccagtatcccggtttgcaatgggttaatggagagaaaaaactgttctgcatcccctggcggcacgcgactcggcacggccctagtcaagatggtgacaacaccatctttaaggcatgggctaaggagaccggcaagtacacagagggtgttgacgaagctgaccccgcaaagtggaaggctaacttgaggtgcgcccttaacaagtcccgcgattttcggctgatctatgacggtcccagggacatgcctcctcagccttataaaatttacgaggtgtgttcaaatggacccgctcccaccgattctcagccacctgaggattacagtttcggggcaggagaagaggaagaagaggaagaggagttgcagcgcatgcttccctcactgagtctgacggaggatgtaaaatggccccctactttacaacctccgacccttcggccacctactcttcagccccctacactacagcccccagttgtgttgggtccccctgctccagaccctagcccattggctccacctcctggtaaccccgctggatttagggagttgttgtccgaggttcttgagccaggcccactgcccgcatcgctgcctccagcaggcgagcagctgcttccggatctgctgatatctccccacatgcttcctctgacggacctggagatcaagttccaatataggggacgccctcctcgggctctaaccatttccaaccctcacggttgccgcctgttctactctcagcttgaggccacacaggaacaagtggaactttttgggcctatcagtcttgaacaggtacgctttccctcccccgaggacatccccagcgataaacagcggttctacaccaatcagcttcttgacgtgcttgaccggggtctgattctgcagctccaggggcaagatctgtacgccattagactttgccagtgtaaggtgttttggagcggcccatgcgccagtgcccacgatagttgtccgaacccgatccagcgggaggtgaaaactaaattgtttagtctggagcatttcctgaatgaactaatacttttccaaaaagggcagaccaacacaccccctccgttcgaaattttcttctgttttggcgaggaatggccagatcggaaaccacgcgaaaaaaagttaattaccgtgcaggtggtgcccgttgccgcacggctgctactggaaatgttctcgggggagctgtcttggagtgccgatagcataaggcttcagatctccaaccctgacttgaaagatagaatggtcgagcagttcaaggaattgcaccacatatggcagtcacagcagagattacagcctgttgcccaggctcctccaggggctgggctgggagtggggcagggcccatggcccatgcatccagccggaatgcagtag

SEQ ID NO: 39354 - DNA, 1497 bp, Artificial Sequence
  derived and/or modified sequence
atgaatcagtctatccctgtggccccaacaccgcctcggagggtccggttaaaaccctggctggtggcacaagtcaatagctgtcagtatcccggtctccaatgggtcaacggggaaaagaagttattctgtatcccttggcgccatgctacccgacacggtccgagccaggacggcgataacaccatcttcaaggcctgggccaaggaaacaggcaagtatacggaaggcgtggatgaagccgatcctgcgaagtggaaggccaacctgagatgcgcattgaataaatccagggatttccgtttgatctacgacggcccaagagatatgcccccacagccatataagatctacgaggtttgttctaacggacctgcccctacagacagtcagccacccgaagactattctttcggggctggagaggaggaagaagaagaggaagaattgcagaggatgctaccttccctgagcctcacagaggatgttaagtggcccccaacgctgcagccaccgaccctgcgaccacctaccttgcagccacccaccctgcaaccaccagtggtattaggccctcctgcacctgatccttcgccccttgctccaccaccgggtaacccggcaggttttagggagctgctttccgaagtccttgagcctggtcccctgccagcatcactgcccccagccggagagcaactgctgccggatctcctgatctccccccacatgttgcccctgaccgacctagagataaagtttcagtatcgagggaggccccctcgagctctaacaatcagtaatcctcatggatgtagactgttttattctcagctggaagcgacccaggagcaggtcgagttatttggccctatctcgttggaacaggtgcggttcccaagccctgaggacattccttctgacaagcagagattttatacaaaccagctgttagatgtgctcgacagaggactaatcctgcagcttcagggacaggatctctatgccattcgcctgtgtcagtgcaaggtgttctggagtggcccatgtgcctctgcacacgatagctgccctaatcccattcaacgagaagtgaaaacaaagctctttagccttgagcactttctaaatgagctcatcctgtttcagaaaggccagacaaacacgccaccaccgtttgaaatttttttttgtttcggcgaggaatggcctgataggaagcccagagaaaaaaagctgatcactgtccaggtcgtgccagtggccgctcggcttctcctggagatgttctccggggaattaagctggtccgccgacagtatcaggctgcagataagtaatccagatttgaaagacaggatggtcgagcagtttaaagaacttcaccatatctggcaaagccagcagcggctccagcctgtcgcccaggcacccccaggtgcaggcttgggcgtgggacagggaccctggcccatgcatcccgcagggatgcagtag

SEQ ID NO: 39355 - DNA, 771 bp, Artificial Sequence
  derived and/or modified sequence
atggccagcggcagacccgaggagctgtgggaggccgtggtgggcgccgccgagagattcagagccagaaccggcaccgagctggtgctgctgaccgccgcccccccccccccccccagacccggcccctgcgcctacgccgcccacggcagaggcgccctggccgaggccgccagaagatgcctgcacgacatcgccctggcccacagagccgccaccgccgccagaccccccgcccccccccccgccccccagccccccagccccacccccagcccccccagacccaccctggccagagaggacaacgaggaggacgaggacgagcccaccgagaccgagaccagcggcgagcagctgggcatcagcgacaacggcggcctgttcgtgatggacgaggacgccaccctgcaggacctgccccccttctgcgagagcgaccccgagagcaccgacgacggcagcctgagcgaggagacccccgccggcccccccacctgcagcgtgccccccgccagcgccctgcccacccagcagtacgccaagagcctgcccgtgagcgtgcccgtgtggggcttcaaggagaagagaaccgaggccagaagcagcgacgaggagaacggcccccccagcagccccgacctggacagaatcgccgccagcatgagagccctggtgctgagagaggccgaggacacccaggtgttcggcgacctgcccagacccagactgaacaccagcgacttccagaagctgaagagaaagtactag

SEQ ID NO: 39356 - DNA, 327 bp, Artificial Sequence
  derived and/or modified sequence
atggccagcggcagacccgaggagctgtgggaggccgtggtgggcgccgccgagagattcagagccagaaccggcaccgagctggtgctgctgaccgccgcccccccccccccccccagacccggcccctgcgcctacgccgcccacggcagaggcgccctggccgaggccgccagaagatgcctgcacgacatcgccctggcccacagagccgccaccgccgccagaccccccgcccccccccccgccccccagccccccagccccacccccagcccccccagacccaccctggccagagaggacaacgaggaggacgaggactag

SEQ ID NO: 39357 - DNA, 771 bp, Artificial Sequence
  derived and/or modified sequence
atggcctccggtagacctgaggagttatgggaggctgtggtgggcgccgccgagcgtttccgtgccaggaccggaaccgagctggttctgctgacagctgcccccccccctccacctcgtccaggtccgtgcgcctacgccgctcacgggagaggtgccctggcagaggccgccagacggtgcctccatgatatcgctctcgcgcacagagccgctactgcagcaagacctcccgccccccctccagcccctcagcctccttctccgactccctctccacctcggcctaccctggcgcgggaagacaacgaggaagatgaagacgagcccactgagacagaaacctcaggtgagcagctgggaatcagtgacaatggaggcctgttcgtgatggacgaagacgctacccttcaggacttgccgcccttttgcgagtccgaccctgagtccaccgatgacggatcactttctgaagagacacccgctggaccacccacctgttcagtacccccagcctccgccctcccaacccagcagtacgccaagtcactgccagtgtccgtgccagtgtggggcttcaaagagaaacgcacggaagcaagaagcagtgatgaagagaacggtcctccctcatctcctgatctggaccgcatcgccgcttcaatgagagctctggttttgcgcgaagccgaagacactcaagtgttcggagacctaccacgtccccggctcaacacatctgatttccagaaactaaaaaggaagtactag

SEQ ID NO: 39358 - DNA, 327 bp, Artificial Sequence
  derived and/or modified sequence
atggcaagcggcaggccagaggagctctgggaggccgtggtcggggcggctgaacgattccgcgcccgtactgggaccgagttggttctgctgaccgctgcccctcctccaccaccaagacctgggccgtgcgcatacgccgctcacggtcgcggggcactcgctgaagcagccaggcgttgcttgcacgacatagccctcgcccaccgcgccgccaccgctgcgcgtccccctgcccccccacctgcccctcaaccgccaagtcccactccctcacccccgagaccaacgctcgcccgtgaagataatgaggaggatgaggactag

SEQ ID NO: 39359 - DNA, 771 bp, Artificial Sequence
  derived and/or modified sequence
atggcaagtggcaggccagaggagctgtgggaggcagttgtaggggccgccgaacggttcagggccaggaccggaacagaacttgtgctcttaactgctgcccctccaccgcctccacgaccaggcccgtgcgcttatgcggcccatggcaggggtgccctggccgaagccgctcgaaggtgcctgcatgatatcgccttggcacaccgtgctgccaccgctgcacgccccccagcacccccaccagcaccgcagccccctagcccaactccttctcccccgcggccaacactggcgcgcgaagataacgaggaagacgaggatgagcccacagaaaccgaaaccagtggggaacaactcggtatttctgacaacggaggcctgttcgtgatggacgaagatgctacactgcaggacctgccgccattctgtgagagcgatcctgaatccacggacgacggctcactctccgaagagactcccgcgggtccgccaacttgttctgtgccacctgcatccgcactgcctacccagcagtacgctaagtcattacctgtgagcgtacctgtttgggggttcaaggagaaacggacagaagcccggagcagcgatgaggaaaatgggccaccctctagtccggatttagaccggatcgcagcttctatgagggctctcgtcttgcgggaagccgaagatacacaggtcttcggagatctgccgcgcccacgacttaacacctccgatttccagaagctcaagcggaagtattag

SEQ ID NO: 39360 - DNA, 771 bp, Artificial Sequence
  derived and/or modified sequence
atggcaagtggtaggccggaggaactctgggaagctgtggttggcgccgcagaaaggttccgcgccaggactgggacggaattggtgctgcttacagcagccccccccccccctccccggcccggcccctgtgcctatgcagcccatggacgtggagctcttgctgaggcagctcgtaggtgcctacatgatatcgcgcttgcccaccgggctgccaccgccgctaggccccccgcccccccgcccgctcctcagccacctagtcctacaccaagccctccccgaccgacattggcccgagaagacaacgaagaagacgaagatgagcctacagagacagagacatcaggagaacagctggggatctcagacaacggaggattatttgtaatggacgaggacgctactcttcaggatcttcctccgttttgtgaatctgaccctgaatcaacagacgacggttccctttccgaggagaccccggccggcccacctacctgctccgtgcccccggccagcgccctgcccactcagcagtacgcaaagtcattgcccgtttcagtaccagtgtggggcttcaaagagaagaggactgaggcccggagcagcgacgaggaaaacggcccaccctcatcacctgatctcgaccggatagcggcatctatgcgcgccctggtgttgagggaggccgaagatacacaggtattcggggatctacctcggccccgacttaacacctctgactttcagaagctgaagcgcaaatactag

SEQ ID NO: 39361 - DNA, 771 bp, Artificial Sequence
  derived and/or modified sequence
atggcctctggcagaccagaagagctgtgggaggcagtggtcggggccgctgagcgttttagagcccggactggcaccgaactcgtgctgctgactgctgctccaccccctcccccgcgacctggcccatgcgcctacgcagcccacggccgcggcgccctagctgaggcagcccggaggtgtctgcacgacatcgcccttgcccaccgcgctgctaccgcagcccgccctcctgctcccccacctgcgccgcagcctccgtctcccacaccgagtccccccagacccacactcgccagggaagacaacgaagaagacgaagatgagcctactgagacagagacctcgggcgagcaactaggcatctctgataatggcggcctgttcgttatggacgaagatgcgacgctccaggatttgcccccgttctgtgagtcggatcccgagagcactgacgatgggtccctttccgaagagactcccgctggaccgccgacatgctccgtgccacccgcaagtgccttgccaacacagcaatacgctaagtccctccctgtctcagtccccgtctgggggttcaaggagaaacgtaccgaggcaaggtcatctgatgaggagaatggtcctccctccagccctgatttagaccgcatagccgcctccatgcgggccttggtactgcgcgaagctgaagatactcaggtgtttggtgatctaccgcgtcctagactgaatactagtgacttccagaagctgaaacgcaagtattag

SEQ ID NO: 39362 - DNA, 771 bp, Artificial Sequence
  derived and/or modified sequence
atggcttctggcaggccagaagagctatgggaggccgtagtcggagctgccgaaagatttcgagctaggactggcacagaattagtgttgcttacagccgcacccccaccccctccccgaccgggaccatgtgcttacgctgcccatgggcggggggctctcgccgaggccgcccggcgctgcctgcacgatatcgctctggcccatcgtgccgccactgccgcgcgtcccccagctccgcccccagccccacagcctccctccccgaccccaagtcccccacgaccaaccctggcccgcgaggacaatgaggaagatgaagacgaaccaacagagaccgaaacaagcggtgaacaactggggatttcagacaacggcggtctgttcgttatggatgaagatgctacactgcaagatctgcctccgttctgtgagagcgatccggaatctaccgacgacggaagcctgtcagaggagacgccagccggtcctccaacctgtagcgtgccgcctgcttcagctttgccaacccagcaatacgcaaaatccctgcctgttagcgtccccgtgtggggattcaaggagaagcgaactgaggcccggagcagtgacgaggaaaatggacctccaagtagtcctgacttggacaggattgccgcttctatgcgcgctctcgtgctgagggaggcagaggatacccaggtgtttggcgacctgccacgcccccgactgaatacctcagatttccaaaaactgaaaagaaagtactag

SEQ ID NO: 39363 - DNA, 771 bp, Artificial Sequence
  derived and/or modified sequence
atggccagcggccggcctgaggagctgtgggaggccgtggtgggcgctgctgagcgcttccgggccaggactggaacagagctggtgctgctgacagctgcccctcctcctccacccaggcctggcccctgtgcctatgctgcccacggccgcggggccctggccgaggccgcccggcgctgcctgcatgacatcgccctggcccacagagctgccacagctgcccggcccccagcccctcctccagccccccagccccccagccccacccccagccccccccggcccaccctggccagagaagataatgaagaagatgaagatgagcccacagaaacagagaccagcggggagcagctgggcatcagtgacaatggaggcctgtttgtgatggatgaagatgccaccctgcaggacctgccccccttctgtgagagtgaccctgagagcacagatgatggcagcctgtctgaggagaccccagctggcccccccacctgcagcgtgcccccagccagcgccctgcccacccagcagtatgccaagagcctgcctgtgtctgtgcctgtgtggggcttcaaggagaagaggacagaggcccggagcagtgatgaggagaatggaccacccagcagcccagacctggacagaattgctgcctccatgagggccctggtgctgcgggaggccgaggacacccaggtgtttggagacctgccccggccccggctgaacaccagtgacttccagaagctgaagaggaagtactag

SEQ ID NO: 39364 - DNA, 327 bp, Artificial Sequence
  derived and/or modified sequence
atggccagcggccggcctgaggagctgtgggaggccgtggtgggcgctgctgagcgcttccgggccaggactggaacagagctggtgctgctgacagctgcccctcctcctccacccaggcctggcccctgtgcctatgctgcccacggccgcggggccctggccgaggccgcccggcgctgcctgcatgacatcgccctggcccacagagctgccacagctgcccggcccccagcccctcctccagccccccagccccccagccccacccccagccccccccggcccaccctggccagagaagataatgaagaagatgaagattag

SEQ ID NO: 39365 - DNA, 771 bp, Artificial Sequence
  derived and/or modified sequence
atggccagcggccggcccgaggagctgtgggaggccgtggtgggcgctgctgaaaggtttcgggcacgcaccggaaccgaattagttctattaactgccgctcccccccccccaccgaggccgggtccctgtgcgtacgcagcccacggccgaggggcacttgccgaggctgcgcggagatgcctgcatgatatcgccctggcccatagggcggcaacggccgctagaccaccagctccgcctcccgccccgcagccaccttccccaactcccagcccaccgcggcctacgctcgcccgagaggataatgaagaggacgaagatgaacccacagaaacagaaacatccggcgagcaactgggtatcagcgataacggcggactattcgtgatggatgaggacgccacattacaggaccttcccccattttgtgaatctgaccccgagagcactgatgacggaagcctttcggaggaaacgccagctggcccacccacctgttccgtacccccagcctctgcactgcccactcagcaatatgcaaagtctcttcctgtgagtgtccctgtctggggctttaaagagaagaggacagaggcccgcagctcagacgaggagaacggccccccttcatcccccgacctggaccgtatcgctgcttccatgcgtgctctggttctgcgagaggctgaggatactcaggtgttcggcgatttgcccaggccccggttgaatacttcggactttcagaagcttaaaagaaaatactag

SEQ ID NO: 39366 - DNA, 327 bp, Artificial Sequence
  derived and/or modified sequence
atggccagcggccggcccgaggagctgtgggaggccgtggtgggcgcagcagagcgattccgcgcccgtacagggacagagttagtattactcacggctgcacctcctcctcctcctcggccagggccctgtgcatatgcagcacatggcagaggggctctcgcagaggccgctaggaggtgcctccatgatatcgctttggcccatcgggccgctactgcggccaggcctccagccccaccacctgcaccacaaccacccagtcctacaccatcacccccgcggccaactctagcgcgagaggacaacgaggaggatgaagactag

SEQ ID NO: 39367 - DNA, 771 bp, Artificial Sequence
  derived and/or modified sequence
atggccagcggccggcccgaggagctgtgggaggccgtggtgggcgccgcagagagattcagagccagaaccggaactgagcttgtgctcctgactgctgcgccacccccacctccccgacctggaccatgtgcttacgcagcgcatggccggggcgccctggccgaagccgccaggaggtgtctgcatgacatcgcactggcacacagggctgcgaccgcagcgcggcctcctgcacccccacccgcccctcagcctccttcacccaccccatctcccccgcggcctaccctggcccgggaagacaatgaagaggatgaagatgaacccaccgaaaccgagacgagtggtgaacagctcggcatttcagacaacggtgggctgttcgtgatggacgaggacgctaccctgcaggacctgcctcctttctgcgaatctgaccctgagtccactgatgacggctcccttagtgaagagacccccgctggccctcctacctgtagtgtcccaccagcatctgccctccccacacagcaatacgccaaaagcctgcccgtgtcagtgcccgtatgggggtttaaagagaaacgcacggaggcacgttcatcagacgaggagaacggtcctccaagtagtcccgacttggatcggatcgccgccagtatgcgtgcattggtgttgcgggaagcggaagatacacaggtcttcggagatctgccacgcccacgactcaacaccagcgatttccagaagctcaagcgcaagtactag

SEQ ID NO: 39368 - DNA, 771 bp, Artificial Sequence
  derived and/or modified sequence
atggccagcggccggcccgaggagctgtgggaggccgtggtgggcgctgcagaaaggttccgcgcaaggacagggacagaactcgtgctcctgacagcagcaccccccccaccaccgcgtcctggcccttgtgcctacgctgctcatggtcggggggctttggcggaggcagcccggagatgcctgcacgacatagcacttgcccatcgggccgctaccgccgcacgacctccggcgcctccccctgcaccacagccccccagccccactccctctccccccagacctacgctggcccgagaagacaatgaagaggatgaagacgaaccaacagaaactgagacgagcggcgagcagttaggaatctcagataacggcggcctgtttgttatggatgaggacgccactcttcaggacctcccaccattctgtgaatccgacccagaatcaaccgatgacggcagcctgagcgaggaaactcctgccggacctcccacctgtagtgtcccacctgcctcagctttaccgacacagcagtacgccaaaagtctgcctgtctctgtgcccgtctggggattcaaagaaaagcgaaccgaagctcgctcgtcagatgaagagaatggcccaccctcatcccccgatcttgatcgcatcgctgccagtatgcgggctctcgtcctgcgtgaggctgaggatacccaagtgttcggagatctgcctcgcccgcggcttaatacttcagattttcaaaaactcaaaagaaagtattag

SEQ ID NO: 39369 - DNA, 771 bp, Artificial Sequence
  derived and/or modified sequence
atggccagcggccggcccgaggagctgtgggaggccgtggtgggcgcggctgagagattcagggccagaacagggaccgagctagtgttacttactgcagctccacctcccccaccgcgcccgggaccttgcgcctacgctgcccatgggagaggcgccctggctgaagccgccaggagatgcctgcatgacatagccctggcacatcgtgccgccacagctgcacggcccccagctcccccacccgctccgcaaccgccctccccaacgcccagtccacccagacccacattggccagggaggacaacgaggaggacgaggatgagccaaccgagaccgagacaagcggagagcaactaggcatttccgataacggtgggctgtttgttatggatgaagacgccacccttcaagacttgcctcccttctgcgagtctgatcccgaatccacggacgatggatccctctccgaagaaacaccggcagggcctccaacctgcagcgtcccacccgcttccgctctccctacacagcagtacgctaagtctctgccagtaagtgtaccagtctggggtttcaaagagaaacgaactgaagcccggtcaagcgatgaagaaaatggtccgccatcttctccagatttggatcgcatcgccgcaagcatgagggccctcgtattgcgcgaggctgaggacacacaggtttttggcgacctgccgaggcctcgccttaacactagcgattttcaaaaattgaaaagaaaatattag

SEQ ID NO: 39370 - DNA, 771 bp, Artificial Sequence
  derived and/or modified sequence
atggccagcggccggcccgaggagctgtgggaggccgtggtgggcgctgcggagagattccgcgccagaactggaacagagctggtgcttttgacagctgcaccacccccccctccacggccagggccttgcgcttacgccgcgcatggcaggggtgcattggccgaagctgccaggagatgcttgcatgacatcgccctggcgcatcgtgccgccactgcggcgcggccccccgcaccacctcctgccccccaacctcctagcccaactcctagtccgcctagacccacattagcacgagaagacaatgaagaggacgaagacgagccaacggaaacagaaacctccggtgaacagttaggaatttctgataatgggggtctattcgtgatggacgaggacgcaaccttgcaggaccttccacccttctgtgagagcgatccagaatcaacggacgacggcagcctcagcgaagaaacccctgccggtccacccacatgttcagtcccaccggcttcggctttaccaacacagcagtatgcaaaaagcttgccagtttcggtccctgtgtggggcttcaaggagaagagaaccgaggccaggtccagtgatgaggagaatggcccccccagctccccagacttggataggatagcagcctcaatgcgggcgctcgtgttgcgcgaggcagaggatactcaagtgtttggcgatttgccacgtccacggcttaatacatcagacttccagaagttgaaacgaaagtactag

SEQ ID NO: 39371 - DNA, 771 bp, Artificial Sequence
  derived and/or modified sequence
atggccagcggcagacctgaggagctgtgggaggccgtggtgggtgccgcagaacgattccgagctaggacagggactgaactggtcttactgaccgccgcacccccaccaccccctagaccaggcccttgcgcatacgccgcacatggacgtggggcactggctgaggccgctcgaagatgcctgcacgacattgctctggcccatcgcgcagccactgctgctcggcctcctgccccaccccctgcccctcaacctccctcaccaacgccgtccccaccacggcctacccttgccagagaggacaatgaggaagatgaggacgagcccacggaaactgagacatcaggggaacagctaggcatttccgacaatggagggctctttgtcatggatgaggatgcgacactccaggaccttcccccattctgtgaatccgatcccgagagcaccgatgatggaagcctgtccgaggagaccccagctggccctccaacctgcagcgtcccccctgcatcagctcttcctacacaacagtatgctaaatccctgcctgtgtccgttccagtatggggattcaaagagaaacgaacagaggccagaagctcagatgaagaaaatgggcctccttcaagcccagacttggacaggatagcagcttctatgcgcgctctagtcttgagggaggccgaggatacgcaggtgttcggagacctgccaagacctcgcctgaatacctccgacttccagaaactgaagcgcaagtactag

SEQ ID NO: 39372 - DNA, 327 bp, Artificial Sequence
  derived and/or modified sequence
atggcctctggacgtccagaggagctgtgggaagccgtggtgggagcagccgagcggttccgggcacggacgggtactgaactggtccttcttacagctgctccgcctcctcccccaaggccaggaccgtgcgcgtacgccgcacacgggcgaggcgctttagcggaggccgcacggcgatgcctgcatgacattgcattagcccatcgtgccgctacagccgcaaggccccctgcaccaccccctgccccacagcccccatctcctaccccatccccaccacgcccaacactggcgagggaagacaatgaggaagacgaggactag

SEQ ID NO: 39373 - DNA, 771 bp, Artificial Sequence
  derived and/or modified sequence
atggcctccggacgccctgaggagctctgggaggccgtggtgggggctgctgagagattcagagcccgaaccgggactgagctagttttgctgaccgccgctcctcccccacctccaagacccggaccttgcgcgtacgccgcacacggcaggggcgctctggccgaggcagccaggagatgcctgcacgacatcgctctggcccacagagcggctactgccgctcggccacccgcacctccccctgctccccaacccccttccccaacccctagccctccccgacccaccctggccagggaagacaacgaagaagatgaggatgagcccaccgagacggaaacgtcaggcgagcaattgggaatcagcgataacggaggactcttcgtcatggatgaagacgcaactttgcaggacctaccccctttttgcgagtcagacccagagagcaccgacgacggatcactgagcgaggagaccccagccggaccacccacgtgtagtgttcctccagcttccgcactgccaacacaacagtatgccaagtctctgccagtgagcgttccagtgtggggcttcaaagaaaagcggacagaggcacgctctagtgatgaagaaaatggacctccctcctcaccagacctggataggatcgctgcatccatgcgggcactggtgctcagagaggcagaggatactcaggtctttggggatctccccagacccaggctcaacacgagtgattttcaaaaattgaaacgaaaatactag

SEQ ID NO: 39374 - DNA, 771 bp, Artificial Sequence
  derived and/or modified sequence
atggccagcggcagaccagaggagctgtgggaggccgtggtaggcgctgcggaaaggttcagagccaggactgggaccgagctggtgctgttgacagccgctccacccccacccccacgccctggcccttgcgcttacgcagcccacggtcgcggagctttggctgaggccgctaggaggtgtctgcatgacatcgcgcttgctcaccgcgctgcaacagctgcccgacctcccgctcccccacccgcaccacagcccccatcccctacgccaagtccgccacgcccaaccttagcacgcgaggacaatgaagaggatgaggatgaaccgaccgagacagaaacgagcggcgagcagctgggcatttctgacaacggcggactgttcgttatggatgaggatgccaccctccaggatctcccaccgttctgtgaatccgatcccgaatcgacagacgatggtagtctgtccgaggagacccctgccggaccgcctacatgctccgtgcctccagctagtgctcttccgacccagcagtatgcaaaaagtctgccggtatcagtccccgtctggggctttaaagaaaaacgtaccgaagccaggtccagtgacgaggaaaatggccctcccagcagccccgacctcgataggatcgctgccagtatgagggcattagttctaagagaagccgaggacactcaggtgtttggtgatctgcccagacctagattgaatacctcagactttcagaagctgaagaggaaatattag

SEQ ID NO: 39375 - DNA, 771 bp, Artificial Sequence
  derived and/or modified sequence
atggctagcggcaggcccgaggaactttgggaagcggtggtcggggctgccgaaagattccgcgcacggaccgggaccgaactggttctcttaactgcagcaccccctccccctcctcgccctggcccatgcgcctacgcagcccacggcaggggtgcgttggccgaagctgccagacggtgcctgcacgatatcgcactagctcatcgggcagcgacggccgcacgtccccctgcccctcctcccgctcctcagcccccttccccaaccccatccccaccaagaccaacactcgccagagaggataatgaggaagatgaagatgagccaactgagaccgaaacgtccggtgaacagctggggatttcagacaatggaggactctttgtcatggacgaggatgccacactgcaggacctgccccctttctgtgagtcagatcctgaaagcaccgatgatggcagcctgagcgaagagacacccgcaggaccaccaacctgctctgtacccccagcctctgcgctgcctacacagcagtacgcaaaaagcctccctgtgagtgtgccagtgtggggctttaaagaaaagcgaactgaagccagaagttctgatgaggaaaatggacccccttccagtcccgacctggataggatcgcagctagcatgcgggctctcgtgctgcgggaggcagaggacacacaggtatttggtgacctacctcggccaagattgaacactagcgactttcagaagctgaagcgtaagtattag

SEQ ID NO: 39376 - DNA, 771 bp, Artificial Sequence
  derived and/or modified sequence
atggcctcagggaggcctgaggaactctgggaggccgtagtgggtgctgctgagcgttttagggcgcgaaccggcaccgagctggtactcctgacagctgctcccccaccccctccccgacctggcccttgtgcctatgccgcacatggccgtggcgcattggctgaggccgcaagacggtgccttcacgatatagcactggctcaccgggctgccacggctgcacggccaccagcacctcctcccgctccccagcctccaagcccaacaccctctccaccccgaccgacattggcccgagaggataacgaagaagatgaggacgagccaaccgagaccgagacctcaggcgagcagctcgggatttccgataacggaggtctgttcgtcatggacgaagatgcgactctgcaggacctgccaccattttgtgagtctgatcctgagtccacagatgatggcagcctgtcagaggaaacccctgccggaccccctacttgctctgttcctcccgcatcagcacttccaacccagcagtatgctaaaagcctacccgtctctgtgccggtgtggggttttaaggaaaagcgtactgaggctcgctcttccgatgaggaaaatggccctccatccagccctgatctcgataggatcgccgcatcaatgcgggctctggttctgcgcgaagccgaagacacccaggtgtttggcgatctgcccagacccagacttaacacttccgatttccagaaattgaaaagaaagtactag

SEQ ID NO: 39377 - protein, 593 aa, Artificial Sequence
  derived and/or modified sequence
MTAEDSTAAMSSDSAAGSSAKVPEGVAGAPNEAALLALMERTGYSMVQENGQRKYGGPPPGWEGPHPQRGCEVFVGKIPRDVYEDELVPVFEAVGRIYELRLMMDFDGKNRGYAFVMYCHKHEAKRAVRELNNYEIRPGRLLGVCCSVDNCRLFIGGIPKMKKREEILEEIAKVTEGVLDVIVYASAADKMKNRGFAFVEYESHRAAAMARRKLMPGRIQLWGHQIAVDWAEPEIDVDEDVMETVKILYVRNLMIETTEDTIKKSFGQFNPGCVERVKKIRDYAFVHFTSREDAVHAMNNLNGTELEGSCLEVTLAKPVDKEQYSRYQKAARGGGAAEAAQQPSYVYSCDPYTLAYYGYPYNALIGPNRDYFVKAGSIRGRGRGAAGNRAPGPRGSYLGGYSAGRGIYSRYHEGKGKQQEKGYELVPNLEIPTVNPVAIKPGTVAIPAIGAQYSMFPAAPAPKMIEDGKIHTVEHMISPIAVQPDPASAAAAAAAAAAAAAAVIPTVSTPPPFQGRPITPVYTVAPNVQRIPTAGIYGASYVPFAAPATATIATLQKNAAAAAAMYGGYAGYIPQAFPAAAIQVPIPDVYQTY

SEQ ID NO: 39378 - DNA, 4056 bp, Artificial Sequence
  derived and/or modified sequence
agactagacgctgagcgctcccgtgcgcagcgccccacgcagccgggacgcggcgccgctctgcgggtggaaccgccgcgcgctcccggcctcgggagctgagcccgagagaacttcgctgccttcgggtcgccgctcccgctttccactgtggaatgtgcagcttgggatagagagaaaccagggtttggggagcggtcctcctggagactttctctctgcaagtctccaaggttaagcaattctgacccactggaattcccagagcctgggagttaagcctaaaacgctctgttgctttaagcggcgcggtggggagtcgctggacactccttattttggttttacattaaaaagaaggcggacgagaagatgttgtaggtgacttcctagctgtgttaagttgctcctgggctgtgaatggtgttaatttctgaagtgggcggctccaaaaacttaacaaggaaagctcaggtaacggaggccttggaaagagactctgcgtcaggtcacccagcagagatcagcaatccttggctcactgaggaggtttggatttgcctcaaagggcactgcaaaaattgaacagaggaatcccaaggaagctgcctgaatttgcctgtatactctcgttctgcgacttataaaggaccagacaaatcaaattagtggttttggtttccgccagctgtggatgcctttgacattatgaccgcagaggattccaccgcagccatgagcagtgactcggccgccgggtcctccgccaaggtgcccgagggcgtggcgggcgcgcccaacgaggcagcactgctggcgctgatggagcgcacgggctacagcatggtgcaagagaacgggcagcgcaagtacggcggcccaccgcccggctgggagggcccgcacccgcagcgtggctgcgaggtcttcgtgggcaagatcccgcgcgacgtgtacgaggacgagctggtgcccgtgttcgaggccgtgggccgcatctacgagctgcgcctcatgatggactttgacggcaagaaccgcggctacgccttcgtcatgtactgccacaagcacgaggccaagcgcgcagtgcgtgagctcaacaactacgagatccgcccgggccgcctgctcggcgtgtgctgcagcgtggacaactgccgcctcttcatcggcgggatccccaagatgaagaagcgcgaggaaatcctggaggagattgccaaggtcaccgagggcgtgctggacgtgatcgtctacgccagcgcggccgacaagatgaagaaccgcggcttcgccttcgtggagtacgagagccaccgcgcggctgccatggctcgccgcaagctcatgcctggccgcatccagctgtggggccaccagatcgccgtggactgggccgaacctgagatcgacgtggacgaggacgtgatggagaccgtgaagatcctctacgtgcgcaacctcatgatcgagaccaccgaggacaccatcaagaagagcttcggccagttcaaccccggctgcgtggagcgcgtcaagaagatccgcgactacgccttcgtgcacttcaccagccgcgaggatgccgtgcatgccatgaacaacctcaacggcactgagctggagggctcgtgcctggaggtcacgctggccaagcccgtggacaaggagcagtactcgcgctaccagaaggcagccaggggcggcggcgcggctgaggcagcgcagcagcccagctacgtgtactcctgcgacccctacacactggcctactacggctacccctacaacgcgctcattgggcccaacagggactactttgtgaaagcaggcagcataagaggccgagggcgaggtgcagctggcaacagagccccagggcctaggggttcctacctcgggggatattctgctggtcgtggtatatatagccgatatcatgaagggaaaggaaagcagcaagaaaaaggatatgaactggtgccgaatttggaaatccctaccgtcaacccagttgccattaaacctggtacagtagccatccctgccattggggctcagtattccatgtttccagcagctccagcccctaaaatgattgaagatggcaaaatccacacagtggagcacatgatcagccccattgctgtgcagccagacccagccagtgctgctgccgccgcagccgcggccgcagccgccgcagccgctgtcattcccactgtgtcgacgccaccacctttccagggccgcccaataactccagtatacacggtggctccaaacgttcagagaattcctactgccgggatctacggggccagttacgtgccatttgctgctccagctacagccacgatcgccacactacagaagaacgcggcagccgcggccgccatgtatggaggatacgcaggctacatacctcaggccttccctgctgctgccattcaggtccccatccccgacgtctaccagacatactgaggctggtgaccagcacgaagacagaccacacaaacaccactgaaggaacgcttgactatttatgaagaaggaacatgttggattcacacatgcaacctgaaagtgaagaatgttagcagatttatttctgaattattttatatacatgaagttttcactagttttttaagactattttcaacttagcatgcctacgttcatacatttccaaaagacttgcaatggttcgtgccttcattccatcttttaaaaatttgtatgctgtactacatttgtatagaggtttttgttgttgtttttttaaggatatattttcagtatgaaggttattttcttaacttctgcactccagagatttctattttgtagtaccttcaataatatatcaactatatattaaaaaagcacacttgaggagctagggaactattttgaaaaatatatacaatatttaaagatacaaacagtagtgcttaaaaatactacataaagcattattttaaaggttatactggaaagtgcaattttaaaatgagtaaaacctctgtatttctgctggcattaagggttgatggtgttaccatgtatcatcatggcggtactattttttaaaagaaattaaacactggatctctccttaagccaacattgaaaagacttgccgcacttctgagtccaaacactggaaagctctcctttgccaccgttagccggggctcattctccatgtgccttagccttaaacatgcccccactcccacatctctcaccctgtcccctcctccccagattcccaatcccaccgcaatgtttggcaagcctaggactgataagtagctctgatagaggagctggtggcttttatacttcttcctgggtttttgttggggtttgttgtttcgttgttttttgtttttttttttgtttggttggggaagtattgtcttctacgtgtgctattttcagtagcagagtaagcacaaggttttaatcgagttgcataagacacctttgcatagctatttaattgcccaatgtaaaactttaatgccatttctaatgcttttattcatttttgaagtatgagtttgtagggacaaagaatgtatgttatcgtagacaagacccccagagactcttttcagcagaaagttatgcttctagttgccttaccatgtttcttgcaaaactgtccatggtcctcaagggtgttggaaacattatgtttattaaatgggcctctcttcctttgctgtgcacttgatgggtgaactggattggggtgtgcacatccaggaggaggaggagagacctgtagaagtttaaagatagtttgtaaatatcttctaatgcttgtttttagtccttttatgttggagaagttcatggtatgtagtttaatgcaaaatgaaaccattttatttcaatgttattaaaaaggtttgttttattaggaagttaatgtattgttgcagtgttttgtgcctgtttaaaggcttttgtttagcagagtgaatgtaaaatacagtaaaatgttaagattgtcatctactttttaaaaaaaaa

SEQ ID NO: 39379 - DNA, 4816 bp, Artificial Sequence
  derived and/or modified sequence
aaggggaagtgtggaaatagagcctgcttgttcattttcattattgtacattacatgatatcttttcgaccattatattgtgttccctcagtggtgtttgctctgagggtgggacacaagcctgtttagtgtctcgtaaaacatttaccaaaagcactgagccatggtttttgaagggcattccgttgccagagtgtgggaggagagagcaagcagggaaagagagcgccaggtgcttagcaggatttgcctcaaagggcactgcaaaaattgaacagaggaatcccaaggaagctgcctgaatttgcctgtatactctcgttctgcgacttataaaggaccagacaaatcaaattagtggttttggtttccgccagctgtggatgcctttgacattatgaccgcagaggattccaccgcagccatgagcagtgactcggccgccgggtcctccgccaaggtgcccgagggcgtggcgggcgcgcccaacgaggcagcactgctggcgctgatggagcgcacgggctacagcatggtgcaagagaacgggcagcgcaagtacggcggcccaccgcccggctgggagggcccgcacccgcagcgtggctgcgaggtcttcgtgggcaagatcccgcgcgacgtgtacgaggacgagctggtgcccgtgttcgaggccgtgggccgcatctacgagctgcgcctcatgatggactttgacggcaagaaccgcggctacgccttcgtcatgtactgccacaagcacgaggccaagcgcgcagtgcgtgagctcaacaactacgagatccgcccgggccgcctgctcggcgtgtgctgcagcgtggacaactgccgcctcttcatcggcgggatccccaagatgaagaagcgcgaggaaatcctggaggagattgccaaggtcaccgagggcgtgctggacgtgatcgtctacgccagcgcggccgacaagatgaagaaccgcggcttcgccttcgtggagtacgagagccaccgcgcggctgccatggctcgccgcaagctcatgcctggccgcatccagctgtggggccaccagatcgccgtggactgggccgaacctgagatcgacgtggacgaggacgtgatggagaccgtgaagatcctctacgtgcgcaacctcatgatcgagaccaccgaggacaccatcaagaagagcttcggccagttcaaccccggctgcgtggagcgcgtcaagaagatccgcgactacgccttcgtgcacttcaccagccgcgaggatgccgtgcatgccatgaacaacctcaacggcactgagctggagggctcgtgcctggaggtcacgctggccaagcccgtggacaaggagcagtactcgcgctaccagaaggcagccaggggcggcggcgcggctgaggcagcgcagcagcccagctacgtgtactcctgcgacccctacacactggcctactacggctacccctacaacgcgctcattgggcccaacagggactactttgtgaaagcaggcagcataagaggccgagggcgaggtgcagctggcaacagagccccagggcctaggggttcctacctcgggggatattctgctggtcgtggtatatatagccgatatcatgaagggaaaggaaagcagcaagaaaaaggatatgaactggtgccgaatttggaaatccctaccgtcaacccagttgccattaaacctggtacagtagccatccctgccattggggctcagtattccatgtttccagcagctccagcccctaaaatgattgaagatggcaaaatccacacagtggagcacatgatcagccccattgctgtgcagccagacccagccagtgctgctgccgccgcagccgcggccgcagccgccgcagccgctgtcattcccactgtgtcgacgccaccacctttccagggccgcccaataactccagtatacacggtggctccaaacgttcagagaattcctactgccgggatctacggggccagttacgtgccatttgctgctccagctacagccacgatcgccacactacagaagaacgcggcagccgcggccgccatgtatggaggatacgcaggctacatacctcaggccttccctgctgctgccattcaggtccccatccccgacgtctaccagacatactgaggctggtgaccagcacgaagacagaccacacaaacaccactgaaggaacgcttgactatttatgaagaaggaacatgttggattcacacatgcaacctgaaagtgaagaatgttagcagatttatttctgaattattttatatacatgaagttttcactagttttttaagactattttcaacttagcatgcctacgttcatacatttccaaaagacttgcaatggttcgtgccttcattccatcttttaaaaatttgtatgctgtactacatttgtatagaggtttttgttgttgtttttttaaggatatattttcagtatgaaggttattttcttaacttctgcactccagagatttctattttgtagtaccttcaataatatatcaactatatattaaaaaagcacacttgaggagctagggaactattttgaaaaatatatacaatatttaaagatacaaacagtagtgcttaaaaatactacataaagcattattttaaaggttatactggaaagtgcaattttaaaatgagtaaaacctctgtatttctgctggcattaagggttgatggtgttaccatgtatcatcatggcggtactattttttaaaagaaattaaacactggatctctccttaagccaacattgaaaagacttgccgcacttctgagtccaaacactggaaagctctcctttgccaccgttagccggggctcattctccatgtgccttagccttaaacatgcccccactcccacatctctcaccctgtcccctcctccccagattcccaatcccaccgcaatgtttggcaagcctaggactgataagtagctctgatagaggagctggtggcttttatacttcttcctgggtttttgttggggtttgttgtttcgttgttttttgtttttttttttgtttggttggggaagtattgtcttctacgtgtgctattttcagtagcagagtaagcacaaggttttaatcgagttgcataagacacctttgcatagctatttaattgcccaatgtaaaactttaatgccatttctaatgcttttattcatttttgaagtatgagtttgtagggacaaagaatgtatgttatcgtagacaagacccccagagactcttttcagcagaaagttatgcttctagttgccttaccatgtttcttgcaaaactgtccatggtcctcaagggtgttggaaacattatgtttattaaatgggcctctcttcctttgctgtgcacttgatgggtgaactggattggggtgtgcacatccaggaggaggaggagagacctgtagaagtttaaagatagtttgtaaatatcttctaatgcttgtttttagtccttttatgttggagaagttcatggtatgtagtttaatgcaaaatgaaaccattttatttcaatgttattaaaaaggtttgttttattaggaagttaatgtattgttgcagtgttttgtgcctgtttaaaggcttttgtttagcagagtgaatgtaaaatacagtaaaatgttaagattgtcatctactttttaaaaaaaaatatcaacttggaattgttttttaaaggctcaatcaaggaagtgaggtgtgcaataaggtagcaagtaaaacgcagttgcgtttttatgtcatgttagagatccatacaattttccactcacgggatttttgttgatggctgaattcttgtggattcataagaggatcatgcccttagcaagtacttttgttttgttttaaattaagagattcccaaatgcctttttccccctcatcttgaaatgagatgagtttttatgtgtaagcaatatttatttaactattctataaaattattgagtgcctactgaggcctttaagcaccgctaacattcctttccatcattcttttaaatgacataaaataattgtgcaatgttcctgatgatgtaccccacaagctgcattcaaactcaaatctgtgggaatgagtgactcgacaaaatgtaattcggatcagatcctcatcccctgactgtgtgaaaaaagtactctccttctagtgaaggattgtcacagagtttcactggatgaaactatgacccagtattcttactgtattttacatatgcctgtaaattatttgcaaaaaagaagaagaagaggaagaaagaaaagaaagaaaagaaagaaagaaagaaagaaagaaagaaagaaagaaagaaagaaagaaagaaagaaagaaaaagaaagaaagaataaaaaaaaatgataacatggcaaccaccaaactcccttaaaaacaaacattggtgacatggccaattaagtatcagtgagcctcctatctgggacttatctgttcctattgtttcaaaaccatttcatgtacactactgaggtaagtttataacttgaaatgtgaactttttttttttttagtgttaagaacaaactatataaatgtaaaaaaaaagttttagagttctgttttcaaacattgctagtggtttagttaactttagctgctttatatttgaaaagcttttatttagatcttgctccatttacagtacattcttaggatgtatgtagtaaataaagctttctttaaagcaatcgcaagacctta

SEQ ID NO: 39380 - DNA, 1782 bp, Artificial Sequence
  derived and/or modified sequence
atgacggcagaagatagcacggctgccatgagcagcgatagcgccgcggggtcctctgctaaggtcccagaaggcgttgccggtgccccaaatgaggccgcactgctcgccctaatggaaagaacaggatacagtatggtccaagagaacgggcagcgaaaatatgggggcccacctccaggctgggagggacctcacccccagcgcgggtgcgaggttttcgtaggaaaaatcccgcgggatgtttacgaggacgaattggtgccggttttcgaggctgtgggaagaatttatgagcttcggcttatgatggacttcgacggcaagaatagaggctatgcctttgtaatgtactgtcacaaacacgaggccaaacgagctgttcgcgagttgaataattatgaaatccgccctggccgcctgttaggggtgtgctgtagcgtcgataactgccgcctgtttattggtggcattccaaagatgaagaaaagagaagaaattctagaggagatagctaaagtgacggaaggtgtgctggatgtgattgtttacgcttcagctgccgataagatgaagaaccgcggattcgccttcgtagaatacgagtcacatagggctgctgcaatggcgcggagaaaactgatgcctgggcgcatccagctttggggtcaccaaatcgctgtggactgggcagaaccggaaatagatgttgacgaggacgtgatggagacagtcaaaatcttgtatgtacggaacctgatgatcgagactactgaggacactatcaaaaagtctttcggccaattcaaccccgggtgcgtggaaagggtcaaaaagatacgagactatgcctttgtgcattttacatcaagggaggatgcagtgcatgcaatgaacaatcttaacggcaccgaattggaaggttcctgtttggaggtcaccctagccaagcctgtggacaaagaacagtacagtagatatcagaaggcagccagaggaggcggagcagcagaggcagcacaacagcccagctatgtctacagctgtgatccttataccctcgcctattacgggtatccatataacgcactgattgggcccaatcgagactatttcgtgaaagccggaagcattaggggacgcgggcgaggggctgctggaaaccgggctcccggccctaggggttcttatctcggggggtatagcgcaggtcgcggaatctatagtcggtaccacgaaggaaaaggcaagcaacaagaaaaagggtatgaattggtgcccaacttagagataccgactgtgaatcccgttgccatcaaaccgggaacagtggccatccctgccatcggcgcgcagtattccatgttccctgcagctccggctcctaagatgatcgaagatgggaagattcacactgtcgagcacatgatcagcccaatcgcagtacagcccgacccagcctctgcggccgcagccgccgccgcagcagccgctgcagctgcagcagtgattcccaccgtgagcacacccccaccgtttcaagggaggcctattacaccagtttatacagtggcccccaatgttcagcgcatccctacagctgggatatatggggctagttacgtgcctttcgcagccccagccaccgcaactattgcaaccctgcagaagaacgccgccgccgccgcagctatgtatggtggctatgcagggtatatcccacaggcattccccgccgctgcaatccaggtacctattccagatgtgtatcagacctactag

SEQ ID NO: 39381 - DNA, 1782 bp, Artificial Sequence
  derived and/or modified sequence
atgacagccgaagatagtaccgccgccatgagcagcgatagtgccgccgggagcagcgccaaggtgcctgaaggagtcgccggggctcccaatgaagccgccctgttggctctgatggagcggaccggatattctatggtgcaagaaaacggtcagcgaaagtacgggggacctccaccaggttgggagggcccacacccccaacgcggttgcgaagtcttcgtgggaaaaattccacgggatgtgtatgaagatgaactcgtgcctgtgtttgaggcagtcgggaggatatacgagctgcgcctcatgatggattttgatggcaagaatcggggttatgccttcgtgatgtactgccacaaacatgaggcaaagagagccgtcagggaacttaacaattacgagatcagacctggtcggctcttgggcgtctgctgtagtgttgataactgtaggctctttatcggggggattcccaaaatgaaaaaacgagaagagattcttgaagagattgccaaggtaaccgagggtgtgctagacgtgatcgtctatgcctctgcagcagataaaatgaaaaataggggctttgccttcgttgagtatgaatcccatagagcagccgcaatggctagacgaaaactgatgcctgggcgtatccagttgtggggccatcagatcgccgtggattgggccgagcctgaaatcgacgtggatgaggacgtcatggagacagtgaaaattctgtatgtgagaaaccttatgattgaaacaactgaagacacgattaagaaatcttttggccagttcaaccctggttgtgttgagagagttaaaaagattcgtgactacgcatttgtccacttcacaagtcgcgaggacgcggtgcacgccatgaataatctgaacgggacagaactggagggatcatgtctagaggtgactctggccaagccagtcgacaaggagcaatattctagataccaaaaggcagccagaggcggaggagctgctgaagccgcgcagcaacctagttacgtttactcttgcgacccctacacattggcctattacggttacccatacaacgcactcattgggccaaacagagactacttcgtcaaagcgggctctatcagaggccggggcaggggagcagcaggcaaccgcgcccctggacctaggggaagctatctgggcggatacagcgccgggcgaggtatttatagtcgctaccatgaagggaagggaaagcagcaggaaaagggttacgagctggtgcccaacctggaaatccccacagtgaaccctgtcgctatcaaaccaggcacagttgctatcccagccatcggcgcacaatatagcatgtttccagcggcccctgcaccaaaaatgattgaagatggaaaaattcatactgtggaacacatgatctcaccaatcgctgtgcagccggaccctgcctccgccgccgcagccgccgccgccgccgcagctgcagccgccgccgtgattccaacagtcagcacaccccccccatttcagggacgaccgattaccccagtgtataccgttgccccaaatgtccagagaattccaacagcgggtatttatggggcaagctatgttccctttgcagctccagctacagccaccatcgctacattgcagaagaacgcagctgctgctgcggccatgtatggcggttacgctggttatattccacaggcttttcccgctgccgctatacaggtgccaattcctgacgtctaccagacctactag

SEQ ID NO: 39382 - DNA, 1782 bp, Artificial Sequence
  derived and/or modified sequence
atgacagctgaggacagcacagctgccatgagcagtgacagcgctgctggcagcagcgccaaggtgcctgagggcgtggccggggccccaaatgaagctgccctgctggccctgatggagaggacaggctacagcatggtgcaggagaatggccagaggaaatatggaggccccccacctggctgggagggcccccacccccagaggggctgtgaggtgtttgtgggcaagatccccagagatgtgtatgaagatgagctggtgcctgtgtttgaagctgtgggccgcatctatgagctgcggctgatgatggactttgatggcaagaacagaggctacgcctttgtgatgtactgccacaagcatgaggccaagagagctgtgcgggagctgaacaactatgagatccggcccggccgcctgctgggcgtgtgctgcagcgtggacaactgccgcctcttcatcggcggcatccccaagatgaagaagcgggaggagatcctggaggagatcgccaaggtgacagaaggagtgctggatgtgattgtgtatgccagcgctgctgacaagatgaagaacagaggatttgcctttgtggagtatgagagccacagagctgctgccatggcccggaggaagctgatgcctggccgcatccagctgtggggccaccagattgctgtggactgggccgagcctgagattgatgtggatgaagatgtgatggagaccgtgaagatcctgtatgtgaggaacctgatgattgagaccacagaggacaccatcaagaagagctttggccagttcaaccctggctgtgtggagcgggtgaagaagatccgggactatgcctttgtgcacttcaccagccgggaggatgctgtgcacgccatgaacaacctgaatggaacagagctggagggcagctgcctggaggtgaccctggccaagcctgtggacaaggagcagtacagccgctaccagaaggccgcccggggcggcggcgctgctgaggccgcccagcagcccagctatgtgtacagctgtgacccctacaccctggcctactacggctacccctacaatgccctgattggccccaacagagactactttgtgaaggccggcagcatccggggccggggcagaggagctgctggcaacagagcccctggcccccggggcagctacctgggcggctacagcgctggccggggcatctacagccgctaccacgagggcaagggcaagcagcaggagaagggctatgagctggtgcccaacctggagatccccaccgtgaaccctgtggccatcaagccaggcaccgtggccatcccagccatcggggcccagtacagcatgtttcctgctgccccagcccccaagatgattgaagatggcaagatccacacagtggagcacatgatcagccccatcgctgtgcagcctgaccctgccagcgctgctgctgctgctgctgctgctgctgctgctgctgctgctgtgatccccaccgtgtccaccccaccacccttccagggccggcccatcacccctgtgtacacagtggccccaaatgtgcagaggatccccacagctggcatctatggagccagctatgtgccctttgctgccccagccacagccaccatcgccaccctgcagaagaatgctgctgctgctgctgccatgtatggaggctacgccggctacatcccccaggccttccctgctgctgccatccaggtgcccatcccagatgtgtaccagacctactag

SEQ ID NO: 39383 - DNA, 1782 bp, Artificial Sequence
  derived and/or modified sequence
atgaccgccgaggacagcaccgccgccatgagcagcgacagcgccgctggcagttctgccaaggttcctgagggcgtggctggcgcccccaatgaggcagcgttactggccctgatggagagaaccggctatagtatggttcaagaaaacggccagcgtaagtatggcggaccaccaccgggctgggagggaccacacccccagaggggatgtgaagtttttgttgggaagattccacgcgatgtatacgaagatgaactcgttccggtctttgaagctgtaggtagaatctatgagctcagactgatgatggattttgacgggaagaatagaggatacgcctttgtgatgtattgccataagcacgaggcaaaaagagctgttcgtgagctgaacaactacgagatccggcccggccgccttttgggggtgtgttgttcagtggacaactgtcgcctgtttatcgggggcatccccaaaatgaaaaagcgggaggaaatcctcgaggaaatcgcgaaagttaccgaaggtgtgctcgacgtgatagtctacgcctcagcagcggacaagatgaagaatcgtggctttgccttcgtggagtacgaaagccaccgcgccgcagcaatggctaggcggaagctgatgcccggtaggatccagttatggggccaccagattgccgttgactgggccgagcccgagattgatgtggacgaagatgtgatggagacagtaaaaatcctttatgtccgcaacctgatgatagaaactacggaggacaccatcaaaaagagctttgggcagtttaacccgggctgcgtcgagagagtcaaaaagattcgcgactatgccttcgtccactttacttcccgggaagacgcagttcacgctatgaacaacctgaacgggaccgaattggaaggctcctgtcttgaggtaacccttgcgaagcctgtggataaggagcagtattctcgctatcagaaagccgccagaggtggcggcgctgcagaggctgcacaacagccttcatacgtgtactcttgcgatccctacacgttggcctactacggctacccctataatgcccttatcggccctaatagagactatttcgtcaaagccgggtctatccggggccgcggtcgcggagccgccgggaatagagctcctggaccccgcgggtcttacctgggcggttacagtgccgggcgtgggatctatagcaggtaccacgaaggcaagggcaaacagcaggaaaaaggatatgagctggtgccaaacttagaaatcccgactgttaacccagttgctatcaaacccggtacagtcgccattccagcaataggtgcgcaatactcgatgtttccagccgcaccagccccaaagatgatcgaagacggcaagatacacacagtggaacacatgattagtcccatcgctgttcagccggatcctgcatcagcagctgctgcagccgccgccgccgcagccgccgcagccgctgtgatccctacagtgtcaactcctccgccattccaaggtagacctatcactcctgtttacacagtggcaccaaatgtgcagcgtattccaacggcaggcatctatggagcctcatatgtgcccttcgccgcccccgccacagccacaatcgctacactacaaaagaacgcagccgccgccgcagctatgtatggcggctacgccgggtacattccccaggccttccctgctgctgccattcaggttccgattccggacgtttaccagacatattag

SEQ ID NO: 39384 - DNA, 1782 bp, Artificial Sequence
  derived and/or modified sequence
atgaccgccgaggacagcaccgccgccatgagcagcgacagcgccgccggaagtagcgccaaagtaccggaaggagtggccggagctcccaatgaggcggccttgctcgctctcatggaacggacgggttattcaatggtgcaggaaaatggacagcgcaaatatggcggaccgccccccggttgggaggggccccatcctcagcgcggctgcgaggtgttcgtaggcaaaattcccagagacgtctacgaagatgagctcgttccggtttttgaggctgtgggacgcatctacgagttacggctcatgatggactttgacggcaagaatagaggttatgctttcgtgatgtattgccataagcatgaggcaaaaagggcggtgcgcgagctgaacaactacgagatccgaccgggccgcttgctcggcgtgtgttgttctgtggataattgccggctcttcatcgggggcatccccaaaatgaaaaaaagagaagagatactggaggagattgcaaaagttacagagggcgtccttgatgtcattgtttatgcctccgcagctgacaaaatgaagaacaggggatttgccttcgtagagtatgaatcccatagagcagctgcaatggccaggagaaaactgatgccgggccgcatacagctctggggacaccaaatcgccgtggactgggcagagccggagatcgatgtcgacgaagatgtgatggagactgtgaagatattgtacgtcagaaatttgatgatcgagactacagaggatactatcaagaaatctttcggacagtttaaccctggctgcgttgaacgtgtaaaaaagattcgagattacgcctttgttcacttcaccagcagagaagacgctgtccacgctatgaacaacctgaacggaactgaattggaggggtcctgcctggaggtgaccttggcaaagccggtggataaagagcagtattctagataccagaaggcggctcgtggcggtggggctgccgaggctgcacagcagccctcatatgtgtattcatgtgacccctacaccctggcctattatggatatccttacaatgccctgatcggacccaacagggattatttcgtgaaggccggcagcatccgcggcagaggccgaggagccgccggaaatagggcaccgggaccccgcggcagctatcttggcggttacagcgccgggcgcggcatatacagtcgctaccacgagggcaaagggaagcaacaggaaaaggggtacgagctggtgcccaatctagaaatcccgaccgtgaatcccgttgccattaaacccggtaccgtggctatccccgcgattggtgcccagtactcaatgttccctgcggctccagcgcctaaaatgatcgaggacggcaaaatccatactgtcgaacacatgatatcacccattgcggtgcaacctgaccccgcctctgctgcggccgcagcagctgctgcagcagccgcggccgctgccgtaatccctactgtctctaccccccctcctttccagggcaggccgattactcccgtgtacacagtggcccccaatgtgcagcgcattcccactgcgggaatctacggcgcatcgtacgtccctttcgcagcgccggctactgcaacgattgcaactctgcagaaaaacgcggcagcagccgcagcaatgtatgggggctacgcaggatacatcccccaggcgttcccggcagctgctatccaggtgcccattcccgacgtgtaccagacatactag

SEQ ID NO: 39385 - DNA, 1782 bp, Artificial Sequence
  derived and/or modified sequence
atgacggctgaggatagcaccgctgccatgtcaagtgatagtgccgctggaagttcagctaaggtgcccgaaggtgtggctggggcaccgaacgaagccgctctgctggctttgatggagcggactgggtactccatggtgcaggaaaacggccagcgaaagtacggcggaccgcctcccggttgggaagggcctcaccctcagagagggtgtgaggtttttgtagggaagatacccagagacgtgtatgaggacgaactggttcccgtcttcgaagccgtgggcaggatctatgagctcagactaatgatggatttcgacggaaagaatcggggttacgccttcgtgatgtattgtcataagcacgaagcaaagcgagctgtccgagagttgaacaactatgagattagacccggacgactgcttggcgtttgctgctctgtggacaactgtcgcctatttataggtgggattccaaaaatgaaaaaacgcgaggaaatcttggaggaaattgctaaggtcaccgagggcgtactcgatgttattgtttacgcatcggcagccgataagatgaagaatcgcggtttcgcctttgtcgagtacgagtctcatcgcgcagccgctatggcgcgtcggaaacttatgcccggtcgcattcaactgtggggtcaccagatcgcagtcgattgggcagaacccgagatcgacgtcgacgaggacgttatggaaaccgttaagatcctgtacgttagaaatctgatgatcgaaactactgaagacactatcaaaaagtcatttggccaatttaatcccggatgtgtagaacgagtaaagaagatccgcgactacgcatttgttcactttacctcgagagaggatgcagtgcatgccatgaacaacctgaatgggactgaactggaaggtagctgcctggaggttacactggcgaagcctgtggacaaagaacagtatagtcggtaccagaaggccgcacggggtgggggagccgctgaagctgcccaacagccctcttatgtatactcctgcgatccctatactctagcttattacgggtacccttacaatgcccttatcggcccaaacagagactattttgtcaaagccggatccatacgcggacgaggccgaggcgcagcaggcaatagggcccctggtccccgaggttcctatctgggtggatatagtgccggaagaggtatctactccagataccatgaaggtaaggggaaacagcaagaaaaaggctatgagctggtgccgaacctggaaatcccgacggtgaatccggtggcaattaagcctgggaccgttgccatccctgctatcggagctcagtattcaatgttcccagctgccccagctccgaagatgatcgaggatggaaaaatacacacagtggaacatatgatttcccctattgcagtgcagcccgaccctgctagcgccgcagccgcagccgcagcggcagcggcagccgctgcagcagtaattcccaccgtcagcaccccacctccctttcaaggtcgccctattacccctgtctacacggtcgcacccaatgttcagcgtattccaacagctggaatttatggagcaagctatgtcccgtttgcggctccagccaccgccacaatcgccacactgcagaagaatgctgctgcagccgcagccatgtacgggggttacgcaggctacattccacaggccttccctgcagcagctatccaggtgcctatccccgatgtctaccagacctactag

SEQ ID NO: 39386 - DNA, 1782 bp, Artificial Sequence
  derived and/or modified sequence
atgacagcagaagattcaaccgccgctatgagcagtgattccgctgctgggagctcagcgaaggtcccagagggagtggctggagcacctaatgaagcggcattactagcattgatggagcggacaggatacagcatggtgcaagagaacggtcagagaaaatatgggggaccaccccctggatgggagggacctcaccctcagcgaggctgcgaggtctttgtaggcaagatcccgcgtgatgtgtacgaagacgagttggttccagtgtttgaggccgttggtcgcatctacgagttaaggctgatgatggacttcgacgggaagaaccgcggatacgcctttgtgatgtactgtcacaagcacgaagccaagcgggcagtgagggaattgaataactacgagattcggccaggcagacttctgggagtgtgctgttccgtcgacaattgcagattgttcattggcggaatccccaaaatgaagaagagggaggagatcctcgaagagatcgctaaggtgacagagggagtgctggatgtgatcgtgtacgcaagcgctgcagacaagatgaagaaccgcggattcgctttcgttgagtatgagagccatcgcgcagctgctatggctcgcagaaagctgatgcctggtcggattcaactctggggccaccagattgccgtagactgggccgaaccagagatcgatgtcgacgaagacgttatggagaccgtgaagatcctatacgtgcggaacctgatgatcgagaccaccgaggatacgatcaagaagagcttcgggcagtttaatcctggatgtgtcgaacgtgtgaagaagattcgggactatgcattcgtgcacttcacgagccgggaagacgcagttcacgctatgaacaacctaaacggcacggaattagaagggtcctgtttagaagtcactttggctaaacctgtggataaagaacagtattcccgataccagaaggccgcacggggagggggagcagccgaagccgctcagcagccaagctatgtctactcttgtgatccctatacattagcctactacgggtatccgtacaatgccctgatagggccaaacagggactactttgttaaagctggctcaatccgcggaagaggcaggggcgctgcaggcaacagagcaccaggccctaggggatcgtatctggggggatatagtgccggaagaggaatctattcgaggtatcatgaaggtaagggcaaacagcaggaaaaagggtatgaactcgtacctaacctggaaatcccaaccgtgaatcctgtcgccataaaaccaggaacggttgctataccggcaatcggagcccagtattccatgttccccgctgcgccagcccctaagatgatcgaggacggtaagatccacacagtggaacatatgatcagccccatcgccgttcagcccgacccagcttcagcagccgctgctgcggctgccgcagcggctgcggcagccgctgtgattcccacagtcagcaccccacctccatttcagggccgaccaattacgcctgtttatactgtggctccaaatgtccagcggattcctactgcgggaatatacggcgcatcgtacgtaccatttgcagcgccagccacagccacgattgctactttgcagaagaatgccgcagcagctgcagccatgtacggcggatatgccggttatattccgcaggcctttcccgcagctgccatccaggtgccaatcccggacgtatatcagacctactag

SEQ ID NO: 39387 - DNA, 1782 bp, Artificial Sequence
  derived and/or modified sequence
atgaccgccgaggacagcaccgccgccatgagcagcgacagcgccgccggcagcagcgccaaggtgcccgagggcgtggccggcgcccccaacgaggccgccctgctggccctgatggagagaaccggctacagcatggtgcaggagaacggccagagaaagtacggcggccccccccccggctgggagggcccccacccccagagaggctgcgaggtgttcgtgggcaagatccccagagacgtgtacgaggacgagctggtgcccgtgttcgaggccgtgggcagaatctacgagctgagactgatgatggacttcgacggcaagaacagaggctacgccttcgtgatgtactgccacaagcacgaggccaagagagccgtgagagagctgaacaactacgagatcagacccggcagactgctgggcgtgtgctgcagcgtggacaactgcagactgttcatcggcggcatccccaagatgaagaagagagaggagatcctggaggagatcgccaaggtgaccgagggcgtgctggacgtgatcgtgtacgccagcgccgccgacaagatgaagaacagaggcttcgccttcgtggagtacgagagccacagagccgccgccatggccagaagaaagctgatgcccggcagaatccagctgtggggccaccagatcgccgtggactgggccgagcccgagatcgacgtggacgaggacgtgatggagaccgtgaagatcctgtacgtgagaaacctgatgatcgagaccaccgaggacaccatcaagaagagcttcggccagttcaaccccggctgcgtggagagagtgaagaagatcagagactacgccttcgtgcacttcaccagcagagaggacgccgtgcacgccatgaacaacctgaacggcaccgagctggagggcagctgcctggaggtgaccctggccaagcccgtggacaaggagcagtacagcagataccagaaggccgccagaggcggcggcgccgccgaggccgcccagcagcccagctacgtgtacagctgcgacccctacaccctggcctactacggctacccctacaacgccctgatcggccccaacagagactacttcgtgaaggccggcagcatcagaggcagaggcagaggcgccgccggcaacagagcccccggccccagaggcagctacctgggcggctacagcgccggcagaggcatctacagcagataccacgagggcaagggcaagcagcaggagaagggctacgagctggtgcccaacctggagatccccaccgtgaaccccgtggccatcaagcccggcaccgtggccatccccgccatcggcgcccagtacagcatgttccccgccgcccccgcccccaagatgatcgaggacggcaagatccacaccgtggagcacatgatcagccccatcgccgtgcagcccgaccccgccagcgccgccgccgccgccgccgccgccgccgccgccgccgccgccgtgatccccaccgtgagcacccccccccccttccagggcagacccatcacccccgtgtacaccgtggcccccaacgtgcagagaatccccaccgccggcatctacggcgccagctacgtgcccttcgccgcccccgccaccgccaccatcgccaccctgcagaagaacgccgccgccgccgccgccatgtacggcggctacgccggctacatcccccaggccttccccgccgccgccatccaggtgcccatccccgacgtgtaccagacctactag

SEQ ID NO: 39388 - protein, 508 aa, Artificial Sequence
  derived and/or modified sequence
MRPVALLLLPSLLALLAHGLSLEAPTVGKGQAPGIEETDGELTAAPTPEQPERGVHFVTTAPTLKLLNHHPLLEEFLQEGLEKGDEELRPALPFQPDPPAPFTPSPLPRLANQDSRPVFTSPTPAMAAVPTQPQSKEGPWSPESESPMLRITAPLPPGPSMAVPTLGPGEIASTTPPSRAWTPTQEGPGDMGRPWVAEVVSQGAGIGIQGTITSSTASGDDEETTTTTTIITTTITTVQTPGPCSWNFSGPEGSLDSPTDLSSPTDVGLDCFFYISVYPGYGVEIKVQNISLREGETVTVEGLGGPDPLPLANQSFLLRGQVIRSPTHQAALRFQSLPPPAGPGTFHFHYQAYLLSCHFPRRPAYGDVTVTSLHPGGSARFHCATGYQLKGARHLTCLNATQPFWDSKEPVCIAACGGVIRNATTGRIVSPGFPGNYSNNLTCHWLLEAPEGQRLHLHFEKVSLAEDDDRLIIRNGDNVEAPPVYDSYEVTAPPPPPPLQPHYHRVSV

SEQ ID NO: 39389 - protein, 993 aa, Artificial Sequence
  derived and/or modified sequence
MRPVALLLLPSLLALLAHGLSLEAPTVGKGQAPGIEETDGELTAAPTPEQPERGVHFVTTAPTLKLLNHHPLLEEFLQEGLEKGDEELRPALPFQPDPPAPFTPSPLPRLANQDSRPVFTSPTPAMAAVPTQPQSKEGPWSPESESPMLRITAPLPPGPSMAVPTLGPGEIASTTPPSRAWTPTQEGPGDMGRPWVAEVVSQGAGIGIQGTITSSTASGDDEETTTTTTIITTTITTVQTPGPCSWNFSGPEGSLDSPTDLSSPTDVGLDCFFYISVYPGYGVEIKVQNISLREGETVTVEGLGGPDPLPLANQSFLLRGQVIRSPTHQAALRFQSLPPPAGPGTFHFHYQAYLLSCHFPRRPAYGDVTVTSLHPGGSARFHCATGYQLKGARHLTCLNATQPFWDSKEPVCIAACGGVIRNATTGRIVSPGFPGNYSNNLTCHWLLEAPEGQRLHLHFEKVSLAEDDDRLIIRNGDNVEAPPVYDSYEVEYLPIEGLLSSGKHFFVELSTDSSGAAAGMALRYEAFQQGHCYEPFVKYGNFSSSTPTYPVGTTVEFSCDPGYTLEQGSIIIECVDPHDPQWNETEPACRAVCSGEITDSAGVVLSPNWPEPYGRGQDCIWGVHVEEDKRIMLDIRVLRIGPGDVLTFYDGDDLTARVLGQYSGPRSHFKLFTSMADVTIQFQSDPGTSVLGYQQGFVIHFFEVPRNDTCPELPEIPNGWKSPSQPELVHGTVVTYQCYPGYQVVGSSVLMCQWDLTWSEDLPSCQRVTSCHDPGDVEHSRRLISSPKFPVGATVQYICDQGFVLMGSSILTCHDRQAGSPKWSDRAPKCLLEQLKPCHGLSAPENGARSPEKQLHPAGATIHFSCAPGYVLKGQASIKCVPGHPSHWSDPPPICRAASLDGFYNSRSLDVAKAPAASSTLDAAHIAAAIFLPLVAMVLLVGGVYFYFSRLQGKSSLQLPRPRPRPYNRITIESAFDNPTYETGETREYEVSI

SEQ ID NO: 39390 - DNA, 2982 bp, Artificial Sequence
  derived and/or modified sequence
atgagacccgtggccctgctgctgctgcccagcctgctggccctgctggcccacggcctgagcctggaggcccccaccgtgggcaagggccaggcccccggcatcgaggagaccgacggcgagctgaccgccgcccccacccccgagcagcccgagagaggcgtgcacttcgtgaccaccgcccccaccctgaagctgctgaaccaccaccccctgctggaggagttcctgcaggagggcctggagaagggcgacgaggagctgagacccgccctgcccttccagcccgacccccccgcccccttcacccccagccccctgcccagactggccaaccaggacagcagacccgtgttcaccagccccacccccgccatggccgccgtgcccacccagccccagagcaaggagggcccctggagccccgagagcgagagccccatgctgagaatcaccgcccccctgccccccggccccagcatggccgtgcccaccctgggccccggcgagatcgccagcaccaccccccccagcagagcctggacccccacccaggagggccccggcgacatgggcagaccctgggtggccgaggtggtgagccagggcgccggcatcggcatccagggcaccatcaccagcagcaccgccagcggcgacgacgaggagaccaccaccaccaccaccatcatcaccaccaccatcaccaccgtgcagacccccggcccctgcagctggaacttcagcggccccgagggcagcctggacagccccaccgacctgagcagccccaccgacgtgggcctggactgcttcttctacatcagcgtgtaccccggctacggcgtggagatcaaggtgcagaacatcagcctgagagagggcgagaccgtgaccgtggagggcctgggcggccccgaccccctgcccctggccaaccagagcttcctgctgagaggccaggtgatcagaagccccacccaccaggccgccctgagattccagagcctgcccccccccgccggccccggcaccttccacttccactaccaggcctacctgctgagctgccacttccccagaagacccgcctacggcgacgtgaccgtgaccagcctgcaccccggcggcagcgccagattccactgcgccaccggctaccagctgaagggcgccagacacctgacctgcctgaacgccacccagcccttctgggacagcaaggagcccgtgtgcatcgccgcctgcggcggcgtgatcagaaacgccaccaccggcagaatcgtgagccccggcttccccggcaactacagcaacaacctgacctgccactggctgctggaggcccccgagggccagagactgcacctgcacttcgagaaggtgagcctggccgaggacgacgacagactgatcatcagaaacggcgacaacgtggaggccccccccgtgtacgacagctacgaggtggagtacctgcccatcgagggcctgctgagcagcggcaagcacttcttcgtggagctgagcaccgacagcagcggcgccgccgccggcatggccctgagatacgaggccttccagcagggccactgctacgagcccttcgtgaagtacggcaacttcagcagcagcacccccacctaccccgtgggcaccaccgtggagttcagctgcgaccccggctacaccctggagcagggcagcatcatcatcgagtgcgtggacccccacgacccccagtggaacgagaccgagcccgcctgcagagccgtgtgcagcggcgagatcaccgacagcgccggcgtggtgctgagccccaactggcccgagccctacggcagaggccaggactgcatctggggcgtgcacgtggaggaggacaagagaatcatgctggacatcagagtgctgagaatcggccccggcgacgtgctgaccttctacgacggcgacgacctgaccgccagagtgctgggccagtacagcggccccagaagccacttcaagctgttcaccagcatggccgacgtgaccatccagttccagagcgaccccggcaccagcgtgctgggctaccagcagggcttcgtgatccacttcttcgaggtgcccagaaacgacacctgccccgagctgcccgagatccccaacggctggaagagccccagccagcccgagctggtgcacggcaccgtggtgacctaccagtgctaccccggctaccaggtggtgggcagcagcgtgctgatgtgccagtgggacctgacctggagcgaggacctgcccagctgccagagagtgaccagctgccacgaccccggcgacgtggagcacagcagaagactgatcagcagccccaagttccccgtgggcgccaccgtgcagtacatctgcgaccagggcttcgtgctgatgggcagcagcatcctgacctgccacgacagacaggccggcagccccaagtggagcgacagagcccccaagtgcctgctggagcagctgaagccctgccacggcctgagcgcccccgagaacggcgccagaagccccgagaagcagctgcaccccgccggcgccaccatccacttcagctgcgcccccggctacgtgctgaagggccaggccagcatcaagtgcgtgcccggccaccccagccactggagcgaccccccccccatctgcagagccgccagcctggacggcttctacaacagcagaagcctggacgtggccaaggcccccgccgccagcagcaccctggacgccgcccacatcgccgccgccatcttcctgcccctggtggccatggtgctgctggtgggcggcgtgtacttctacttcagcagactgcagggcaagagcagcctgcagctgcccagacccagacccagaccctacaacagaatcaccatcgagagcgccttcgacaaccccacctacgagaccggcgagaccagagagtacgaggtgagcatctag

SEQ ID NO: 39391 - DNA, 2982 bp, Artificial Sequence
  derived and/or modified sequence
atgcgacctgtggccctgttactgctacctagtctccttgcccttctggcacacggcttaagtctcgaggctccaactgtggggaagggccaagcccctggcatcgaggagaccgatggcgaactgacggctgctccaactcccgagcagccagagcgcggcgtccatttcgtgaccaccgcacctaccctcaagctgctcaatcatcatcccttactcgaggaattcctgcaggagggattggagaaaggtgatgaggaactgagaccggcactgcccttccagccggaccccccagcccctttcactcccagccctctgcctcgtcttgctaatcaggattcgcggcccgttttcacttcccccaccccagctatggctgccgtgcccacccagccacagagcaaagaaggcccatggagccctgagtcagaatcccccatgctgagaataaccgcacctctgccccccggcccgtcaatggccgtgcctactttgggacccggagaaatcgcttcaactaccccgccttccagagcatggacgcctactcaggagggtcccggcgacatgggacggccatgggtggccgaagttgtgtcccaaggcgccgggattgggatccaaggcactattaccagtagtacagctagtggcgatgacgaggaaacaacgaccacaaccaccattattaccactaccataacgaccgttcagaccccaggcccctgttcatggaactttagtgggcccgagggcagcctggacagccctaccgatcttagttcccctactgacgtgggtctggactgcttcttctatattagcgtgtaccccggctacggcgtcgagattaaggtacagaatatctcactccgagagggggaaactgtgacggtggaaggcttaggtggacctgaccctttacctctggctaaccagagcttcctcctgcggggacaggtcattcgtagccctacccatcaggctgcactgaggttccagtccttaccgcccccagcgggaccaggaacgttccacttccactatcaagcctatctgcttagctgccattttccacggcgtccggcatacggggacgtcaccgtgacctctcttcacccgggaggctccgcaaggttccattgcgcgaccggctatcagttgaaaggcgcaaggcaccttacttgcttgaatgcaacccagcctttctgggactctaaggaacctgtatgcattgctgcctgtggaggagtcatccggaatgccaccactggtagaatcgtgtccccgggctttccaggaaactacagtaataatcttacttgtcattggttgttggaggcccccgagggacagcggttgcacctgcatttcgagaaggtgagccttgctgaagatgatgataggttaatcatccggaatggcgataacgtggaggcccccccagtgtatgattcttacgaggttgaatatttgcccatagaaggactactatcatcgggtaagcatttcttcgtggaactttctaccgattcttcaggggccgctgccggtatggctcttcggtatgaggcatttcagcaggggcactgctacgaaccctttgtcaaatacgggaacttctcatcatccacacccacataccccgtgggcaccactgtggagttttcctgcgaccccggctacactctcgaacagggatccatcatcatcgagtgtgtggacccacatgaccctcagtggaacgaaacagagcccgcatgccgtgcggtgtgtagtggggaaatcaccgattcagccggggtcgtgctgtccccaaattggccagaaccatatggacgggggcaggactgcatttggggcgtacacgttgaagaggacaagcggattatgcttgatattcgtgtcctgaggatcggtccaggagacgtattaacattctacgacggcgatgatctcacggcgcgggtcctggggcagtattccgggccaaggtctcacttcaagctgttcactagcatggcagacgtgacgattcaattccagtccgaccccgggacctctgtcttaggataccaacagggttttgttatccatttctttgaagtgcccaggaacgatacttgccccgagctgcctgaaatacccaatggctggaagtcaccctctcaaccggagctggtgcacggaaccgtggttacatatcagtgctaccctgggtaccaggtcgtggggtccagcgtgttaatgtgccagtgggatctcacctggtcagaggatctgccatcctgtcaaagggtgacttcatgccacgacccaggggatgtggagcacagccgtcggttgatctcctcaccaaaattccccgtgggcgcaacggtccaatacatctgtgatcagggattcgtacttatgggcagcagtatcctgacttgccacgacagacaggcagggagcccaaaatggtcagatagggcccctaaatgcctgctcgaacaattaaaaccctgccacgggctgtctgctccagagaatggtgccagatccccggaaaaacagctccatcccgccggcgcgacaatacacttctcctgtgcacctgggtacgttctcaagggacaggctagtatcaagtgcgtgcccggccacccttcacattggagtgatcctccaccgatttgtcgcgcggcgtcactcgacgggttctacaattcccgctctctggacgtcgcaaaggcacctgccgcgagtagcacccttgatgctgcacacattgctgcagcaatctttctgcccctagtggcaatggttctgctagtcggcggtgtgtacttctactttagccgcctccaggggaagagctctctccagctgcctcggccacggccccgcccatacaatagaattactatcgagtctgcatttgacaatcccacatacgagacgggcgagacacgggagtacgaggtgagcatttag

SEQ ID NO: 39392 - DNA, 2982 bp, Artificial Sequence
  derived and/or modified sequence
atgaggcctgtggccctgctgctgctgcccagcctgctggccctgctggcccacggcctgagcctggaggcccccaccgtgggcaagggccaggcccctggcatcgaggagacagatggagagctgacagctgcccccaccccagagcagcctgagcggggcgtgcactttgtgaccacagcccccaccctgaagctgctgaaccaccaccccctgctggaggagttcctgcaggagggcctggagaagggagatgaggagctgcggcctgccctgcccttccagcctgaccccccagcccccttcacccccagccccctgccccggctggccaaccaggacagcaggcctgtgttcaccagccccaccccagccatggctgctgtgcccacccagccccagagcaaggagggcccctggagccctgagagcgagagccccatgctgcgcatcacagcccccctgcccccaggccccagcatggctgtgcccaccctgggccctggagaaattgccagcaccaccccacccagccgggcctggacccccacccaggagggccctggggacatgggccggccctgggtggccgaggtggtgtcccagggcgccggcatcggcatccagggcaccatcaccagcagcacagccagcggagatgatgaggagaccaccaccaccaccaccatcatcaccaccaccatcaccaccgtgcagaccccaggcccctgctcctggaacttcagcggccctgagggcagcctggacagccccacagacctgagcagccccacagatgtgggcctggactgcttcttctacatctctgtgtacccaggctatggagtggagatcaaggtgcagaacatcagcctgcgggagggggagaccgtgacagtggagggcctgggcggccctgaccccctgcccctggccaaccagagcttcctgctgcggggccaggtgatccgcagccccacccaccaggccgccctgcgcttccagagcctgcccccacctgctggccctggcaccttccacttccactaccaggcctacctgctgagctgccacttccccaggaggcctgcctatggagatgtgacagtgaccagcctgcaccctgggggcagcgcccgcttccactgtgccaccggctaccagctgaagggggcccggcacctgacctgcctgaatgccacccagcccttctgggacagcaaggagcctgtgtgcatcgccgcctgtggcggcgtcatcagaaatgccaccaccggccgcatcgtgtccccaggcttccctggcaactacagcaacaacctgacctgccactggctgctggaggcccctgagggccagaggctgcacctgcactttgagaaggtgtccctggccgaggatgatgacaggctcatcatcagaaatggagacaacgtggaggcccctcctgtgtatgacagctatgaggtggagtacctgcccatcgagggcctgctgagcagcggcaagcacttctttgtggagctgagcacagacagcagcggggctgctgctggcatggccctgcgctatgaggccttccagcagggccactgctatgagccctttgtgaagtatggcaacttcagcagcagcacccccacctaccctgtgggcaccaccgtggagttcagctgtgaccccggctacaccctggagcagggcagcatcatcattgaatgtgtggacccccatgacccccagtggaatgaaacagagcccgcctgcagagctgtgtgcagcggggagatcacagacagcgctggggtggtgctgagccccaactggccagagccctacggccggggccaggactgcatctggggcgtgcacgtggaggaggacaagaggatcatgctggacatccgggtgctgcgcatcggccctggagatgtgctgaccttctatgatggagatgacctgacagcccgggtgctgggccagtacagcggccccaggagccacttcaagctgttcacctccatggctgatgtgaccatccagttccagagcgaccccggcacctctgtgctgggctaccagcagggctttgtgatccacttctttgaggtgcccagaaatgacacctgcccagagctgcctgagatccccaacggctggaagagccccagccagcctgagctggtgcacggcaccgtggtgacctaccagtgctacccaggctaccaggtggtgggcagctctgtgctgatgtgccagtgggacctgacctggagcgaggacctgcccagctgccagagggtgaccagctgccacgaccctggagatgtggagcacagcagaagactcatcagcagccccaagtttcctgtgggcgccaccgtgcagtacatctgtgaccagggctttgtgctgatgggcagcagcatcctgacctgccacgaccggcaggccggcagccccaagtggagcgaccgggcccccaagtgcctgctggagcagctgaagccctgccacggcctgagcgccccagaaaatggagcccggagccctgagaagcagctgcaccctgctggggccaccatccacttcagctgtgcccctggctacgtgctgaagggccaggccagcatcaagtgtgtgcccggccaccccagccactggagcgaccccccacccatctgcagagctgccagcctggatggcttctacaacagccgcagcctggatgtggccaaggccccagctgccagcagcaccctggatgctgcccacatcgccgccgccatcttcctgcccctggtggccatggtgctgctggtgggcggcgtgtacttctacttcagccggctgcagggcaagagcagcctgcagctgccccggccccggccccggccctacaaccgcatcaccatcgagagcgcctttgacaaccccacctatgaaacaggagagacccgggagtatgaggtgtccatctag

SEQ ID NO: 39393 - DNA, 2982 bp, Artificial Sequence
  derived and/or modified sequence
atgcggcccgtggccctgctgctgctgcccagcctgctggccctgctagcccatggtctctccctagaggctcccactgttggaaaaggacaggcaccggggatcgaagaaaccgacggggaactcacggccgcccccaccccagagcagcctgagagaggtgtgcacttcgtgaccactgcccccactctgaagctactgaatcatcaccctctgctggaagaatttttgcaggagggactggagaaaggggatgaggaactcagaccagctcttccatttcagccggatcctcccgcaccgttcaccccaagtccactgccgcgcctggccaaccaagactcgaggcccgttttcacatcccctacccctgccatggctgcggtacccacccagccacaatctaaagaagggccgtggagtccggagtctgaatcgccgatgctgcgcatcaccgctccattgcctccaggtccctctatggcagtgccgactctgggccctggagaaatcgcctctaccaccccaccctcccgagcgtggacgccgacacaagagggccctggcgatatggggcgaccatgggtggccgaggtcgtgagccagggcgcaggtatcggcattcaaggaacaataacgagcagtacggcaagcggcgacgacgaggaaaccaccacaacaaccaccatcattacgacaaccatcacaaccgtccagaccccagggccttgtagttggaatttttccgggccagagggctcgctcgattcacctaccgacctcagtagtcccacagatgtgggcttggactgtttcttttatattagtgtttatcctgggtacggcgtggagatcaaggttcagaatatcagcctgcgcgaaggcgagacagtcaccgtggagggactcggtggaccagatcctctgcccctcgcgaatcagtccttcttgctgcgaggccaggtgatccgctctcctacacatcaagcagctcttcgattccagtccctccctcctccagctggtccagggacgtttcacttccattatcaggcctacctcctgtcatgtcatttcccgcgccgcccggcatatggggacgtcactgtgacctccttacaccctgggggctccgccagatttcactgtgccaccgggtaccagttaaagggggcgcgacacctgacttgtctgaacgccacgcagccgttctgggatagcaaggagcccgtttgcatcgcagcatgcgggggagtcatcagaaatgctacaaccgggcgcatcgtttctccagggtttccaggtaattacagcaataacctgacgtgccactggctgttggaggctcctgagggtcagcggcttcatttacacttcgagaaggtttcgctcgctgaggatgatgatcggctgatcattaggaacggagacaatgtggaggccccgcccgtgtatgacagctacgaagtagagtatttacctattgagggtctgttgagtagcggtaaacacttctttgtagagctaagcaccgatagcagcggggcggctgccggtatggccttacgatacgaagcctttcagcaggggcattgttacgagcccttcgtgaagtatggtaacttttctagttctactccaacttatcctgtggggactacagtggaattttcctgcgatccggggtacactctggagcaaggcagcataataatagagtgtgttgatccacacgatcctcaatggaatgagaccgagcctgcctgcagagctgtctgttcaggcgagattaccgactctgcaggtgtagtcctgtcccctaattggccagagccatatggtcggggccaggactgtatatggggcgtccatgtggaagaagacaagagaatcatgctggacatccgggtgttacggattggccctggtgatgtactcacattttacgatggggacgacctgaccgctcgtgtgctgggccagtattcaggaccccgctcccactttaagcttttcactagcatggcagacgttacaattcagtttcagtccgacccagggacaagcgttctgggctatcaacagggctttgtaatccattttttcgaggtgcctaggaatgatacctgcccggagcttccagagatccccaatggttggaagagtccatcacagcccgagctcgtgcatgggacggtggttacttaccaatgctatccagggtatcaagtagtggggtcttctgttttaatgtgccagtgggacctgacatggagcgaagatcttccaagctgccagagagttacttcatgccacgaccccggcgacgtggaacattctcgcagattgatatcctcaccaaagttccccgtgggtgcgactgtccagtatatctgtgaccagggcttcgttctgatggggtcatcaatcctgacttgtcacgaccgacaggctggcagtcccaagtggagtgacagagctccaaaatgccttttggaacagctcaagccctgtcacggcttgtccgcccctgagaatggagccaggtccccagagaagcagctgcacccagccggtgcgactattcacttctcttgtgctcctggatacgtgctaaaaggtcaggcatccatcaagtgcgtgccagggcaccctagccattggagtgacccacctcccatttgtcgggctgcatccttagatggattttacaactctcgttctctagatgttgccaaagctcctgcagccagttccaccctggacgcagctcacattgcggcggctatttttttgcctctcgtggcaatggtactgctggttggcggtgtgtatttttatttcagccggcttcagggcaagtcgtcactccagttgccccgccctagacctcgcccatataatcggatcacgatcgagagcgcctttgataatcccacctacgagacaggcgaaacacgggagtacgaagtgagtatttag

SEQ ID NO: 39394 - DNA, 2982 bp, Artificial Sequence
  derived and/or modified sequence
atgagaccagtggccttgttacttcttccttctcttctggctctgctggcccacggactgtcactcgaggccccaacagtgggcaaagggcaggccccaggcatcgaagagaccgatggagaactgacggcggctcccacacctgagcagcctgagcggggtgtccatttcgtcaccactgcgcctaccctaaaactcctgaaccaccatcccctcttagaggagttcctacaggagggcctggaaaagggtgatgaggagctgagacccgcattgccatttcaacccgaccctcctgccccatttacaccatcccctctgcctagattggccaatcaggactccaggccggtcttcacgtcccccactcccgcaatggccgctgtacccactcagccccaatccaaagaggggccttggtccccggaaagcgagtctcctatgctgcggataaccgcccctttgccaccgggaccaagcatggctgtcccgacgctcggccctggagagatcgccagcaccacaccgccatccagggcttggactccaacccaagagggccctggcgatatggggaggccctgggtcgccgaggtcgtcagccagggtgccggaattggcatccagggcactatcacttcctcaaccgcgagcggcgacgacgaggaaacaactactactaccaccatcatcaccaccaccatcactaccgtccaaacacccggaccatgcagttggaacttctccggccctgagggaagcctggattcccctacagacctgagctctccaaccgatgtgggcttagattgcttcttttacatttctgtgtacccgggatacggtgtggagataaaggtacagaacatcagtttgcgggagggagagacagtaactgtcgaaggtcttggagggccagatccactgccactagcgaatcaatctttccttctgagaggacaggtgattagatcacccacacaccaggcagccctacgttttcagtcactgcctccccctgctggaccaggaacatttcactttcattaccaggcgtacttactcagctgtcatttcccacggagaccagcctatggggatgttactgtaacctctctccaccctgggggatccgcccgattccattgtgccacaggctaccagctgaagggggctcggcacctgacatgcctgaacgcaactcagcccttctgggactcaaaggaacccgtctgcatcgctgcgtgcggaggcgtgataagaaatgcgaccactggacgaatagtgagcccgggattccccggaaactactcaaataatttgacctgccactggttgctggaggcccctgagggccaacgacttcacctccactttgaaaaagtatccttggccgaggatgatgaccgactcattattcgcaatggtgacaacgtggaggctccgccagtttacgattcatatgaagtggagtatcttcctattgagggtctgctgtctagcggcaaacatttctttgttgaattaagcacagatagctcaggtgccgcagccggaatggcactgcgatatgaagctttccagcagggccactgctacgagccgtttgtcaagtatgggaattttagttcgtccactccaacatatcctgtgggcacaacggttgagttcagctgcgatcccggttatacccttgagcagggtagcattataatcgaatgtgtggatccgcacgacccccagtggaacgaaacagaacctgcgtgtcgggctgtgtgtagcggagaaatcaccgattcggctggggtggtgctgagcccaaactggcctgagccttatggcagaggacaagactgcatctggggggttcacgttgaggaggacaaaagaattatgctagatatcagagttctgaggataggacccggtgatgtgttgacattctatgacggggacgatctgacagccagggtgctgggccagtacagcgggccacggtcccactttaagctgtttactagtatggctgacgttactattcaatttcaatctgaccctggaacctccgtcctcggctaccagcagggctttgtgatacattttttcgaggtgccgcgtaatgacacgtgtcccgagttacccgagataccgaacggttggaagtctccatcacagcctgaactggtgcatggcacagtggtaacatatcagtgttatcccggatatcaagtggtcggatcaagcgtcttaatgtgccagtgggacctgacctggagcgaagatcttcctagctgtcaacgggttacctcatgccacgacccaggagatgtggagcattcgaggcgactcatttcctcacctaagttcccagtgggggcaacagttcagtacatctgcgaccaggggtttgtgctgatgggaagcagtattctgacatgccatgaccgccaggccggaagccctaagtggtcagacagggcacccaagtgcctgctggagcagctgaaaccctgccatggcctgagcgcccctgagaatggggcacgcagccctgagaaacagctgcatcctgccggtgctaccattcatttctcatgcgctccgggatatgtgctgaagggccaggcatctattaaatgcgtccctgggcatccttctcactggtctgaccctccccctatctgcagagctgcctctctcgacgggttctataactcccgctcactcgatgtagccaaggcccctgccgcttcatccacactcgatgccgctcacatcgccgcagcaatattcctcccgttagttgcaatggtcttgcttgtaggcggagtctacttttatttctcccggctgcaaggaaaaagttccttacagctacctcgacctaggccaagaccttacaacagaatcacaatcgaaagcgccttcgacaatcctacatatgagactggggaaactcgcgaatacgaagtctctatttag

SEQ ID NO: 39395 - DNA, 4224 bp, Artificial Sequence
  derived and/or modified sequence
gatccccggcgccgtcgccaggcgctggccgtggtgctgattctgtcaggcgctggcggcggcagcggcggtgacggctgcggccccgctccctctacccggccggacccggctctgcccccgcgcccaagccccaccaagccccccgccctcccgccgcggtcccagcccagggcgcggccgcaaccagcaccatgcgcccggtagccctgctgctcctgccctcgctgctggcgctcctggctcacggactctctttagaggccccaaccgtggggaaaggacaagccccaggcatcgaggagacagatggcgagctgacagcagcccccacacctgagcagccagaacgaggcgtccactttgtcacaacagcccccaccttgaagctgctcaaccaccacccgctgcttgaggaattcctacaagaggggctggaaaagggagatgaggagctgaggccagcactgcccttccagcctgacccacctgcacccttcaccccaagtccccttccccgcctggccaaccaggacagccgccctgtctttaccagccccactccagccatggctgcggtacccactcagccccagtccaaggagggaccctggagtccggagtcagagtcccctatgcttcgaatcacagctcccctacctccagggcccagcatggcagtgcccaccctaggcccaggggagatagccagcactacaccccccagcagagcctggacaccaacccaagagggtcctggagacatgggaaggccgtgggttgcagaggttgtgtcccagggcgcagggatcgggatccaggggaccatcacctcctccacagcttcaggagatgatgaggagaccaccactaccaccaccatcatcaccaccaccatcaccacagtccagacaccaggcccttgtagctggaatttctcaggcccagagggctctctggactcccctacagacctcagctcccccactgatgttggcctggactgcttcttctacatctctgtctaccctggctatggcgtggaaatcaaggtccagaatatcagcctccgggaaggggagacagtgactgtggaaggcctgggggggcctgacccactgcccctggccaaccagtctttcctgctgcggggccaagtcatccgcagccccacccaccaagcggccctgaggttccagagcctcccgccaccggctggccctggcaccttccatttccattaccaagcctatctcctgagctgccactttccccgtcgtccagcttatggagatgtgactgtcaccagcctccacccagggggtagtgcccgcttccattgtgccactggctaccagctgaagggcgccaggcatctcacctgtctcaatgccacccagcccttctgggattcaaaggagcccgtctgcatcgctgcttgcggcggagtgatccgcaatgccaccaccggccgcatcgtctctccaggcttcccgggcaactacagcaacaacctcacctgtcactggctgcttgaggctcctgagggccagcggctacacctgcactttgagaaggtttccctggcagaggatgatgacaggctcatcattcgcaatggggacaacgtggaggccccaccagtgtatgattcctatgaggtggaatacctgcccattgagggcctgctcagctctggcaaacacttctttgttgagctcagtactgacagcagcggggcagctgcaggcatggccctgcgctatgaggccttccagcagggccattgctatgagccctttgtcaaatacggtaacttcagcagcagcacacccacctaccctgtgggtaccactgtggagttcagctgcgaccctggctacaccctggagcagggctccatcatcatcgagtgtgttgacccccacgacccccagtggaatgagacagagccagcctgccgagccgtgtgcagcggggagatcacagactcggctggcgtggtactctctcccaactggccagagccctacggtcgtgggcaggattgtatctggggtgtgcatgtggaagaggacaagcgcatcatgctggacatccgagtgctgcgcataggccctggtgatgtgcttaccttctatgatggggatgacctgacggcccgggttctgggccagtactcagggccccgtagccacttcaagctctttacctccatggctgatgtcaccattcagttccagtcggaccccgggacctcagtgctgggctaccagcagggcttcgtcatccacttctttgaggtgccccgcaatgacacatgtccggagctgcctgagatccccaatggctggaagagcccatcgcagcctgagctagtgcacggcaccgtggtcacttaccagtgctaccctggctaccaggtagtgggatccagtgtcctcatgtgccagtgggacctaacttggagtgaggacctgccctcatgccagagggtgacttcctgccacgatcctggagatgtggagcacagccgacgcctcatatccagccccaagtttcccgtgggggccaccgtgcaatatatctgtgaccagggttttgtgctgatgggcagctccatcctcacctgccatgatcgccaggctggcagccccaagtggagtgaccgggcccctaaatgtctcctggaacagctcaagccatgccatggtctcagtgcccctgagaatggtgcccgaagtcctgagaagcagctacacccagcaggggccaccatccacttctcgtgtgcccctggctatgtgctgaagggccaggccagcatcaagtgtgtgcctgggcacccctcgcattggagtgaccccccacccatctgtagggctgcctctctggatgggttctacaacagtcgcagcctggatgttgccaaggcacctgctgcctccagcaccctggatgctgcccacattgcagctgccatcttcttgccactggtggcgatggtgttgttggtaggaggtgtatacttctacttctccaggctccagggaaaaagctccctgcagctgccccgcccccgcccccgcccctacaaccgcattaccatagagtcagcgtttgacaatccaacttacgagactggagagacgagagaatatgaagtctccatctaggtgggggcagtctagggaagtcaactcagacttgcaccacagtccagcagcaaggctccttgcttcctgctgtccctccacctcctgtatataccacctaggaggagatgccaccaagccctcaagaagttgtgcccttccccgcctgcgatgcccaccatggcctattttcttggtgtcattgcccacttggggcccttcattgggcccatgtcagggggcatctacctgtgggaagaacatagctggagcacaagcatcaacagccagcatcctgagcctcctcatgccctggaccagcctggaacacactagcagagcaggagtacctttctccacatgaccaccatcccgccctggcatggcaacctgcagcaggattaacttgaccatggtgggaactgcaccagggtactcctcacagcgccatcaccaatggccaaaactcctctcaacggtgacctctgggtagtcctggcatgccaacatcagcctcttgggaggtctctagttctctaaagttctggacagttctgcctcctgccctgtcccagtggaggcagtaattctaggagatcctaaggggttcagggggaccctacccccacctcaggttgggcttccctgggcactcatgctccacaccaaagcaggacacgccattttccactgaccaccctataccctgaggaaagggagactttcctccgatgtttatttagctgttgcaaacatcttcaccctaatagtccctcctccaattccagccacttgtcaggctctcctcttgaccactgtgttatgggataaggggagggggtgggcatattctggagaggagcagaggtccaaggacccaggaatttggcatggaacaggtggtaggagagccccagggagacgcccaggagctggctgaaagccactttgtacatgtaatgtattatatggggtctgggctccagccagagaacaatcttttatttctgttgtttccttattaaaatggtgtttttggaaaaaaaaaaaaaaaaaaaaaaaaaagcaa

SEQ ID NO: 39396 - protein, 499 aa, Artificial Sequence
  derived and/or modified sequence
MEPRAGCRLPVRVEQVVNGALVVTVSCGERSFAGILLDCTKKSGLFGLPPLAPLPQVDESPVNDSHGRAPEEGDAEVMQLGSSSPPPARGVQPPETTRPEPPPPLVPPLPAGSLPPYPPYFEGAPFPHPLWLRDTYKLWVPQPPPRTIKRTRRRLSRNRDPGRLILSTIRLRPRQVLCEKCKSTLSPPEASPGPPAAPRARRRLGSGPDRELRKPEEPENGEPTAAATARRSKRERREEDRAPAEQVPRSPVIKISYSTPQGKGEVVKIPSRVHGSLEPFRPQQAPQDDGSQDPEVLDRESRDRPSCAPSASIPKLKLTRPVPAGADLPPPKIRLKPHRLGDSEHEPVYRAELVGELNGYLRDSSPAPCADGPAGGLADLSSGSSGEDDDFKSCPQGPQGREGLAFLVSCPEGRADCASESACSSDSLDEARSSGSEGTPADTGDLSPGHGASAPSVSREARQTVPPLTVRLHTQSVSECITEDGRTVAVGDIVWGHRR

SEQ ID NO: 39397 - DNA, 1500 bp, Artificial Sequence
  derived and/or modified sequence
atggagcccagagccggctgcagactgcccgtgagagtggagcaggtggtgaacggcgccctggtggtgaccgtgagctgcggcgagagaagcttcgccggcatcctgctggactgcaccaagaagagcggcctgttcggcctgccccccctggcccccctgccccaggtggacgagagccccgtgaacgacagccacggcagagcccccgaggagggcgacgccgaggtgatgcagctgggcagcagcagccccccccccgccagaggcgtgcagccccccgagaccaccagacccgagccccccccccccctggtgccccccctgcccgccggcagcctgcccccctaccccccctacttcgagggcgcccccttcccccaccccctgtggctgagagacacctacaagctgtgggtgccccagcccccccccagaaccatcaagagaaccagaagaagactgagcagaaacagagaccccggcagactgatcctgagcaccatcagactgagacccagacaggtgctgtgcgagaagtgcaagagcaccctgagcccccccgaggccagccccggcccccccgccgcccccagagccagaagaagactgggcagcggccccgacagagagctgagaaagcccgaggagcccgagaacggcgagcccaccgccgccgccaccgccagaagaagcaagagagagagaagagaggaggacagagcccccgccgagcaggtgcccagaagccccgtgatcaagatcagctacagcaccccccagggcaagggcgaggtggtgaagatccccagcagagtgcacggcagcctggagcccttcagaccccagcaggccccccaggacgacggcagccaggaccccgaggtgctggacagagagagcagagacagacccagctgcgcccccagcgccagcatccccaagctgaagctgaccagacccgtgcccgccggcgccgacctgcccccccccaagatcagactgaagccccacagactgggcgacagcgagcacgagcccgtgtacagagccgagctggtgggcgagctgaacggctacctgagagacagcagccccgccccctgcgccgacggccccgccggcggcctggccgacctgagcagcggcagcagcggcgaggacgacgacttcaagagctgcccccagggcccccagggcagagagggcctggccttcctggtgagctgccccgagggcagagccgactgcgccagcgagagcgcctgcagcagcgacagcctggacgaggccagaagcagcggcagcgagggcacccccgccgacaccggcgacctgagccccggccacggcgccagcgcccccagcgtgagcagagaggccagacagaccgtgccccccctgaccgtgagactgcacacccagagcgtgagcgagtgcatcaccgaggacggcagaaccgtggccgtgggcgacatcgtgtggggccacagaagatag

SEQ ID NO: 39398 - DNA, 1500 bp, Artificial Sequence
  derived and/or modified sequence
atggagccccgagccggctgccggttgccagtccgggtggaacaggttgtcaacggagcattagtggttacagtaagctgcggggagagaagcttcgctggcattctcttggattgcactaaaaaatccggcctgttcggtttacctccacttgctccgttgccacaggtggatgaatcccccgtgaacgattcacacgggcgcgcccctgaggagggcgatgccgaagtgatgcaattaggtagcagcagtcctcctcctgcccgcggggtacagcctcctgagacgactaggccagaacccccccctcccctggttccacctctgccagctgggtctttacccccgtaccctccatatttcgaaggagctcccttcccccacccactctggctgcgtgacacttataagttatgggtgccacagcccccaccaagaactatcaagcgaactaggaggagactgtcacgtaaccgagatcccggccgcttgatcctgtccaccatcagactgagaccccggcaggtgctctgcgagaagtgcaagtccactctgagcccccccgaagccagccccggacctcctgcagccccccgcgctcggaggcggctaggaagtggcccagatagagaattgaggaagccggaggaacccgagaatggcgagcccacggccgcagccactgctcggaggtcaaagagagagaggagagaggaggacagagcgcccgccgaacaggttcctagatcgcctgtgatcaagatctcttacagcacacctcagggcaaaggtgaggtggtgaagattccctctcgtgttcacggctcactggagccttttcgcccacaacaggccccccaggacgatgggtcacaggatcccgaagtcctggatagggaaagccgcgacaggcctagttgcgcaccatctgctagtatcccaaaactcaagctaaccaggcccgttccggccggagccgatctcccaccccctaagattcgtctgaaaccccatcggctaggagactccgagcatgagcccgtttaccgggctgagctggtgggggagcttaacggatacctgagggactccagtcccgcaccctgtgcagatggcccggcaggaggcctggcggatctttcttctggatcttcaggtgaagatgatgactttaaaagctgtccgcaggggccccaaggaagagagggcctcgccttcttggtaagttgtcctgaaggacgcgctgattgtgcgtccgaatctgcctgtagctccgactcactggacgaggcccggagctctggctccgagggcacacccgcagacacaggggacctgtcgccgggtcatggcgcaagtgcaccgagtgtctcccgcgaagctcggcaaacagtgcccccactaacagttcgcctccatacccaaagcgtctccgagtgcataacagaggatgggcgtacggtggctgtcggagatatcgtttggggccaccgaaggtag

SEQ ID NO: 39399 - DNA, 1500 bp, Artificial Sequence
  derived and/or modified sequence
atggagcccagggctggctgccgcctgcctgtgcgggtggagcaggtggtgaatggagccctggtggtgacagtgtcctgtggggagaggagctttgctggcatcctgctggactgcaccaagaagagcggcctgtttggcctgccccccctggcccccctgccccaggtggatgagagccctgtgaatgacagccacggccgggcccctgaggagggagatgctgaggtgatgcagctgggcagcagcagccccccaccagcccggggcgtgcagcccccagagaccaccaggcctgagcccccaccacccctggtgccccccctgcctgctggcagcctgcccccctacccaccctactttgaaggagcccccttcccccaccccctgtggctgcgggacacctacaagctgtgggtgccccagcccccacccaggaccatcaagaggacccggcggcggctgagcaggaacagagatcctggccgcctcatcctgagcaccatccggctgcggccccggcaggtgctgtgtgagaagtgcaagagcaccctgagccccccagaggccagccctggccccccagctgccccccgggcccggcggcggctgggcagcggccctgaccgggagctgaggaagccagaggagccagaaaatggagagcccacagctgctgccacagcccggcgcagcaagcgggagcggcgggaggaggaccgggccccagctgagcaggtgcccaggagccctgtgatcaagatctcctacagcaccccccagggcaaaggagaggtggtgaagatccccagccgggtgcacggcagcctggagcccttccggccccagcaggccccccaggatgatggcagccaggaccctgaggtgctggaccgggagagccgggaccggcccagctgtgcccccagcgccagcatccccaagctgaagctgaccaggcctgtgcctgctggagctgacctgcccccacccaagatccggctgaagccccaccggctgggggacagcgagcacgagcctgtgtacagagctgagctggtgggggagctgaatggctacctgcgggacagcagccctgccccctgtgctgatggccctgctgggggcctggccgacctgagcagcggcagcagtggagaagatgatgacttcaagagctgcccccagggcccccagggccgggagggcctggccttcctggtgtcctgcccagagggccgggctgactgtgccagcgagagcgcctgcagcagtgacagcctggatgaggcccggagcagcggcagcgagggcaccccagctgacacaggagacctgagccctggccacggggccagcgcccccagcgtgtcccgggaggcccggcagacagtgccccccctgactgtgcggctgcacacccagagcgtgtctgagtgcatcacagaagatggccgcacagtggccgtgggggacatcgtgtggggccacagaagatag

SEQ ID NO: 39400 - DNA, 1500 bp, Artificial Sequence
  derived and/or modified sequence
atggagccccgggccggctgccggctgcccgtgcgggtggagcaggtggtgaacggcgccctagtggtgaccgtcagttgcggggagcgctcctttgcagggatattgttggattgcaccaaaaaatctggcttgtttgggttaccaccactggctccactgccacaggtcgacgaatcccccgttaacgattcacatggacgcgcgcctgaagagggcgacgcagaagtgatgcaactgggaagctcttctccaccaccggccagaggcgttcagccgcctgagactacaagacctgagcccccaccccctctcgtcccccctctgccagccggttctctgcccccctatcctccgtactttgaaggcgcaccattcccccatccattatggttaagagatacttacaaactgtgggtcccacagcccccaccccgcacgatcaaaagaactaggagacgactgagtaggaaccgagacccagggagactgattctctcaaccattcggctgcgccctaggcaggtcttgtgtgagaagtgcaaatcaactcttagtcctcctgaggcaagtcccggaccacccgccgctcccagagcccgccggcgcctgggaagcggcccagaccgcgagctgaggaagccagaggagcccgagaacggcgaaccaaccgcagcggccacagctaggaggtctaaaagagagcggcgggaggaggaccgcgcccccgccgaacaggtgccacgatccccagtaataaaaattagttactcaacccctcagggtaagggcgaggtggtgaaaatccccagtagggtccacggcagcctggagcctttcaggccccagcaggcacctcaggacgatggaagtcaggacccagaagtgttagaccgcgagagccgggacaggccctcttgtgccccctccgcatctattcccaaattaaaattaactcgtcctgtgcccgctggagcagacctccctccaccaaaaatacgcctcaagcctcaccggctcggcgattccgagcatgaacctgtctaccgcgccgagttggtgggggagcttaacggatacctgcgggactcatccccggctccttgcgctgacggccctgcaggcggtctggctgatttgagttccgggtcaagcggggaggacgacgatttcaaaagttgtccgcagggtccacagggccgcgagggtctagccttccttgttagctgccccgagggcagagccgattgtgcctctgaaagcgcctgctctagtgattccctcgacgaagcacggtctagcggatctgagggtacaccagcggatacaggcgatctgagccccggacacggcgcctctgcgccatctgtgtcaagggaggcacgccagaccgttccacccctgacggtgagactgcatacacagtctgtctctgagtgcattactgaagatggtcgaacagttgccgtaggagacattgtttgggggcatcgtagatag

SEQ ID NO: 39401 - DNA, 1500 bp, Artificial Sequence
  derived and/or modified sequence
atggagccacgcgctggctgccgcttacctgtgcgtgtagagcaggtggtaaacggggctttggtggtgaccgtgtcgtgcggggagcgatcatttgctggcatattgcttgactgcaccaagaaatccggactgtttggacttcctcctctggcaccattaccccaggtcgacgagtcccccgtgaacgactcccacggtcgggctcctgaggaaggggacgcggaagtgatgcagcttggtagctccagcccccctcccgcacggggtgtgcagccgccagaaacaacccgtcctgagcccccacccccacttgtccctcctttacccgcagggtccctgccaccctaccctccttattttgaaggtgcacctttcccacacccattatggttgagagacacttataagctttgggtgccgcagccgccaccaagaacgatcaaaagaactcgcagacgtttaagccggaatcgcgatcccggtcgactgattctgagtaccattagactgcgtcctagacaggtgctgtgtgagaaatgtaaaagcacgctctctccccctgaggcttccccaggcccaccagccgctccaagagccagacgcaggctgggcagcggtcctgatagagagctccgcaagccagaggaaccggaaaacggagagcccactgccgcagcaacagcgaggcggagtaaacgggaacgcagagaggaggacagagccccagccgaacaggtacctaggtctcctgtaatcaaaatttcatatagcacaccccaaggaaagggagaggtggtgaaaattccatctcgggttcatgggagtctggaaccattccggccacaacaggcaccccaggatgacggctcacaggatccagaggtgctggatagagaaagcagagacagaccttcctgtgctcctagcgccagtattccaaaacttaagcttactcgccctgtgcccgcaggtgctgatctcccgcctccaaagatacgactgaaaccacaccgtctgggcgatagcgaacatgaacctgtgtacagagctgaattagttggtgagttgaacggctacctgcgagattccagtccagccccttgtgctgatggccctgcaggcggacttgccgacctgagcagtggctcttccggagaggatgatgacttcaaatcgtgtcctcaggggccacagggtcgtgaagggttagccttcctagtcagctgtcccgaaggtcgtgctgactgtgccagtgaatctgcctgcagttctgacagtctcgatgaggctcggtccagcggatcagagggaaccccagccgataccggcgacctgagcccagggcatggcgctagcgctccatctgtgagtagggaagctagacagaccgtcccccctttaaccgtgagacttcatacgcagagtgtgagtgagtgtatcaccgaggacggacggaccgtggctgtaggagatattgtctggggtcacagaaggtag

SEQ ID NO: 39402 - DNA, 2285 bp, Artificial Sequence
  derived and/or modified sequence
gcgggggcggcctgggacgcggcgggagcatggagccgcgcgccggctgccggctgccggtgcgggtggagcaggtcgtcaacggcgcgctggtggtcacggtgagctgcggcgagcggagcttcgcggggatcctgctggactgcacgaaaaagtccggcctctttggcctacccccgttggctccgctgccccaggtcgatgagtcccctgtcaacgacagccatggccgggctcccgaggagggggatgcagaggtgatgcagctggggtccagctccccccctcctgcccgcggggttcagccccccgagaccacccgccccgagccacccccgcccctcgtgccgccgctgcccgccggaagcctgcccccgtaccctccctacttcgaaggcgcccccttccctcacccgctgtggctccgggacacgtacaagctgtgggtgccccagccgccgcccaggaccatcaagcgcacgcggcggcgtctgtcccgcaaccgcgacccggggcgcctcatcctcagcaccatccgcctgcggccgcgccaggtgctctgtgagaagtgcaagagcacgctgagccccccggaggccagccccggacccccagccgcgcccagggcccgcaggaggctgggcagcggcccggacagggagctccgcaagccggaggagccggagaacggcgagcccacggctgcggccaccgccaggaggagcaagagggagaggcgcgaggaggacagggccccggcagagcaggtcccgcggagcccggtcatcaagatctcctacagcacgccccagggcaagggagaggtggtcaagatcccctcccgcgtgcacggctctctggagcccttccgtccccagcaggccccgcaggacgacggcagccaggaccccgaggtgctggacagagagtcccgggaccggccgtcctgcgcgccctcggcctccatccccaagttgaaactgacacggcctgtgccggccggcgcggacctgccgccccctaagatccgcctgaagccccaccgtctgggggacagcgagcacgagcccgtgtaccgggccgagctggtgggggagctgaacgggtacctgcgggacagctcgccggcgccctgtgcggacggccctgccggtgggctggcggacttgtcttctggaagttcgggtgaggacgatgacttcaagagctgtccccagggtccacagggacgcgagggcttggcttttctcgtcagctgccctgaggggagagcggactgtgccagtgagtcggcgtgcagcagcgacagcctggacgaggccagatcgtccggctcggaagggacgccggcagacacgggtgacctctcgcctggccacggcgcgtcagcgccctcggtgtccagagaggctcgccaaacggtgccgcccctgacggtcaggctgcacacacagagcgtgtcggagtgcatcacggaggacggcaggactgtggccgtgggggacatcgtctggggtcaccgacgatgagggcgcacctgctgtcctggagcttccgatctctgttcggggaccctgtgagccttctggccggctgcgtgcagagcccactgggcacggtggtcggcctggtgtgaggccccccggggaccggcagtgtgtccagggaggggatggccctgagcccagcggctcctcccgctgagtgtatttcttcccaccactcagcgcatggctgccctggctcacgaggcagtcgggactcgtgacttgctggctgctggctgctgctgcctcgcgcgctggggttccatggaggaactgggcctgccgccccggcctcacctgctgcccgcatgctggggtcccatggaggaaccaggcctggcgccccggcctcgcccagcggctggtgtgggcagctgttccctgcctcgcagtgtcctggaggcagctgtctcgcagactcagcttggtctcccgcaggcttcagaaaaacccaattgcacgtgtgggattcttccccagcccttgggtgcggggtctctgtgcacttgagagctgggggacccacccaccgtctcccactccaagttcatcccagagcgtggggcccgctgggcacctggcacctggcctgcagatgctgctacgagtgaccagtgctgtgtggaggaggccaagggcggcccctgggaaaccgggcttcaacagtacaaggaaaagaaacttgctctgttttgtaagagcgtgttccttttcctcttttttgtcactttaaagacc

SEQ ID NO: 39403 - protein, 609 aa, Artificial Sequence
  derived and/or modified sequence
MAGTLDLDKGCTVEELLRGCIEAFDDSGKVRDPQLVRMFLMMHPWYIPSSQLAAKLLHIYQQSRKDNSNSLQVKTCHLVRYWISAFPAEFDLNPELAEQIKELKALLDQEGNRRHSSLIDIDSVPTYKWKRQVTQRNPVGQKKRKMSLLFDHLEPMELAEHLTYLEYRSFCKILFQDYHSFVTHGCTVDNPVLERFISLFNSVSQWVQLMILSKPTAPQRALVITHFVHVAEKLLQLQNFNTLMAVVGGLSHSSISRLKETHSHVSPETIKLWEGLTELVTATGNYGNYRRRLAACVGFRFPILGVHLKDLVALQLALPDWLDPARTRLNGAKMKQLFSILEELAMVTSLRPPVQANPDLLSLLTVSLDQYQTEDELYQLSLQREPRSKSSPTSPTSCTPPPRPPVLEEWTSAAKPKLDQALVVEHIEKMVESVFRNFDVDGDGHISQEEFQIIRGNFPYLSAFGDLDQNQDGCISREEMVSYFLRSSSVLGGRMGFVHNFQESNSLRPVACRHCKALILGIYKQGLKCRACGVNCHKQCKDRLSVECRRRAQSVSLEGSAPSPSPMHSHHHRAFSFSLPRPGRRGSRPPEIREEEVQTVEDGVFDIHL

SEQ ID NO: 39404 - protein, 143 aa, Artificial Sequence
  derived and/or modified sequence
MAGTLDLDKGCTVEELLRGCIEAFDDSGKVRDPQLVRMFLMMHPWYIPSSQLAAKLLHIYQQSRKDNSNSLQVKTCHLVRYWISAFPAEFDLNPELAEQIKELKALLDQEGNRRHSSLIDIDSVCVGEHRGLGGHSVSYTICA

SEQ ID NO: 39405 - DNA, 1830 bp, Artificial Sequence
  derived and/or modified sequence
atggccggcactctcgacctggacaaaggctgtactgtggaggagttgttgcgaggctgtatcgaggccttcgatgactcagggaaagtacgggacccccagctcgtccgtatgttcctgatgatgcatccctggtatataccaagcagtcaactggcagccaagctcctccatatttatcagcagagcaggaaggacaatagtaactccctacaggtaaagacctgccacctggtgaggtactggattagtgcttttcccgccgagttcgacctaaacccggaactcgccgaacaaattaaggagctgaaggccttgcttgatcaggagggaaaccgtcggcactctagcctgatcgatatcgacagcgtgcctacctacaaatggaaaaggcaagtcacccagaggaatcctgtgggccagaaaaagagaaaaatgtccttgctattcgaccatctagaacctatggagctagccgagcacctgacttacctggaatataggtctttctgcaagatactctttcaggattaccactccttcgtgacgcacggttgtactgtggataacccggtgttagaacgcttcatatctctgtttaattcagtgtctcaatgggtacagttgatgatcttaagtaagccgaccgcgccccagcgcgcactggtaattactcactttgtgcatgtggcggaaaagttgctacagcttcagaactttaacactctgatggccgtggttgggggcttaagccactcgagcattagccgcctgaaggaaacacacagccacgtgagccccgagactattaagttatgggagggtctcaccgagcttgttactgccaccggcaactacggcaattaccggcgtaggctggctgcatgcgtcgggttccggtttccaatcttgggcgtacacctcaaggatctggtggcgctgcaactggctctgcccgattggctagacccagcccgtacaagactgaacggggctaaaatgaagcagctgttcagcatcctggaagagctggcaatggtcacgtcgctgagacccccagtgcaggcaaatcctgatttattatccctgctaaccgtgagtttggatcagtatcagaccgaagatgagttgtatcagctaagccttcagcgagagccaagaagcaagagctcccccacgtcccctacaagctgtactcccccacctagacccccagtactggaggagtggaccagcgccgctaagcccaagctggatcaagccctcgtggttgagcatatagaaaaaatggtagagagtgtttttagaaatttcgacgtggatggggacggacacatttcgcaggaggagtttcagatcatccgggggaacttcccatacctgtcagcattcggcgatcttgatcaaaatcaagacggctgtatctcgcgcgaagagatggtttcctactttttgagatcatccagtgtgctgggaggtagaatgggattcgtgcacaattttcaggagtcaaacagcctgagacctgttgcatgtcgacactgtaaggcgctgatcctgggcatttacaagcagggcctcaagtgtagagcctgcggagtgaattgccataaacagtgcaaggataggctcagcgttgagtgccgcaggcgcgcacaaagcgtctcattggaaggctcagcaccgagcccttccccaatgcactcccatcaccacagggcctttagtttctcattgccccgccctgggcggaggggatcacgtcctcctgagattcgcgaggaagaagttcagacagtggaagacggagtgttcgacattcacctgtag

SEQ ID NO: 39406 - DNA, 1830 bp, Artificial Sequence
  derived and/or modified sequence
atggccggtactctggaccttgataagggatgtaccgtggaggagctgctgcgaggatgtattgaggcatttgacgactccgggaaggttcgcgacccacagttagtccgcatgtttctgatgatgcacccatggtatatccctagtagtcagttagccgcgaaactgctccatatatatcaacagagccgaaaagacaattccaactccttgcaagttaaaacatgtcatctggtgaggtactggatttcagcttttccagccgagtttgacctgaaccctgagctcgcagagcaaatcaaggaattaaaggctctcctggaccaggaggggaacaggcggcatagttctcttattgatatcgacagtgtacccacttacaaatggaagcggcaggtgacacaacgcaatcccgtcggacagaaaaaaagaaagatgtcgctgcttttcgatcatttggagccaatggagctcgctgaacatttaacctacctcgaataccgctctttttgcaaaattctgtttcaagactatcattcctttgtgacacacggatgcaccgtggacaatcccgtactggagcgctttatctcgttattcaatagtgtgtcccagtgggtccagctgatgattctcagcaaaccaacagctccccagagagccctcgtaatcactcattttgttcacgttgcggaaaagctcctgcagctgcagaattttaacactctgatggctgtcgtggggggattaagccattctagcatatcgcgtctgaaggagacccactcccacgtgagtcccgaaaccatcaaactctgggagggactgaccgaattggtgacagctactggcaactatggaaattaccgaagacgcctagcggcatgcgtgggctttcgctttccgattctgggggttcacctcaaggacttggttgctctgcagcttgcactccccgattggttagatcccgccaggactagactcaacggcgcgaagatgaaacaactgttctccattctggaggagttagctatggtcacaagccttagacctccagtccaggcgaaccccgacttattaagcttgctcaccgtctcgctggaccagtatcagacggaggatgagctgtaccagctctccctccagagggaaccccggagcaagagttctcctacatcacctacctcctgcacccccccacccaggccacccgtgctggaggaatggacatctgcagcaaaacctaagctcgatcaggccctggttgtggagcacattgaaaaaatggtcgagtccgtgtttcgaaattttgacgtcgatggggacggtcacatctcgcaggaagaattccagatcattcggggaaattttccctatctctcggcctttggggatctagatcagaatcaggatggatgtatcagccgggaggaaatggtaagctacttcctgcgctcatcctccgtgcttggcggtcgcatggggttcgtccacaatttccaggagtctaactcacttcgacctgtggcgtgtagacattgcaaggccctgatcctggggatctacaagcaaggcctcaagtgtagagcttgtggtgtcaattgtcataaacagtgcaaagataggctgtccgttgaatgccgaagacgggcacagtccgtttctctggagggttctgcgcctagcccaagccctatgcattctcatcaccaccgggcgtttagcttctcccttcctagacccgggcggagaggcagcaggcctcccgaaatccgagaggaggaggtccagacagtggaagatggagtgttcgacatccatctctag

SEQ ID NO: 39407 - DNA, 1830 bp, Artificial Sequence
  derived and/or modified sequence
atggctggcacgctggacctggataagggttgcaccgtggaggagctcctgagagggtgcattgaagcgtttgatgacagcggaaaggtgagggatcctcagttggtgcgcatgtttctgatgatgcacccctggtacataccatcctcacaacttgctgctaagttgctccatatttatcagcagtcccggaaggataattccaactctcttcaggttaagacctgtcacctggttcgatattggatatccgccttccctgcggaatttgacttgaatcccgagttagctgaacagatcaaggagctgaaagcccttctggaccaggaggggaacagacggcactcgtctcttattgacattgactccgtcccaacttataaatggaaacgtcaggtgacccagaggaaccctgtgggccagaagaaaaggaagatgtccctactatttgatcacctggaacctatggaactggcagaacaccttacctatctggagtataggagcttctgcaaaatactgtttcaggactatcactcattcgtcacacatggctgcaccgtggacaacccagtgctggagcgctttatcagcctgttcaactctgttagtcaatgggtgcagctgatgatcctttctaaacctactgcacctcagagagctcttgtgataactcacttcgtgcatgtggccgaaaagctgcttcagctgcagaattttaacaccctcatggcagtcgtgggaggactctcacattctagcatttcaaggctgaaggaaacgcactcccacgtaagccccgagacgattaagctgtgggaggggctgactgaactggtcaccgctaccggaaattacggaaactatcgtcgccgccttgccgcctgcgtgggtttccgttttccaattctaggggtgcaccttaaagatctggtcgccctgcagcttgcactgcccgactggctggatccagctcgaactcggttgaatggggcaaagatgaaacagctcttctctatacttgaggagctcgccatggtgacatcgctgcgaccgcccgtgcaagccaaccccgatctgctaagcctgctaaccgtgtccctagaccagtaccagacagaagacgagctgtatcaactaagtctacagagagaaccccgcagcaaatctagccctacaagccccacctcctgcacccctccccccagacccccggtgctggaagagtggacttcagccgccaagcccaaactggaccaggccctcgtggtggaacacatcgaaaaaatggtggaatccgtctttagaaacttcgacgtggatggtgatggccacatcagccaagaagagtttcagattatccgcggcaacttcccttacctgagcgcttttggagatttagaccagaatcaggatgggtgcatcagtcgcgaggaaatggtgagctatttcctcagaagttctagcgttctgggaggacgtatgggcttcgtccacaacttccaggaaagtaacagcctgcgacccgtggcatgccgtcattgcaaagccctcattctgggcatctataaacagggccttaaatgccgcgcctgcggagttaactgccataagcagtgtaaagatcgcctgtccgtcgagtgccggaggcgagcccagtccgtgagtctggagggcagtgccccatcacccagccctatgcactcacaccatcatcgtgctttctccttttcactaccccgtccaggaaggcgggggagccgccctccagagattcgggaagaagaggtgcagaccgtagaggacggcgtgtttgatatccacctgtag

SEQ ID NO: 39408 - DNA, 432 bp, Artificial Sequence
  derived and/or modified sequence
atggctgggaccttggacctcgataagggatgtacagtggaagaactcctgagaggctgtattgaggcattcgatgactcggggaaggttagagatcctcagctggtgcggatgttcctcatgatgcacccctggtacattccgtcaagccaactcgccgccaaacttctgcatatctaccaacagtctaggaaggataactcaaacagtctccaggttaaaacatgtcatctggtgcgctactggattagcgcctttcccgccgagtttgacctgaacccagaactagcagaacagattaaggaactcaaagcgctgcttgatcaggaggggaacaggcgccactcaagcctaatcgacattgacagcgtgtgcgtaggcgagcacagaggccttggcggccatagcgtctcttacacgatctgcgcctag

SEQ ID NO: 39409 - DNA, 1830 bp, Artificial Sequence
  derived and/or modified sequence
atggccggcaccctggacctggacaagggctgcaccgtggaggagctgctgcggggctgcatcgaggcctttgatgattctgggaaggtgcgggacccccagctggtgaggatgttcctgatgatgcacccctggtacatccccagcagccagctggccgccaagctgctgcacatctaccagcagagcaggaaggacaacagcaacagcctgcaggtgaagacctgccacctggtgcgctactggatcagcgccttccctgctgagtttgacctgaaccctgagctggccgagcagatcaaggagctgaaggccctgctggaccaggagggcaacagaagacacagcagcctgattgatattgattctgtgcccacctacaagtggaagaggcaggtgacccagaggaaccctgtgggccagaagaagaggaagatgagcctgctgtttgaccacctggagcccatggagctggccgagcacctgacctacctggagtaccgctccttctgcaagatcctcttccaggactaccacagctttgtgacccacggctgcaccgtggacaaccctgtgctggagcgcttcatcagcctcttcaacagcgtgtcccagtgggtgcagctgatgatcctgagcaagcccacagccccccagagggccctggtgatcacccactttgtgcacgtggccgagaagctgctgcagctgcagaacttcaacaccctgatggctgtggtgggcggcctgagccacagcagcatcagccggctgaaggagacccacagccacgtgtccccagagaccatcaagctgtgggagggcctgacagagctggtgacagccactggaaactacggcaactacagaagaaggctggccgcctgtgtgggcttccgcttccccatcctgggcgtgcacctgaaggacctggtggccctgcagctggccctgcctgactggctggaccctgcccggacccggctgaatggagccaagatgaagcagctgttcagcatcctggaggagctggccatggtgaccagcctgcggccccctgtgcaggccaacccagacctgctgagcctgctgactgtgtccctggaccagtaccagacagaagatgagctgtaccagctgagcctgcagcgggagcccaggagcaagagcagccccaccagccccaccagctgcaccccaccaccccggccccctgtgctggaggagtggaccagcgctgccaagcccaagctggaccaggccctggtggtggagcacatcgagaagatggtggagagcgtcttcaggaactttgatgtggatggagatggccacatcagccaggaggagttccagatcatccggggcaacttcccctacctgagcgccttcggggacctggaccagaaccaggacggctgcatcagccgggaggagatggtgtcctacttcctgcggagcagctctgtgctgggcggccgcatgggctttgtgcacaacttccaggagagcaacagcctgcggcctgtggcctgccgccactgcaaggccctgatcctgggcatctacaagcagggcctgaagtgccgggcctgtggggtgaactgccacaagcagtgcaaggaccggctgtctgtggagtgcagaagaagagcccagagcgtgtccctggagggcagcgcccccagccccagccccatgcacagccaccaccaccgggccttctccttcagcctgccccggcccggccggcggggcagcaggcctcctgagatccgggaggaggaggtgcagacagtggaggatggagtgtttgacatccacctgtag

SEQ ID NO: 39410 - DNA, 432 bp, Artificial Sequence
  derived and/or modified sequence
atggccggcaccctggacctggacaagggctgcaccgtggaggagctgctgcggggctgcatcgaggcctttgatgattctgggaaggtgcgggacccccagctggtgaggatgttcctgatgatgcacccctggtacatccccagcagccagctggccgccaagctgctgcacatctaccagcagagcaggaaggacaacagcaacagcctgcaggtgaagacctgccacctggtgcgctactggatcagcgccttccctgctgagtttgacctgaaccctgagctggccgagcagatcaaggagctgaaggccctgctggaccaggagggcaacagaagacacagcagcctgattgatattgattctgtgtgtgtgggggagcaccggggcctgggcggccacagcgtgtcctacaccatctgtgcctag

SEQ ID NO: 39411 - DNA, 1830 bp, Artificial Sequence
  derived and/or modified sequence
atggccggcaccctggacctggacaagggctgcaccgtggaggagctgcttcgggggtgtatcgaggcattcgacgactcaggcaaggttcgtgacccccaactggtgagaatgttcctgatgatgcacccctggtacattccctcatctcagttggcggccaaactgctccacatctaccagcagtctcgaaaagataactccaactccctgcaggtcaaaacatgccatctcgtgcgctactggatctctgccttccctgccgagttcgatctaaatcccgaactggctgaacaaatcaaagagttgaaggccctcttagatcaggaggggaaccgcaggcacagttccttgattgatatcgattcagtccccacgtacaagtggaaaagacaggttacccagcgcaatccagtcggtcaaaaaaagcgaaagatgagcctgctgtttgaccatttagagcctatggaactggctgagcatctgacctatctagaatatcgcagcttctgcaagatcctgtttcaggattaccatagcttcgtgacacatggctgcaccgtggataatcctgtgctcgagcgctttatcagtcttttcaactctgtgtcacagtgggtgcagctgatgattctgagcaaaccgacagccccccaacgagccctggttattacacactttgtgcacgtcgccgaaaaacttctacaactgcagaatttcaacacactaatggctgtcgtgggcgggctgagtcactccagtatctcacgtcttaaagagacacactcccatgtgagtcccgaaactatcaaactttgggagggcttaaccgaactggttaccgcaacagggaactacgggaactaccgccgcaggctggcggcttgcgttggcttccgttttcccatcctgggggtccatctaaaagatttggtcgctctgcagctcgccttgcccgattggctggatcctgctaggacccggcttaatggcgcgaagatgaaacagctgttctccattctggaagaacttgctatggtgactagcctgcgacccccagttcaggcaaaccctgatctgctgtctctcctgacggtgtccctggatcagtatcagacagaggacgagctataccagctgagcttgcagcgggagcctaggagcaaaagtagtccgacatcacccacttcctgtacccccccgccccgccctcccgttctcgaggaatggacatccgccgctaagccaaaactggaccaggctttggtggtagaacacatcgaaaagatggtggaatcggtcttcaggaactttgacgtcgacggagacggtcatatctcccaggaggagttccaaatcatccggggcaacttcccataccttagtgctttcggcgacctggaccaaaaccaggacgggtgcatcagccgcgaggagatggtctcttattttctccgcagttcatccgtgctggggggccggatgggcttcgtgcacaacttccaggaatccaatagcctgaggccagtggcatgccgccactgcaaggcactaatactgggcatctataaacagggcttgaagtgcagggcgtgtggtgtgaattgccacaagcagtgcaaggacagacttagtgtggagtgtcggcgacgcgctcagagtgtcagcctggaagggtcggctccctcaccttcacccatgcattcccaccaccaccgggccttttctttttccttgcctcgccccggccgcagaggaagcaggccaccagagatccgggaggaggaagtccagacagtggaggatggcgtcttcgacattcatctgtag

SEQ ID NO: 39412 - DNA, 1830 bp, Artificial Sequence
  derived and/or modified sequence
atggccggcaccctggacctggacaagggctgcaccgtggaggagttgctgagaggatgtattgaagctttcgacgattccgggaaagtgcgggatccacagctggtaaggatgttcctaatgatgcacccttggtacattcctagctcccagctggccgccaagctgctgcacatctatcagcaaagccggaaagacaatagcaactccctgcaggtaaagacttgccacctggtgagatattggatcagtgcctttcctgccgagttcgatcttaatcctgagctggctgaacaaattaaggagcttaaggccctgcttgatcaggagggaaacagacgacactcgtcgctgattgacattgatagtgtccctacgtacaagtggaagaggcaagttactcagagaaaccccgtgggccagaagaagaggaaaatgagcctcctgttcgaccatttggagcctatggagttagccgaacaccttacctatctggagtataggagcttctgcaaaatcctattccaggactaccactcttttgtgacacacggttgtaccgttgataaccctgtcctcgagcgctttatctccctattcaactccgtgtcccagtgggtccagctgatgatcctcagtaagccgaccgctccacagcgggccctggtaatcacccatttcgtgcacgtggctgaaaaactactacagctgcaaaattttaatactctgatggcagtggtcggaggcttgagtcacagtagcatctctcgcctcaaagagactcactctcatgtctcccctgagactattaaattatgggaggggctgacagagctagtcacggccacaggtaactacggaaattatcgaaggagactcgccgcctgcgtgggttttcgcttccctatcttgggcgtgcatcttaaggacttagtcgcactacagctggccttgccagattggcttgatccagctagaactcggctaaatggagccaagatgaagcaactgtttagcatcttggaggaactggctatggtgaccagtctccgcccacctgtccaggccaatccagaccttctttctctgttgaccgtctccctggaccagtaccagacggaggatgagctataccagttatctctacagcgagagccacgctccaagtcatcccccacaagtcctactagctgcacgcctcctccaagaccaccagtgctggaagaatggacttcagccgctaagccaaagttagaccaggctctggtagtggagcacattgagaaaatggttgaaagcgtgtttaggaattttgatgtggatggcgacggacacatcagccaggaagagttccagataatcagaggaaatttcccctaccttagcgcatttggagacctggaccagaatcaggacgggtgtattagtcgagaagagatggtgagctacttcttacggagctcgagcgtgttaggcgggagaatgggctttgtgcacaatttccaagagagcaactcactccgccccgtcgcatgtagacactgcaaagcgctgattctgggaatctataagcagggcttaaaatgtagggcatgcggtgtaaactgccacaagcagtgcaaagatcggctgagtgtggaatgccgcaggcgggcacaatccgtctcactcgaggggtcggcccctagcccctcacctatgcactcccatcaccacagagccttctctttctctctcccaagacccggccgaagaggctcccggccgccagagatcagagaggaggaggtgcagactgtggaggacggcgtcttcgacattcacctatag

SEQ ID NO: 39413 - DNA, 1830 bp, Artificial Sequence
  derived and/or modified sequence
atggccggcaccctggacctggacaagggctgcaccgtggaggagctgctgaggggctgtatcgaggcctttgatgattcgggtaaggtacgagacccacagctcgtgagaatgtttctgatgatgcacccctggtacataccttctagccagcttgcagccaaactgctccatatctaccagcagagtcggaaggacaattctaattcactgcaagtgaagacctgccacttagtgcggtactggatttccgctttccctgccgaatttgacctgaaccctgagctggcagagcagattaaagagctcaaagccctgttggatcaggagggtaatcgaaggcactcttctcttattgacatcgactcggttccaacctacaagtggaaacggcaagtgacacagcgcaatcccgtcgggcagaaaaaaaggaagatgtcccttctgtttgatcatctggagcccatggaactggcggagcacctgacatatctggaataccgctccttctgcaagatcttgtttcaagattatcactcatttgtgacccacggatgcactgtggacaacccggtcctcgagcggttcatctccctttttaattcggtgtctcaatgggtccagcttatgatcctctcaaagccaacagccccccagagagcattagtaattacacatttcgtgcatgtcgcagagaagttgctacagcttcagaactttaataccctgatggccgtggtcgggggactctctcattcttccatctcgcgcttgaaggaaacgcacagccatgttagtcctgagaccataaagttatgggagggcctgactgagctggtcacagcaacaggaaactacggaaattacaggcgccgacttgccgcctgtgtgggtttcagatttcccattctgggcgtgcacctgaaggacctggttgcccttcagctcgctctgcctgactggctggacccagcacgaacacgcctcaacggagcgaagatgaagcagctgttcagcatacttgaagagctggcaatggtcacctccctaagaccacccgtgcaagccaacccagaccttttaagcctgctaacagtttctctcgaccagtatcaaacggaagatgagctatatcagctttccctgcaaagagagcccagaagcaagtcgagtcccacatcaccgacgtcgtgtacaccacctcccagaccacccgttctggaggagtggacaagcgccgcaaagcccaagctggaccaggccctcgtcgtagagcacatagagaagatggtggagagcgtgtttcggaattttgacgttgatggagatggacacatctcccaggaggaattccaaataatcagggggaattttccttacctgtccgccttcggcgacctggaccagaatcaggatggctgtattagcagggaggagatggttagttacttcctccggagctcatccgttctgggtggcaggatgggattcgtgcacaacttccaggaatccaactcattacgtcctgtggcatgccgccactgcaaggctctcattctggggatttataagcaggggcttaagtgtcgcgcctgcggggtcaattgtcacaaacagtgcaaagaccgactgagtgttgagtgtcggaggagagctcagagcgtctccttagagggttctgctcctagccccagtcctatgcactctcatcaccatcgcgccttctccttctcattaccccggcccgggcgccggggctctaggcccccggaaataagagaggaagaagtgcaaactgttgaggacggcgtttttgacattcatctgtag

SEQ ID NO: 39414 - DNA, 432 bp, Artificial Sequence
  derived and/or modified sequence
atggccggcaccctggacctggacaagggctgcaccgtggaggagctgttgaggggttgtattgaggcatttgacgattcgggcaaagttcgggacccacagttggtgcgaatgtttctcatgatgcacccttggtatatacctagttctcagctggctgcgaaattgttgcacatctaccagcaatctcgaaaggacaactctaatagcttgcaggtgaaaacttgtcatcttgtccgctactggatttctgccttccccgctgaattcgacctcaaccccgagttggccgagcagattaaggagctaaaggctttgctagaccaagagggaaatcggcggcattctagtttgattgatatagactctgtttgtgtgggggaacatcgcggattgggaggacactcagttagttacaccatctgtgcctag

SEQ ID NO: 39415 - DNA, 1830 bp, Artificial Sequence
  derived and/or modified sequence
atggctggtacattagatttggataaaggatgcacagttgaagagctacttagagggtgcatcgaagccttcgacgattcaggtaaagttcgagacccccagctagtgagaatgtttctgatgatgcacccctggtacatacccagctctcagcttgcagctaagcttctgcacatttatcaacaatcaagaaaagacaatagtaattccttgcaggtcaagacctgccacctcgtgaggtattggatctccgccttccccgctgagtttgatcttaatcctgagctcgcggagcagatcaaggaactgaaggcgttactcgatcaggaagggaacagaagacacagcagcctcattgacatcgatagcgtgccgacttacaaatggaaacgtcaggtcacccagagaaaccctgtgggccagaagaagcgaaaaatgtcgctgctgtttgatcacctcgaaccgatggaactggcagagcacctgacctacctagagtaccgttccttctgcaagatcctctttcaggactaccattcattcgtgacccatgggtgcactgtggacaatccagtgttggagagatttatttccctcttcaattccgtctcccagtgggtgcagttgatgatcctgtcaaagcccactgctccccaaagggccctggtgatcacacactttgtccacgttgcggagaaattactccaattgcagaacttcaacaccttaatggccgtggtcggtgggctgtctcacagtagcataagtcgactgaaggagacgcattctcatgtgtctcctgaaacaataaagttgtgggaaggcttgacagaacttgtgactgctactgggaattacggcaactacagacgcaggctcgcagcatgtgtcgggttccggttccccatcctgggcgtgcacctcaaggatcttgtggctctgcaactggcccttcccgactggcttgatcccgctcgcaccagacttaacggcgcaaagatgaagcagctttttagcattcttgaagagctggccatggttacctcattgaggcccccagtccaggcgaatcccgacttgctgtccctactgactgtgagtctggaccaatatcagacggaggatgagctgtatcagctgagcctccagcgcgagcctcgctcaaaatccagtcccacctctcctacatcctgtacccctccaccgcgtcccccagtattagaggaatggaccagtgcagcaaaaccaaaactcgaccaggcactggtggttgaacacatcgagaagatggtggaatccgtgtttcgcaacttcgatgtagatggcgatggacacatctcacaggaagaattccagatcatacgagggaacttcccttatttgtctgctttcggagaccttgaccaaaaccaggacgggtgtataagtagggaagagatggtgtcttatttcttacgtagcagttcagtgctcggaggacggatgggatttgtccacaacttccaagaatccaattcactgcggccagtagcatgccgacattgtaaagcgttgatactgggtatctataagcaggggctgaagtgtcgcgcatgtggcgtgaactgccacaagcagtgtaaggacaggctctccgtggaatgccgacggagagcacagtccgtcagcttggaagggtccgcaccctcacctagccctatgcactcccaccatcacagagctttttccttctccctgccgagacctggcaggaggggatcccgtccacctgaaatccgggaggaggaagtgcagacagtggaggacggtgttttcgatattcacctgtag

SEQ ID NO: 39416 - DNA, 1830 bp, Artificial Sequence
  derived and/or modified sequence
atggcaggtaccctggacctcgacaaaggttgcacagtggaagaactgctgcggggatgtatcgaggcattcgacgatagcgggaaggtccgggatccgcagcttgtgcgcatgtttctcatgatgcacccgtggtatatcccaagctctcagttggctgctaagctgttgcatatctatcagcagagccgcaaagataattcaaacagcctgcaggtgaagacatgccatctggttcggtattggatctctgctttccctgccgaattcgatctgaacccagaactggccgaacaaattaaggagctcaaggcactactggatcaagagggcaatagaagacactcttctctgatagacattgacagcgtccccacatacaaatggaaaaggcaggtcacccaaaggaaccctgtgggccagaagaagagaaagatgtctctactgttcgatcatttggagcccatggaactggcagaacacttgacttatctcgaataccggagcttctgtaaaatcctgttccaagattatcactctttcgtgactcacggatgtaccgttgataacccagtcctggagaggtttatcagtctctttaattctgtaagccagtgggtgcaactgatgattctgagcaagcctaccgctccccagcgggctcttgtcatcacccacttcgtccacgtggcagaaaaattactgcaactgcagaactttaatacgctcatggcagtggtgggcggactatcgcactcatcaatttcacgtctcaaggagacccatagtcacgtatcccccgaaaccattaaattgtgggagggtctcactgaattggtcactgctactggtaactacgggaactatcgtagacgacttgcggcatgcgttggcttccgctttccaatcctcggcgtgcatcttaaagatttagtcgcccttcaacttgctctgccagactggctcgacccagctcgtaccaggctcaacggcgctaagatgaagcagctgtttagtattcttgaagaactagcaatggtgacctccctccgcccaccggtgcaggccaaccccgatctgctttcattgttgaccgttagcttagatcagtaccaaaccgaggatgagctgtaccaactgagcttgcaaagggagccaagatctaagagctccccaacaagccctacaagttgcaccccacctccccgaccccctgtattggaagaatggacttccgccgcaaagcccaaactggaccaggctctcgtcgtcgagcacatcgaaaaaatggttgagagtgtgttcagaaattttgacgtagacggtgacgggcacataagtcaggaggagttccagattattcgtggcaactttccttacctctcggcattcggcgaccttgatcagaatcaggacggttgcatttcaagagaagaaatggtgtcttacttccttcggagtagctctgtgcttggcggtagaatgggcttcgttcataactttcaggagtcaaactcactgcggccagtggcatgcaggcactgtaaggctctgatcctgggaatttacaagcaagggctcaagtgccgggcttgtggcgtaaactgccacaaacagtgcaaagatcggctaagcgtggagtgcagacggagagcacagtctgtctctttggagggctctgctccttcaccaagccccatgcactcccatcatcaccgagccttctcgttctctctccctagacctggtaggagggggtctagaccaccggaaatacgagaggaggaagtacagacagttgaggatggtgtgtttgacattcacttgtag

SEQ ID NO: 39417 - DNA, 1830 bp, Artificial Sequence
  derived and/or modified sequence
atggccggtactcttgacctggacaaaggctgcactgtcgaggagctactaagaggatgtattgaggcttttgacgattctggcaaagtgagagatcctcagctagtgagaatgttcctgatgatgcacccatggtatataccctcctctcagctggccgctaagttgcttcatatttaccagcaatccaggaaggacaactctaacagcctgcaggtgaagacttgtcacctcgtcaggtactggatctccgcctttcctgccgagttcgatctgaaccctgagctcgccgagcagataaaggaactaaaggccctgctggaccaggaagggaaccgccgacactccagcctgattgatatcgattccgtcccaacctataaatggaaaaggcaggtgacccaacggaatccggtcggccagaagaagaggaaaatgtcccttttatttgatcatctggaacctatggaactggcggaacatctgacatatctggagtatagaagcttctgtaagattctgttccaagattatcactctttcgtaacccatggctgtacagtggacaaccccgtgcttgaaagatttatcagcctctttaattcagtttcccaatgggttcagctcatgatcctatccaaacctaccgccccacagcgcgcattggtcataacccacttcgttcatgtggctgagaaattgttgcagctacagaactttaatactctgatggctgttgtgggcggacttagtcacagctcaatctcaaggctcaaagaaacccactctcatgtctccccagagaccattaaactgtgggagggtctgacagagctggtgaccgctacaggtaactacggtaattatcgcagacgcttggcagcttgcgtcgggttccggtttcccatcctgggggtgcatctgaaagacttggttgcgttacagttggccctgccagactggctcgacccagctagaacacggttaaatggagccaagatgaagcagctttttagcatcctggaggaattggctatggtgaccagtctccgccctcctgtgcaagccaacccagatttactgtctcttctgaccgtcagtctggaccagtatcagacagaagatgagctgtatcagctgtccctgcaacgtgagcccaggtccaagtcctctcctaccagccccacctcatgcacaccacctccacgccctcctgtcctggaggaatggaccagcgccgctaagcccaaactagaccaagctctcgtagtggaacacatcgagaagatggttgagagtgtgtttcgcaatttcgacgtggatggagacggacatattagtcaagaagaattccagatcatacggggaaacttcccttacctttccgctttcggagacctcgatcagaaccaggatggctgtatctccagggaagagatggtgtcgtatttcttgcgcagctcttccgtactcggtggcaggatgggttttgtgcataattttcaggaatcaaactcactgcgaccagttgcctgtcggcattgcaaggcactgattctagggatctacaagcagggccttaagtgtcgcgcttgcggggttaactgtcataagcagtgtaaggacaggctctcagtcgaatgcagacgaagggcgcagtcagtgtctctggagggtagtgccccatccccctcccctatgcacagccatcaccatagggccttctcattctctcttccccgtcccggacgcagaggcagtcgccctcccgagatccgagaggaggaagtccaaacagtcgaggatggggtgttcgacatccacctgtag

SEQ ID NO: 39418 - DNA, 432 bp, Artificial Sequence
  derived and/or modified sequence
atggcaggcacgttagatttggataaaggctgtaccgtggaggagctgctgcgagggtgcatagaggcttttgatgattccggaaaagtgcgtgacccccagcttgtgcgcatgtttttaatgatgcacccatggtatattcctagcagccagctcgctgccaagctgctgcacatctatcagcaaagccgaaaggacaactccaattccctacaggttaagacctgccatctcgtacgctattggatcagcgcctttcctgccgagttcgacttgaaccctgaactcgcggagcagatcaaagaactgaaggcgctattagaccaagaggggaaccgacgccactcatctctcattgatattgattccgtgtgtgtgggggaacatagaggcctggggggacactcggttagttacacgatctgtgcgtag

SEQ ID NO: 39419 - DNA, 2310 bp, Artificial Sequence
  derived and/or modified sequence
cgatttcattcctcgctccccacaggtccctctccccaaaatattcccatcttgtcctagcccatcccccagactatctcaaggaccagctgtccccacgcccccgacctccactaggcctgtgccacccgctgcctgcaggaagacgcccggtcccgggccgggttagccccatgggaacggggttcggtccgagcccggtgggaggctcccggagcgcagcctgggcccagcccaccccgcgccggcggccatggcaggcaccctggacctggacaagggctgcacggtggaggagctgctccgcgggtgcatcgaagccttcgatgactccgggaaggtgcgggacccgcagctggtgcgcatgttcctcatgatgcacccctggtacatcccctcctctcagctggcggccaagctgctccacatctaccaacaatcccggaaggacaactccaattccctgcaggtgaaaacgtgccacctggtcaggtactggatctccgccttcccagcggagtttgacttgaacccggagttggctgagcagatcaaggagctgaaggctctgctagaccaagaagggaaccgacggcacagcagcctaatcgacatagacagcgtccctacctacaagtggaagcggcaggtgactcagcggaaccctgtgggacagaaaaagcgcaagatgtccctgttgtttgaccacctggagcccatggagctggcggagcatctcacctacttggagtatcgctccttctgcaagatcctgtttcaggactatcacagtttcgtgactcatggctgcactgtggacaaccccgtcctggagcggttcatctccctcttcaacagcgtctcacagtgggtgcagctcatgatcctcagcaaacccacagccccgcagcgggccctggtcatcacacactttgtccacgtggcggagaagctgctacagctgcagaacttcaacacgctgatggcagtggtcgggggcctgagccacagctccatctcccgcctcaaggagacccacagccacgttagccctgagaccatcaagctctgggagggtctcacggaactagtgacggcgacaggcaactatggcaactaccggcgtcggctggcagcctgtgtgggcttccgcttcccgatcctgggtgtgcacctcaaggacctggtggccctgcagctggcactgcctgactggctggacccagcccggacccggctcaacggggccaagatgaagcagctctttagcatcctggaggagctggccatggtgaccagcctgcggccaccagtacaggccaaccccgacctgctgagcctgctcacggtgtctctggatcagtatcagacggaggatgagctgtaccagctgtccctgcagcgggagccgcgctccaagtcctcgccaaccagccccacgagttgcaccccaccaccccggcccccggtactggaggagtggacctcggctgccaaacccaagctggatcaggccctcgtggtggagcacatcgagaagatggtggagtctgtgttccggaactttgacgtcgatggggatggccacatctcacaggaagaattccagatcatccgtgggaacttcccttacctcagcgcctttggggacctcgaccagaaccaggatggctgcatcagcagggaggagatggtttcctatttcctgcgctccagctctgtgttgggggggcgcatgggcttcgtacacaacttccaggagagcaactccttgcgccccgtcgcctgccgccactgcaaagccctgatcctgggcatctacaagcagggcctcaaatgccgagcctgtggagtgaactgccacaagcagtgcaaggatcgcctgtcagttgagtgtcggcgcagggcccagagtgtgagcctggaggggtctgcaccctcaccctcacccatgcacagccaccatcaccgcgccttcagcttctctctgccccgccctggcaggcgaggctccaggcctccagagatccgtgaggaggaggtacagacggtggaggatggggtgtttgacatccacttgtaatagatgctgtggttggatcaaggactcattcctgccttggagaaaatacttcaaccagagcagggagcctgggggtgtcggggcaggaggctggggatgggggtgggatatgagggtggcatgcagctgagggcagggccagggctggtgtccctaaggttgtacagactcttgtgaatatttgtattttccagatggaataaaaaggcccgtgtaattaaccttca

SEQ ID NO: 39420 - DNA, 2221 bp, Artificial Sequence
  derived and/or modified sequence
cgggagccgcagccgcagcgaggccggcgggcgggagcgcacggaggtggggtcggccaggccggtgcgggctccttgcggcaggtcccaagagggttcggtccgagcccggtgggaggctcccggagcgcagcctgggcccagcccaccccgcgccggcggccatggcaggcaccctggacctggacaagggctgcacggtggaggagctgctccgcgggtgcatcgaagccttcgatgactccgggaaggtgcgggacccgcagctggtgcgcatgttcctcatgatgcacccctggtacatcccctcctctcagctggcggccaagctgctccacatctaccaacaatcccggaaggacaactccaattccctgcaggtgaaaacgtgccacctggtcaggtactggatctccgccttcccagcggagtttgacttgaacccggagttggctgagcagatcaaggagctgaaggctctgctagaccaagaagggaaccgacggcacagcagcctaatcgacatagacagcgtccctacctacaagtggaagcggcaggtgactcagcggaaccctgtgggacagaaaaagcgcaagatgtccctgttgtttgaccacctggagcccatggagctggcggagcatctcacctacttggagtatcgctccttctgcaagatcctgtttcaggactatcacagtttcgtgactcatggctgcactgtggacaaccccgtcctggagcggttcatctccctcttcaacagcgtctcacagtgggtgcagctcatgatcctcagcaaacccacagccccgcagcgggccctggtcatcacacactttgtccacgtggcggagaagctgctacagctgcagaacttcaacacgctgatggcagtggtcgggggcctgagccacagctccatctcccgcctcaaggagacccacagccacgttagccctgagaccatcaagctctgggagggtctcacggaactagtgacggcgacaggcaactatggcaactaccggcgtcggctggcagcctgtgtgggcttccgcttcccgatcctgggtgtgcacctcaaggacctggtggccctgcagctggcactgcctgactggctggacccagcccggacccggctcaacggggccaagatgaagcagctctttagcatcctggaggagctggccatggtgaccagcctgcggccaccagtacaggccaaccccgacctgctgagcctgctcacggtgtctctggatcagtatcagacggaggatgagctgtaccagctgtccctgcagcgggagccgcgctccaagtcctcgccaaccagccccacgagttgcaccccaccaccccggcccccggtactggaggagtggacctcggctgccaaacccaagctggatcaggccctcgtggtggagcacatcgagaagatggtggagtctgtgttccggaactttgacgtcgatggggatggccacatctcacaggaagaattccagatcatccgtgggaacttcccttacctcagcgcctttggggacctcgaccagaaccaggatggctgcatcagcagggaggagatggtttcctatttcctgcgctccagctctgtgttgggggggcgcatgggcttcgtacacaacttccaggagagcaactccttgcgccccgtcgcctgccgccactgcaaagccctgatcctgggcatctacaagcagggcctcaaatgccgagcctgtggagtgaactgccacaagcagtgcaaggatcgcctgtcagttgagtgtcggcgcagggcccagagtgtgagcctggaggggtctgcaccctcaccctcacccatgcacagccaccatcaccgcgccttcagcttctctctgccccgccctggcaggcgaggctccaggcctccagagatccgtgaggaggaggtacagacggtggaggatggggtgtttgacatccacttgtaatagatgctgtggttggatcaaggactcattcctgccttggagaaaatacttcaaccagagcagggagcctgggggtgtcggggcaggaggctggggatgggggtgggatatgagggtggcatgcagctgagggcagggccagggctggtgtccctaaggttgtacagactcttgtgaatatttgtattttccagatggaataaaaaggcccgtgtaattaaccttca

SEQ ID NO: 39421 - DNA, 2304 bp, Artificial Sequence
  derived and/or modified sequence
gtgcatgtgtgtgggagtgtacatgcgtggagaggcactgccttgcgtgtgtgcacacgtgtgaggatgtcagcgcctgtgtggccgcgggactcaaggctggcctggctcaagtgaacagcacgtccaggaggcgacctcgtccgcgggtttgcattctggggtggacgagctgggggttcggtccgagcccggtgggaggctcccggagcgcagcctgggcccagcccaccccgcgccggcggccatggcaggcaccctggacctggacaagggctgcacggtggaggagctgctccgcgggtgcatcgaagccttcgatgactccgggaaggtgcgggacccgcagctggtgcgcatgttcctcatgatgcacccctggtacatcccctcctctcagctggcggccaagctgctccacatctaccaacaatcccggaaggacaactccaattccctgcaggtgaaaacgtgccacctggtcaggtactggatctccgccttcccagcggagtttgacttgaacccggagttggctgagcagatcaaggagctgaaggctctgctagaccaagaagggaaccgacggcacagcagcctaatcgacatagacagcgtccctacctacaagtggaagcggcaggtgactcagcggaaccctgtgggacagaaaaagcgcaagatgtccctgttgtttgaccacctggagcccatggagctggcggagcatctcacctacttggagtatcgctccttctgcaagatcctgtttcaggactatcacagtttcgtgactcatggctgcactgtggacaaccccgtcctggagcggttcatctccctcttcaacagcgtctcacagtgggtgcagctcatgatcctcagcaaacccacagccccgcagcgggccctggtcatcacacactttgtccacgtggcggagaagctgctacagctgcagaacttcaacacgctgatggcagtggtcgggggcctgagccacagctccatctcccgcctcaaggagacccacagccacgttagccctgagaccatcaagctctgggagggtctcacggaactagtgacggcgacaggcaactatggcaactaccggcgtcggctggcagcctgtgtgggcttccgcttcccgatcctgggtgtgcacctcaaggacctggtggccctgcagctggcactgcctgactggctggacccagcccggacccggctcaacggggccaagatgaagcagctctttagcatcctggaggagctggccatggtgaccagcctgcggccaccagtacaggccaaccccgacctgctgagcctgctcacggtgtctctggatcagtatcagacggaggatgagctgtaccagctgtccctgcagcgggagccgcgctccaagtcctcgccaaccagccccacgagttgcaccccaccaccccggcccccggtactggaggagtggacctcggctgccaaacccaagctggatcaggccctcgtggtggagcacatcgagaagatggtggagtctgtgttccggaactttgacgtcgatggggatggccacatctcacaggaagaattccagatcatccgtgggaacttcccttacctcagcgcctttggggacctcgaccagaaccaggatggctgcatcagcagggaggagatggtttcctatttcctgcgctccagctctgtgttgggggggcgcatgggcttcgtacacaacttccaggagagcaactccttgcgccccgtcgcctgccgccactgcaaagccctgatcctgggcatctacaagcagggcctcaaatgccgagcctgtggagtgaactgccacaagcagtgcaaggatcgcctgtcagttgagtgtcggcgcagggcccagagtgtgagcctggaggggtctgcaccctcaccctcacccatgcacagccaccatcaccgcgccttcagcttctctctgccccgccctggcaggcgaggctccaggcctccagagatccgtgaggaggaggtacagacggtggaggatggggtgtttgacatccacttgtaatagatgctgtggttggatcaaggactcattcctgccttggagaaaatacttcaaccagagcagggagcctgggggtgtcggggcaggaggctggggatgggggtgggatatgagggtggcatgcagctgagggcagggccagggctggtgtccctaaggttgtacagactcttgtgaatatttgtattttccagatggaataaaaaggcccgtgtaattaaccttca

SEQ ID NO: 39422 - DNA, 1830 bp, Artificial Sequence
  derived and/or modified sequence
atggccggcaccctggacctggacaagggctgcaccgtggaggagctgctgagaggctgcatcgaggccttcgacgacagcggcaaggtgagagacccccagctggtgagaatgttcctgatgatgcacccctggtacatccccagcagccagctggccgccaagctgctgcacatctaccagcagagcagaaaggacaacagcaacagcctgcaggtgaagacctgccacctggtgagatactggatcagcgccttccccgccgagttcgacctgaaccccgagctggccgagcagatcaaggagctgaaggccctgctggaccaggagggcaacagaagacacagcagcctgatcgacatcgacagcgtgcccacctacaagtggaagagacaggtgacccagagaaaccccgtgggccagaagaagagaaagatgagcctgctgttcgaccacctggagcccatggagctggccgagcacctgacctacctggagtacagaagcttctgcaagatcctgttccaggactaccacagcttcgtgacccacggctgcaccgtggacaaccccgtgctggagagattcatcagcctgttcaacagcgtgagccagtgggtgcagctgatgatcctgagcaagcccaccgccccccagagagccctggtgatcacccacttcgtgcacgtggccgagaagctgctgcagctgcagaacttcaacaccctgatggccgtggtgggcggcctgagccacagcagcatcagcagactgaaggagacccacagccacgtgagccccgagaccatcaagctgtgggagggcctgaccgagctggtgaccgccaccggcaactacggcaactacagaagaagactggccgcctgcgtgggcttcagattccccatcctgggcgtgcacctgaaggacctggtggccctgcagctggccctgcccgactggctggaccccgccagaaccagactgaacggcgccaagatgaagcagctgttcagcatcctggaggagctggccatggtgaccagcctgagaccccccgtgcaggccaaccccgacctgctgagcctgctgaccgtgagcctggaccagtaccagaccgaggacgagctgtaccagctgagcctgcagagagagcccagaagcaagagcagccccaccagccccaccagctgcacccccccccccagaccccccgtgctggaggagtggaccagcgccgccaagcccaagctggaccaggccctggtggtggagcacatcgagaagatggtggagagcgtgttcagaaacttcgacgtggacggcgacggccacatcagccaggaggagttccagatcatcagaggcaacttcccctacctgagcgccttcggcgacctggaccagaaccaggacggctgcatcagcagagaggagatggtgagctacttcctgagaagcagcagcgtgctgggcggcagaatgggcttcgtgcacaacttccaggagagcaacagcctgagacccgtggcctgcagacactgcaaggccctgatcctgggcatctacaagcagggcctgaagtgcagagcctgcggcgtgaactgccacaagcagtgcaaggacagactgagcgtggagtgcagaagaagagcccagagcgtgagcctggagggcagcgcccccagccccagccccatgcacagccaccaccacagagccttcagcttcagcctgcccagacccggcagaagaggcagcagaccccccgagatcagagaggaggaggtgcagaccgtggaggacggcgtgttcgacatccacctgtag

SEQ ID NO: 39423 - DNA, 432 bp, Artificial Sequence
  derived and/or modified sequence
atggccggcaccctggacctggacaagggctgcaccgtggaggagctgctgagaggctgcatcgaggccttcgacgacagcggcaaggtgagagacccccagctggtgagaatgttcctgatgatgcacccctggtacatccccagcagccagctggccgccaagctgctgcacatctaccagcagagcagaaaggacaacagcaacagcctgcaggtgaagacctgccacctggtgagatactggatcagcgccttccccgccgagttcgacctgaaccccgagctggccgagcagatcaaggagctgaaggccctgctggaccaggagggcaacagaagacacagcagcctgatcgacatcgacagcgtgtgcgtgggcgagcacagaggcctgggcggccacagcgtgagctacaccatctgcgcctag

SEQ ID NO: 39424 - protein, 114 aa, Artificial Sequence
  derived and/or modified sequence
MAECPTLGEAVTDHPDRLWAWEKFVYLDEKQHAWLPLTIEIKDRLQLRVLLRREDVVLGRPMTPTQIGPSLLPIMWQLYPDGRYRSSDSSFWRLVYHIKIDGVEDMLLELLPDD

SEQ ID NO: 39425 - DNA, 345 bp, Artificial Sequence
  derived and/or modified sequence
atggccgagtgccccaccctgggcgaggccgtgaccgaccaccccgacagactgtgggcctgggagaagttcgtgtacctggacgagaagcagcacgcctggctgcccctgaccatcgagatcaaggacagactgcagctgagagtgctgctgagaagagaggacgtggtgctgggcagacccatgacccccacccagatcggccccagcctgctgcccatcatgtggcagctgtaccccgacggcagatacagaagcagcgacagcagcttctggagactggtgtaccacatcaagatcgacggcgtggaggacatgctgctggagctgctgcccgacgactag

SEQ ID NO: 39426 - DNA, 345 bp, Artificial Sequence
  derived and/or modified sequence
atggcggaatgtccgacactgggggaggccgtgaccgatcacccggaccggctgtgggcgtgggagaagttcgtgtacctggacgagaagcaacacgcttggctgccactgacaatagaaattaaagacaggcttcagctcagagttctgttgcgtagggaggacgtggtcttggggagacccatgactcccacgcagatagggccatcgttactgccgatcatgtggcaactctatccggacggtaggtacaggtcctcagattcctcattttggcgcttggtataccacattaaaatagatggtgttgaggacatgcttctcgaacttctaccagacgattag

SEQ ID NO: 39427 - DNA, 345 bp, Artificial Sequence
  derived and/or modified sequence
atggcagagtgccctactctgggagaggctgtaactgatcacccggacagactgtgggcatgggagaagtttgtctatttagacgagaaacaacacgcctggctacctctaacaatcgaaatcaaagaccgactgcagttgagggtactgctgaggagagaggacgttgtgctgggacgccctatgactcctacacagatcggcccatccctcctgccgattatgtggcaattataccccgacggacgctacaggtctagcgacagtagcttctggcggctggtgtaccatattaagatcgatggcgttgaagacatgctgctggaattattgccagacgactag

SEQ ID NO: 39428 - DNA, 345 bp, Artificial Sequence
  derived and/or modified sequence
atggccgagtgtccgactctgggcgaagctgtgacagatcatcctgatcggctgtgggcttgggagaaatttgtgtacctcgatgagaagcagcacgcatggttgcctctcacgatcgaaattaaagacaggttgcagctacgggtgttgctgcggcgagaggatgtagtcttaggtcgcccgatgactcctacacagatcggtccctcactgctgccaataatgtggcagttgtatcctgacggcaggtatcgcagcagcgactcctcattctggcggctggtttaccacattaaaattgatggagttgaggacatgcttctggaattactacccgacgattag

SEQ ID NO: 39429 - DNA, 345 bp, Artificial Sequence
  derived and/or modified sequence
atggctgaatgcccaacactgggtgaggcggtcacagaccatcctgatcggctgtgggcctgggagaaatttgtctatcttgatgaaaagcaacatgcgtggctgcctctgaccatcgaaataaaggacagactgcagctgagggtcttgctgcgaagggaagatgtcgtgttgggacggcctatgaccccaacacagatcgggcccagcctgctgcctattatgtggcagctgtatccagacggccggtacaggagtagcgacagtagcttctggcggctggtgtaccacatcaagatagatggagttgaagatatgttactggagttgctgccagacgactag

SEQ ID NO: 39430 - DNA, 345 bp, Artificial Sequence
  derived and/or modified sequence
atggctgaatgtcccaccctgggggaggccgtgacagaccacccagaccggctgtgggcctgggagaagtttgtgtacctggatgagaagcagcacgcctggctgcccctgaccatcgagatcaaggaccggctgcagctgcgggtgctgctgcggcgggaggatgtggtgctgggccggcccatgacccccacccagatcggccccagcctgctgcccatcatgtggcagctgtacccagatggccgctaccgcagcagtgacagcagcttctggaggctggtgtaccacatcaagattgatggagtggaggacatgctgctggagctgctgcctgatgactag

SEQ ID NO: 39431 - DNA, 345 bp, Artificial Sequence
  derived and/or modified sequence
atggccgagtgccccaccctgggcgaggccgtgaccgaccaccccgatcggctttgggcttgggagaaattcgtgtacctggacgaaaagcagcatgcatggcttccactgacaatagagataaaagacaggctgcaacttagagtcctcctgcgaagggaagacgtcgtgctaggcagacccatgacccctacccagatcggcccgtcactcctgccaattatgtggcagctgtatcccgacggccgctaccgctctagcgacagttccttctggcgcctggtctatcacatcaagatcgacggggtggaggacatgctcctggagttactgcctgacgattag

SEQ ID NO: 39432 - DNA, 345 bp, Artificial Sequence
  derived and/or modified sequence
atggccgagtgccccaccctgggcgaggccgtgaccgaccaccccgatcgcctctgggcttgggagaaattcgtctacctcgatgaaaaacaacacgcctggctccctctgacgatcgagattaaggaccgccttcagctccgcgtcttgctgcgcagggaggacgtggttctcggacgtcctatgactccaacgcagattgggcccagtctcctgccaattatgtggcagctgtatcctgacggacggtacagatcctcagactcttcattttggcgcctggtatatcacatcaaaattgatggagtggaggatatgttgctcgaacttctccctgacgactag

SEQ ID NO: 39433 - DNA, 345 bp, Artificial Sequence
  derived and/or modified sequence
atggccgagtgccccaccctgggcgaggccgtgaccgaccaccccgaccgcctctgggcttgggaaaaattcgtctacttggacgaaaagcagcatgcctggctcccactgacaatcgagattaaagatcggttacagctgcgcgtgctgctcaggcgtgaagatgtggtcctgggacgccccatgacaccgacccagatcggaccctctctgctccccattatgtggcagttataccctgacggtcggtaccggtcatcggattctagtttttggcgcctggtttaccatattaaaatcgatggcgtcgaggacatgcttcttgagttgctcccagatgattag

SEQ ID NO: 39434 - DNA, 345 bp, Artificial Sequence
  derived and/or modified sequence
atggccgagtgccccaccctgggcgaggccgtgaccgaccaccccgacagactgtgggcttgggagaagtttgtctatcttgatgagaaacagcatgcctggttacctctcactattgaaatcaaggatcgccttcagctacgagtgctgctacggagggaggatgtggttctaggaaggccaatgactccaacgcagatcgggccttctttgctccccattatgtggcaactatatccagatgggagataccggagctccgactccagtttctggaggctcgtgtaccacatcaaaatcgatggcgtggaagacatgctcctggaactgctaccagatgattag

SEQ ID NO: 39435 - DNA, 345 bp, Artificial Sequence
  derived and/or modified sequence
atggccgaatgtccaacgcttggtgaggccgtaacagatcacccggaccggctttgggcatgggaaaaattcgtgtacctggacgaaaagcagcacgcatggctgccactgaccattgagattaaggatcgcctccagctgcgggtcctgcttaggcgtgaagacgtcgtcctgggacggcctatgaccccgactcagatcggaccctctttgctgcccatcatgtggcagctgtacccagatgggaggtacagaagcagcgatagttctttttggaggctcgtttaccatatcaagatcgatggggtggaagacatgctcttggagctgcttcctgacgactag

SEQ ID NO: 39436 - DNA, 345 bp, Artificial Sequence
  derived and/or modified sequence
atggccgagtgcccaacgctcggcgaagctgttacagatcacccggatcgtctgtgggcttgggaaaaatttgtgtatctcgacgaaaagcagcatgcatggttgccccttaccatcgagatcaaggatagactccaactgcgggtgctcttacgcagggaggacgttgtgctggggagaccaatgaccccaacgcagatcggacctagcctgcttcctatcatgtggcagctgtatcccgatgggcgttatcggagctctgacagctctttctggcgcctcgtttatcacataaaaattgacggtgtggaggacatgctcctagagttattgcctgatgattag

SEQ ID NO: 39437 - DNA, 345 bp, Artificial Sequence
  derived and/or modified sequence
atggccgagtgtccaaccctgggcgaagcagtgacagaccatccagacaggctgtgggcttgggaaaagttcgtctacctggatgagaagcagcacgcgtggttacccctgacaatagagatcaaggaccggctacaactgcgtgttctgctgcgccgtgaagatgtggtcctcgggaggcctatgaccccaacccaaattggccctagcctactaccgatcatgtggcaactatatcccgacggacgatacaggtcatccgatagctcattctggaggctggtgtatcacataaagatcgacggcgtggaggatatgctattagagctgctccccgatgattag

SEQ ID NO: 39438 - DNA, 345 bp, Artificial Sequence
  derived and/or modified sequence
atggccgagtgtccgacgttgggcgaggcagtgactgaccatcctgatcgcctttgggcatgggaaaagttcgtgtacctggatgagaaacagcatgcctggctgcccctgaccatcgagattaaagaccgcctgcagctacgggtcttactcagaagagaggacgtggtcctgggacgccctatgactcctacccagattggaccatctcttctcccaattatgtggcagctttatcccgacgggaggtataggtctagtgactccagtttttggaggttggtctaccacatcaaaattgatggagtcgaagacatgctgctggagctcctaccagacgattag

SEQ ID NO: 39439 - DNA, 1395 bp, Artificial Sequence
  derived and/or modified sequence
gtcctcccgccccgccgcttggtggcggccgcatgctgcccggatataaagggtcggccccacatcccagggaccagcgagcggccttgagaggctctggctcttgcttcttaggcggcccgaggacgccatggccgagtgcccgacactcggggaggcagtcaccgaccacccggaccgcctgtgggcctgggagaagttcgtgtatttggacgagaagcagcacgcctggctgcccttaaccatcgagataaaggataggttacagttacgggtgctcttgcgtcgggaagacgtcgtcctggggaggcctatgacccccacccagataggcccaagcctgctgcctatcatgtggcagctctaccctgatggacgataccgatcctcagactccagtttctggcgcttagtgtaccacatcaagattgacggcgtggaggacatgcttctcgagctgctgccagatgactgatgtatggtcttggcagcacctgtctcctttcaccccagggcctgagcctggccagcctacaatggggatgttgtgtttctgttcaccttcgtttactatgcctgtgtcttctccaccacgctggggtctgggaggaatggacagacagaggatgagctctacccagggcctgcaggacctgcctgtagcccactctgctcgccttagcactaccactcctgccaaggaggattccatttggcagagcttcttccaggtgcccagctatacctgtgcctcggcttttctcagctggatgatggtcttcagcctctttctgtcccttctgtccctcacagcactagtatttcatgttgcacacccactcagctccgtgaacttgtgagaacacagccgattcacctgagcaggacctctgaaaccctggaccagtggtctcacatggtgctacgcctgcatgtaaacacgcctgcaaacgctgcctgccggtaaacacgcctgcaaacgctgcctgcccgtaaacacgcctgcaaacgctgcctgcccacacaggttcacgtgcagctcaaggaaaggcctgaaaggagcccttatctgtgctcaggactcagaagcctctgggtcagtggtccacatcccgggacgcagcaggaggccaggccggcgagccctgtggatgagccctcagaacccttggcttgcccacgtggaaaagggatagaggttgggtttccccccttttatagatggtcacgcacctgggtgttacaaagttgtatgtggcatgaatactttttgtaatgattgattaaatgcaagatagtttatctaacttcgtgcggaatcagcttctatccttgacttagattctggtggagagaagtgagaataggcagcccccaaataaaaaatattcatgg

SEQ ID NO: 39440 - DNA, 1391 bp, Artificial Sequence
  derived and/or modified sequence
gtcctcccgccccgccgcttggtggcggccgcatgctgcccggatataaagggtcggccccacatcccagggaccagcgagcggccttgagaggctctggctcttgcttcttaggcggcccgaggacgccatggccgagtgcccgacactcggggaggcagtcaccgaccacccggaccgcctgtgggcctgggagaagttcgtgtatttggacgagaagcagcacgcctggctgcccttaaccatcgagataaaggataggttacagttacgggtgctcttgcgtcgggaagacgtcgtcctggggaggcctatgacccccacccagataggcccaagcctgctgcctatcatgtggcagctctaccctgatggacgataccgatcctcagactccagtttctggcgcttagtgtaccacatcaagattgacggcgtggaggacatgcttctcgagctgctgccagatgactgatgtcttggcagcacctgtctcctttcaccccagggcctgagcctggccagcctacaatggggatgttgtgtttctgttcaccttcgtttactatgcctgtgtcttctccaccacgctggggtctgggaggaatggacagacagaggatgagctctacccagggcctgcaggacctgcctgtagcccactctgctcgccttagcactaccactcctgccaaggaggattccatttggcagagcttcttccaggtgcccagctatacctgtgcctcggcttttctcagctggatgatggtcttcagcctctttctgtcccttctgtccctcacagcactagtatttcatgttgcacacccactcagctccgtgaacttgtgagaacacagccgattcacctgagcaggacctctgaaaccctggaccagtggtctcacatggtgctacgcctgcatgtaaacacgcctgcaaacgctgcctgccggtaaacacgcctgcaaacgctgcctgcccgtaaacacgcctgcaaacgctgcctgcccacacaggttcacgtgcagctcaaggaaaggcctgaaaggagcccttatctgtgctcaggactcagaagcctctgggtcagtggtccacatcccgggacgcagcaggaggccaggccggcgagccctgtggatgagccctcagaacccttggcttgcccacgtggaaaagggatagaggttgggtttccccccttttatagatggtcacgcacctgggtgttacaaagttgtatgtggcatgaatactttttgtaatgattgattaaatgcaagatagtttatctaacttcgtgcggaatcagcttctatccttgacttagattctggtggagagaagtgagaataggcagcccccaaataaaaaatattcatgga

SEQ ID NO: 39441 - DNA, 717 bp, Artificial Sequence
  derived and/or modified sequence
ccagggaccagcgagcggccttgagaggctctggctcttgcttcttaggcggcccgaggacgccatggccgagtgcccgacactcggggaggcagtcaccgaccacccggaccgcctgtgggcctgggagaagttcgtgtatttggacgagaagcagcacgcctggctgcccttaaccatcgagataaaggataggttacagttacgggtgctcttgcgtcgggaagacgtcgtcctggggaggcctatgacccccacccagataggcccaagcctgctgcctatcatgtggcagctctaccctgatggacgataccgatcctcagactccagtttctggcgcttagtgtaccacatcaagattgacggcgtggaggacatgcttctcgagctgctgccagatgactgatgtatggtgagctccactggagcctgacccctcttagtccacagtggctgtatcagaaagaaagaccaccccttctccatgaaggcagtgctaacccctccccgactgctgccatctgagggtccctagggatgggagaggcttcctggaggcactcatgtctcccttaccacttcgggagccaagggctttgtaggcagccccctttatcgcagctgctcatatctataaagtacttcacaagtttcagctggcactttcatttaccattgcttttttttttttttgagatgagtctggctctgtgg

SEQ ID NO: 39442 - DNA, 872 bp, Artificial Sequence
  derived and/or modified sequence
ggctcttgcttcttaggcggcccgaggacgccatggccgagtgcccgacactcggggaggcagtcaccgaccacccggaccgcctgtgggcctgggagaagttcgtgtatttggacgagaagcagcacgcctggctgcccttaaccatcgagataaaggataggttacagttacgggtgctcttgcgtcgggaagacgtcgtcctggggaggcctatgacccccacccagataggcccaagcctgctgcctatcatgtggcagctctaccctgatggacgataccgatcctcagactccagtttctggcgcttagtgtaccacatcaagattgacggcgtggaggacatgcttctcgagctgctgccagatgactgatcactagtatttcatgttgcacacccactcagctccgtgaacttgtgagaacacagccgattcacctgagcaggacctctgaaaccctggaccagtggtctcacatggtgctacgcctgcatgtaaacacgcctgcaaacgctgcctgccggtaaacacgcctgcaaacgctgcctgcccgtaaacacgcctgcaaacgctgcctgcccacacaggttcacgtgcagctcaaggaaaggcctgaaaggagcccttatctgtgctcaggactcagaagcctctgggtcagtggtccacatcccgggacgcagcaggaggccaggccggcgagccctgtggatgagccctcagaacccttggcttgcccacgtggaaaagggatagaggttgggtttccccccttttatagatggtcacgcacctgggtgttacaaagttgtatgtggcatgaatactttttgtaatgattgattaaatgcaagatagtttatctaa

SEQ ID NO: 39443 - protein, 124 aa, Artificial Sequence
  derived and/or modified sequence
MPAPAATYERVVYKNPSEYHYMKVCLEFQDCGVGLNAAQFKQLLISAVKDLFGEVDAALPLDILTYEEKTLSAILRICSSGLVKLWSSLTLLGSYKGKKCAFRVIQVSPFLLALSGNSRELVLD

SEQ ID NO: 39444 - DNA, 375 bp, Artificial Sequence
  derived and/or modified sequence
atgcccgcacccgctgccacttacgaacgagtggtgtacaagaacccttccgaataccattacatgaaggtgtgcctggagtttcaagattgtggggttggcctgaacgccgctcagttcaagcagctgcttatctcagccgttaaagacctcttcggcgaggtggatgccgccctgccactagacatcttaacatacgaagagaaaacattgtcggccatacttcggatttgtagctctggccttgtaaaattgtggtctagcctcactctgttgggctcctataagggcaaaaagtgtgctttccgggtgattcaggtatcccccttccttttagccctgagtgggaatagtcgcgaactggtgcttgactag

SEQ ID NO: 39445 - DNA, 375 bp, Artificial Sequence
  derived and/or modified sequence
atgcccgcaccagctgccacatatgagcgggtggtgtacaagaacccctccgaataccactacatgaaagtctgtctggagtttcaggattgcggtgttgggctgaatgccgcacagtttaagcagttgttgatctcggcagtgaaggatctgttcggcgaggttgacgccgcactacctcttgacatcctgacatacgaagaaaagacgctcagcgccatcctccggatttgcagctcgggattggtcaaattgtggtcctccctcactttactgggttcatacaagggcaagaagtgtgctttccgcgtgatccaagtgtctccttttttgttggctctgagtggaaacagccgggagctcgtgttggactag

SEQ ID NO: 39446 - DNA, 375 bp, Artificial Sequence
  derived and/or modified sequence
atgcccgctccggctgcaacctatgagcgtgtagtatataaaaatcccagtgagtatcattatatgaaggtatgcctcgagttccaggattgtggtgtggggcttaatgcagcccaatttaagcagctccttatctcagcggtgaaggatctattcggcgaggtggatgcggcactgcctctggatatcttgacttatgaggagaagactttgtctgcaattctcaggatctgtagcagcggtctggtgaagctgtggtcatctctgacactgctgggctcctataagggaaagaagtgcgcttttcgagtcatacaagtgtcgccgttcttgttggcacttagcggcaattccagagaactggtgctggactag

SEQ ID NO: 39447 - DNA, 375 bp, Artificial Sequence
  derived and/or modified sequence
atgcctgccccagctgccacctatgaaagagtggtgtacaagaaccccagcgagtaccactacatgaaggtgtgcctggagttccaggactgtggggtgggcctgaatgctgcccagttcaagcagctgctgatctctgctgtgaaggacctgtttggagaggtggatgctgccctgcccctggacatcctgacctatgaggagaagaccctgagcgccatcctgcgcatctgcagcagcggcctggtgaagctgtggagcagcctgaccctgctgggcagctacaagggcaagaagtgtgccttccgggtcatccaggtgagccccttcctgctggccctgagcggcaacagccgggagctggtgctggactag

SEQ ID NO: 39448 - DNA, 3121 bp, Artificial Sequence
  derived and/or modified sequence
cgggacgaggagaagccaaacgtaaagacaccaggagtttctcgggcccagctgtggctgctgccggggagccccaagccttggcgggtccttgcggcgaataggagtctggtcaggcgtcaggctagtccgacgaagagtgggtgtgatcagcactggaaaagatgcctgcccctgctgccacatatgaaagagtagtttacaaaaacccttccgagtaccactacatgaaagtctgcctagaatttcaagattgtggagttggactgaatgctgcacagttcaaacagctgcttatttcggctgtgaaggacctgtttggggaggttgatgccgccttacctttggacatcctaacctatgaagagaagaccttgtcagccatcttgagaatatgtagcagtggtcttgtcaaattgtggagctctttgaccctgttaggatcctataaaggcaaaaaatgtgctttccgggtgattcaggtttctccatttcttcttgcattatctggtaatagtagggaactagtattggattgaatgaatagtcttccattttggaaacgttcatccactctcatatttattttttggtgcctgcatgtttgaagactgaagcaggctaaaagctcttgatgaaatttgagggtgctgaagatgttcccactaatttccagccatcacctttggtggggtgggcttcggaggacagtctgtctgaacctgccagtgctgaccctgcagcactttcagcatatgcacatcaaagttggagaccgcgctgaacttaggagggccttcacacagactgatgtggctaccttctcagaattaacaggggatgtcaatcctttgcatttgaatgaagactttgcaaaacacaccaagtttggaaatacaattgtacatggagttttgatcaacggacttatctcagctctcctaggaactaaaatgccagggccaggctgtgtatttctttcccaggaaattagctttccagcccctttatatattggagaagttgttttagcttctgcagaagtgaaaaagctgaagcggttcattgctattattgcagtgtcatgttctgtaatagaaagtaaaaagactgttatggaaggctgggttaaagttatggttccagaagcttccaaatcctgaaatagatgttttaaagatgcaacctcaaacaccaatgctgttgttaaagagcctatggggaattgctgctctttaccaaagaatggttgataggcccagaagcccatcttagttaggggaagggagcaggaagagggttgttcaaatgcccactttccagtttggccttatgcttcatgcagacttgagtgtatgcaggatttcattatctgcctgggttttttgtttgttttttgttttttaattcaagaagtaggctgggcccggtggctcatgcctgtaatcctggcactttgggaggctgcggcaggcggatcacttgaggtcaggagtccaagaccagcctggccaacatggtgaaaccccatctctaccaaaaaaaaaaaaaaaaaaaaagtgcaactagctgtgcttggtgacttggccctgtagtcccagttgcttgggaggctgaggtgggagaattgcttgggcctgagagctggaggttatggtgagaaactgagattgcaccactgcactgtagcctgagtgacagagcgagaccctgtctcaagaaagaagtattgggaaggttatttaaagactctacttttaaatcaggcgtggcagctcacgcctgtaatcccagcattttgggaggctgaggcaggcgaatcacttgaggtcaggagttcaagaccagcctggccaacatgtgaaaccccatctctactaaaaatacaaaaactaaccgggcatggtggcgggcacctgtaatcccagctacttgggaggctgaggcaggagaatctcttgaacctgggaggttgcagtgagctgaaatcacaccactgcacttcagcctgggtgacagagcaaaactccacctcaaaaaaaaaaaaaagattctacttttagaaattcagacctagatagatttgcatttggataacaaatccctacctatagccatgtggaagcagcttgtcactgtattttaactgtgtaacaattattgaaggcgaaaatagaagttgggtcatctttgaacacctaccttttatcaatgaatatttttagactgttcttcagtatctgagtcagagtttattgtaatttgttatttacaccaaggtggcatcttagtctaccttcagtgagacttgcgtttcaggggaggggcgtatgtgcatcctcggtctcagttatgtaaacggtctgatctgtaaaatagtggtagcacatgccatgtgggatagttggtggagatgatagatggagttaagcacagggcccagcctgtcagcagtagctactattattgttgcccatttcccctgcaactgaggtgagaggttttcctgagtttgaagctgactggcccacagttaaacgtaacagaccagtttttcagggtgtcagccaacctctattagtgttcttaagtacagtttctgttataaaagttcagattattccttgaaaatttggatctacctcccattattatgagtaatacatgcttatagtaaaaaaaaaaaaattgtaagaaataaatattaagaagattatggaggccaaattcttaagactttgggggctggggtcagggaggttatattgaaggggagatgtgcctaacatgttactactaaatggccatcccaacacagccaacacttttgtttcccatttttttttgtttcccgttttttaataaaattgagatataattcacataccataaaattcaccttttaaaagtgtacagtttagtggttttcagaatatccacaaagttgtacaaccatcaccaaatcaattttttatagcatttttcatcacccccaaaagaacctcccattagcagtcaatccatttctctcctccagtctttgggaatcaccagtctactttctgtctctatgggtttccctgttctggacatttcataaaagttcatacaatgtatgatc

SEQ ID NO: 39449 - DNA, 3379 bp, Artificial Sequence
  derived and/or modified sequence
acgcttcgtggggcgggacgaggagaagccaaacgtaaagacaccaggagtttctcgggcccagctgtggctgctgccggggagccccaagccttggcgggtccttgcggcgaataggagtctggtcaggcgtcaggctagtccgacgaagagtgggtaggtggaagccttccaaagagcggcggttgtctgggagccgtctcagttggccgcgacccgggcgcatgcgcggggcgggcggtgcgccttgggtagcttgtcctctccgaccccgggcgctgagggcctctgtacggcgccgcgtagggtctcggccgcagaacgtggccgagaggcccgggcgagacttcgggaccgtgtcctgagcgctctccatgcgcccggcgcgaggtgtgatcagcactggaaaagatgcctgcccctgctgccacatatgaaagagtagtttacaaaaacccttccgagtaccactacatgaaagtctgcctagaatttcaagattgtggagttggactgaatgctgcacagttcaaacagctgcttatttcggctgtgaaggacctgtttggggaggttgatgccgccttacctttggacatcctaacctatgaagagaagaccttgtcagccatcttgagaatatgtagcagtggtcttgtcaaattgtggagctctttgaccctgttaggatcctataaaggcaaaaaatgtgctttccgggtgattcaggtttctccatttcttcttgcattatctggtaatagtagggaactagtattggattgaatgaatagtcttccattttggaaacgttcatccactctcatatttattttttggtgcctgcatgtttgaagactgaagcaggctaaaagctcttgatgaaatttgagggtgctgaagatgttcccactaatttccagccatcacctttggtggggtgggcttcggaggacagtctgtctgaacctgccagtgctgaccctgcagcactttcagcatatgcacatcaaagttggagaccgcgctgaacttaggagggccttcacacagactgatgtggctaccttctcagaattaacaggggatgtcaatcctttgcatttgaatgaagactttgcaaaacacaccaagtttggaaatacaattgtacatggagttttgatcaacggacttatctcagctctcctaggaactaaaatgccagggccaggctgtgtatttctttcccaggaaattagctttccagcccctttatatattggagaagttgttttagcttctgcagaagtgaaaaagctgaagcggttcattgctattattgcagtgtcatgttctgtaatagaaagtaaaaagactgttatggaaggctgggttaaagttatggttccagaagcttccaaatcctgaaatagatgttttaaagatgcaacctcaaacaccaatgctgttgttaaagagcctatggggaattgctgctctttaccaaagaatggttgataggcccagaagcccatcttagttaggggaagggagcaggaagagggttgttcaaatgcccactttccagtttggccttatgcttcatgcagacttgagtgtatgcaggatttcattatctgcctgggttttttgtttgttttttgttttttaattcaagaagtaggctgggcccggtggctcatgcctgtaatcctggcactttgggaggctgcggcaggcggatcacttgaggtcaggagtccaagaccagcctggccaacatggtgaaaccccatctctaccaaaaaaaaaaaaaaaaaaaaagtgcaactagctgtgcttggtgacttggccctgtagtcccagttgcttgggaggctgaggtgggagaattgcttgggcctgagagctggaggttatggtgagaaactgagattgcaccactgcactgtagcctgagtgacagagcgagaccctgtctcaagaaagaagtattgggaaggttatttaaagactctacttttaaatcaggcgtggcagctcacgcctgtaatcccagcattttgggaggctgaggcaggcgaatcacttgaggtcaggagttcaagaccagcctggccaacatgtgaaaccccatctctactaaaaatacaaaaactaaccgggcatggtggcgggcacctgtaatcccagctacttgggaggctgaggcaggagaatctcttgaacctgggaggttgcagtgagctgaaatcacaccactgcacttcagcctgggtgacagagcaaaactccacctcaaaaaaaaaaaaaagattctacttttagaaattcagacctagatagatttgcatttggataacaaatccctacctatagccatgtggaagcagcttgtcactgtattttaactgtgtaacaattattgaaggcgaaaatagaagttgggtcatctttgaacacctaccttttatcaatgaatatttttagactgttcttcagtatctgagtcagagtttattgtaatttgttatttacaccaaggtggcatcttagtctaccttcagtgagacttgcgtttcaggggaggggcgtatgtgcatcctcggtctcagttatgtaaacggtctgatctgtaaaatagtggtagcacatgccatgtgggatagttggtggagatgatagatggagttaagcacagggcccagcctgtcagcagtagctactattattgttgcccatttcccctgcaactgaggtgagaggttttcctgagtttgaagctgactggcccacagttaaacgtaacagaccagtttttcagggtgtcagccaacctctattagtgttcttaagtacagtttctgttataaaagttcagattattccttgaaaatttggatctacctcccattattatgagtaatacatgcttatagtaaaaaaaaaaaaattgtaagaaataaatattaagaagattatggaggccaaattcttaagactttgggggctggggtcagggaggttatattgaaggggagatgtgcctaacatgttactactaaatggccatcccaacacagccaacacttttgtttcccatttttttttgtttcccgttttttaataaaattgagatataattcacataccataaaattcaccttttaaaagtgtacagtttagtggttttcagaatatccacaaagttgtacaaccatcaccaaatcaattttttatagcatttttcatcacccccaaaagaacctcccattagcagtcaatccatttctctcctccagtctttgggaatcaccagtctactttctgtctctatgggtttccctgttctggacatttcataaaagttcatacaatgtatgatcctttggaactg

SEQ ID NO: 39450 - DNA, 805 bp, Artificial Sequence
  derived and/or modified sequence
agtttctcgggcccagctgtggctgctgccggggagccccaagccttggcgggtccttgcggcgaataggagtctggtcaggcgtcaggctagtccgacgaagagtggccctcttgacttactgtaggtgtgatcagcactggaaaagatgcctgcccctgctgccacatatgaaagagtagtttacaaaaacccttccgagtaccactacatgaaagtctgcctagaatttcaagattgtggagttggactgaatgctgcacagttcaaacagctgcttatttcggctgtgaaggacctgtttggggaggttgatgccgccttacctttggacatcctaacctatgaagagaagaccttgtcagccatcttgagaatatgtagcagtggtcttgtcaaattgtggagctctttgaccctgttaggatcctataaaggcaaaaaatgtgctttccgggtgattcaggtttctccatttcttcttgcattatctggtaatagtagggaactagtattggattgaatgaatagtcttccattttggaaacgttcatccactctcatatttattttttggtgcctgcatgtttgaagactgaagcaggctaaaagctcttgatgaaatttgagggtgctgaagatgttcccactaatttccagccatcacctttggtggggtgggcttcggaggacagtctgtctgaacctgccagtgctgaccctgcagcactttcagcatatgcacatcaaagttggagaccgcgctgaacttaggagggccttcacacagactgatgtggctacc

SEQ ID NO: 39451 - DNA, 375 bp, Artificial Sequence
  derived and/or modified sequence
atgcccgcccccgccgccacctacgagcgggtggtgtacaagaaccccagtgaatatcactacatgaaagtgtgtctggagtttcaggactgcggggtcggcctgaatgcggctcagttcaaacagttactgatcagtgcagtcaaggatcttttcggagaagtcgacgcggcactgcccctcgatatactgacatacgaagagaagactctgtcagcaatcctgaggatctgttcctccgggcttgtgaagctgtggtcttccctcactcttctgggcagctataaaggcaagaaatgcgcttttagggtaatacaggtctctcccttcttgcttgcgctgtccggcaatagtcgcgagttagtgttggattag

SEQ ID NO: 39452 - DNA, 375 bp, Artificial Sequence
  derived and/or modified sequence
atgcccgcccccgccgccacctacgagcgggtggtgtacaagaacccttcggagtaccactacatgaaagtgtgcctcgaattccaggattgcggggtcggactcaatgcagcccagttcaagcagctgttaattagcgctgtgaaagacctttttggagaggtggacgcagcactcccccttgacattctgacctacgaagagaagactctatcggcaattttgaggatttgctcttccggactcgtgaagctctggtcatctctcacgttgctgggctcttataagggaaagaagtgtgccttccgggtcatccaggtgtctcccttcctgctggcgcttagcggaaactcccgagagctagtgctcgactag

SEQ ID NO: 39453 - DNA, 375 bp, Artificial Sequence
  derived and/or modified sequence
atgcccgcccccgccgccacctacgagcgggtggtgtacaagaacccttctgagtaccactacatgaaggtgtgtttggagtttcaagactgcggagtcggcctgaatgcagcccagttcaaacagctgttaatcagcgccgttaaagacctgttcggtgaggtggacgctgcactgccgctagatattctcacctatgaagaaaaaactctgtcagcaatattgcggatctgctcctctggtctggtgaaactctggagcagtctgacacttctaggcagttacaaggggaagaagtgcgctttccgggtgattcaggtgtctcctttcctgttagctttgtctgggaacagtagggagctggtcctcgactag

SEQ ID NO: 39454 - DNA, 375 bp, Artificial Sequence
  derived and/or modified sequence
atgcccgctcccgctgcaacttacgaacgtgtagtgtacaagaacccttcagaataccattatatgaaagtctgcctagaatttcaggattgcggtgtcggcctcaatgccgcacagtttaagcagttgctgatatccgcggttaaggatctgttcggggaagtcgacgccgctttgccacttgacatactcacatacgaggagaaaacactatcagctatcctccgaatttgctccagtggcctagtgaaactgtggtccagtcttacgctgcttggaagctataaagggaagaaatgtgcgttccgcgttatccaagtcagcccattcttattggctctgtcaggaaattctagggagctggtgctagactag

SEQ ID NO: 39455 - DNA, 375 bp, Artificial Sequence
  derived and/or modified sequence
atgcctgctcccgcagccacttacgagagggtggtgtacaagaacccttcggaataccactatatgaaagtatgtctggagtttcaggactgcggggtcggcctcaatgccgcacagttcaagcagcttctaatatcggcagtcaaagatttattcggggaggtggatgctgcactgcctctggatatcctgacatatgaagaaaagaccttgagtgcgattttgaggatctgtagctcaggcctagttaagctgtggtccagtctgaccctgctcggaagctacaagggcaagaagtgtgccttcagagtcattcaagtctccccattcctgttggccctgagcggcaactcacgggagctggtgctggattag

SEQ ID NO: 39456 - DNA, 375 bp, Artificial Sequence
  derived and/or modified sequence
atgcctgcccctgccgcaacgtacgaaagggtggtgtataagaacccaagtgaatatcactacatgaaggtctgcctggaattccaggattgtggagtcggcctgaacgccgcacagttcaaacagctcctcatcagtgcagtgaaagacttgttcggcgaggtggacgccgctttacctcttgacattctgacctacgaggaaaagactctttcggcaatcttgcgaatttgctctagcggactggtaaagctgtggtcgtctctgaccctgctagggtcctacaaggggaagaaatgcgccttccgggtaatccaagtcagcccatttttgctagcccttagcgggaatagccgcgaacttgtcctcgattag

SEQ ID NO: 39457 - DNA, 375 bp, Artificial Sequence
  derived and/or modified sequence
atgcccgcccccgccgccacctacgagagagtggtgtacaagaaccccagcgagtaccactacatgaaggtgtgcctggagttccaggactgcggcgtgggcctgaacgccgcccagttcaagcagctgctgatcagcgccgtgaaggacctgttcggcgaggtggacgccgccctgcccctggacatcctgacctacgaggagaagaccctgagcgccatcctgagaatctgcagcagcggcctggtgaagctgtggagcagcctgaccctgctgggcagctacaagggcaagaagtgcgccttcagagtgatccaggtgagccccttcctgctggccctgagcggcaacagcagagagctggtgctggactag

SEQ ID NO: 39458 - DNA, 3264 bp, Artificial Sequence
  derived and/or modified sequence
atccgcctgggcgtcacgcttcgtggggcgggacgaggagaagccaaacgtaaagacaccaggagtttctcgggcccagctgtggctgctgccggggagccccaagccttggcgggtccttgcggcgaataggagtctggtcaggcgtcaggctagtccgacgaagagtgggtgtgatcagcactggaaaagatgcctgcccctgctgccacatatgaaagagtagtttacaaaaacccttccgagtaccactacatgaaagtctgcctagaatttcaagattgtggagttggactgaatgctgcacagttcaaacagctgcttatttcggctgtgaaggacctgtttggggaggttgatgccgccttacctttggacatcctaacctatgaagagaagaccttgtcagccatcttgagaatatgtagcagtggtcttgtcaaattgtggagctctttgaccctgttaggatcctataaaggcaaaaaatgtgctttccgggtgattcaggtttctccatttcttcttgcattatctggtaatagtagggaactagtattggattgaatgaatagtcttccattttggaaacgttcatccactctcatatttattttttggtgcctgcatgtttgaagactgaagcaggctaaaagctcttgatgaaatttgagggtgctgaagatgttcccactaatttccagccatcacctttggtggggtgggcttcggaggacagtctgtctgaacctgccagtgctgaccctgcagcactttcagcatatgcacatcaaagttggagaccgcgctgaacttaggagggccttcacacagactgatgtggctaccttctcagaattaacaggggatgtcaatcctttgcatttgaatgaagactttgcaaaacacaccaagtttggaaatacaattgtacatggagttttgatcaacggacttatctcagctctcctaggaactaaaatgccagggccaggctgtgtatttctttcccaggaaattagctttccagcccctttatatattggagaagttgttttagcttctgcagaagtgaaaaagctgaagcggttcattgctattattgcagtgtcatgttctgtaatagaaagtaaaaagactgttatggaaggctgggttaaagttatggttccagaagcttccaaatcctgaaatagatgttttaaagatgcaacctcaaacaccaatgctgttgttaaagagcctatggggaattgctgctctttaccaaagaatggttgataggcccagaagcccatcttagttaggggaagggagcaggaagagggttgttcaaatgcccactttccagtttggccttatgcttcatgcagacttgagtgtatgcaggatttcattatctgcctgggttttttgtttgttttttgttttttaattcaagaagtaggctgggcccggtggctcatgcctgtaatcctggcactttgggaggctgcggcaggcggatcacttgaggtcaggagtccaagaccagcctggccaacatggtgaaaccccatctctaccaaaaaaaaaaaaaaaaaaaaagtgcaactagctgtgcttggtgacttggccctgtagtcccagttgcttgggaggctgaggtgggagaattgcttgggcctgagagctggaggttatggtgagaaactgagattgcaccactgcactgtagcctgagtgacagagcgagaccctgtctcaagaaagaagtattgggaaggttatttaaagactctacttttaaatcaggcgtggcagctcacgcctgtaatcccagcattttgggaggctgaggcaggcgaatcacttgaggtcaggagttcaagaccagcctggccaacatgtgaaaccccatctctactaaaaatacaaaaactaaccgggcatggtggcgggcacctgtaatcccagctacttgggaggctgaggcaggagaatctcttgaacctgggaggttgcagtgagctgaaatcacaccactgcacttcagcctgggtgacagagcaaaactccacctcaaaaaaaaaaaaaagattctacttttagaaattcagacctagatagatttgcatttggataacaaatccctacctatagccatgtggaagcagcttgtcactgtattttaactgtgtaacaattattgaaggcgaaaatagaagttgggtcatctttgaacacctaccttttatcaatgaatatttttagactgttcttcagtatctgagtcagagtttattgtaatttgttatttacaccaaggtggcatcttagtctaccttcagtgagacttgcgtttcaggggaggggcgtatgtgcatcctcggtctcagttatgtaaacggtctgatctgtaaaatagtggtagcacatgccatgtgggatagttggtggagatgatagatggagttaagcacagggcccagcctgtcagcagtagctactattattgttgcccatttcccctgcaactgaggtgagaggttttcctgagtttgaagctgactggcccacagttaaacgtaacagaccagtttttcagggtgtcagccaacctctattagtgttcttaagtacagtttctgttataaaagttcagattattccttgaaaatttggatctacctcccattattatgagtaatacatgcttatagtaaaaaaaaaaaaattgtaagaaataaatattaagaagattatggaggccaaattcttaagactttgggggctggggtcagggaggttatattgaaggggagatgtgcctaacatgttactactaaatggccatcccaacacagccaacacttttgtttcccatttttttttgtttcccgttttttaataaaattgagatataattcacataccataaaattcaccttttaaaagtgtacagtttagtggttttcagaatatccacaaagttgtacaaccatcaccaaatcaattttttatagcatttttcatcacccccaaaagaacctcccattagcagtcaatccatttctctcctccagtctttgggaatcaccagtctactttctgtctctatgggtttccctgttctggacatttcataaaagttcatacaatgtatgatcctttggaactggcttctttgatatagcatgttttcagggttcatccatgttacagcatgtatcagtacatcattttattttatggctgaataatattccattgtatttacccata

SEQ ID NO: 39459 - protein, 63 aa, Artificial Sequence
  derived and/or modified sequence
MKHVLNLYLLGVVLTLLSIFVRVMESLEGLLESPSPGTSWTTRSQLANTEPTKGLPDHPSRSM

SEQ ID NO: 39460 - DNA, 192 bp, Artificial Sequence
  derived and/or modified sequence
atgaagcacgtcctcaatctatatctgctaggagtggtccttacccttcttagcatctttgtgcgggtcatggagtctctagaggggcttcttgaaagtccatcacctgggaccagctggacaaccaggtcgcagttagccaacactgagcctacaaagggccttcccgatcacccttctagaagtatgtag

SEQ ID NO: 39461 - DNA, 192 bp, Artificial Sequence
  derived and/or modified sequence
atgaagcacgtcctcaacctatacctgttgggcgtggtgcttactctcctcagtatatttgtccgggttatggagagtttggaggggctgttagaatcgccttccccagggacgagctggactacaaggagccaactggctaatactgaacccacaaaaggactgcccgatcatccgtccaggtcaatgtag

SEQ ID NO: 39462 - DNA, 192 bp, Artificial Sequence
  derived and/or modified sequence
atgaagcatgtgttgaacctgtacctgcttggagtcgtgctgaccttgttaagtatttttgtcagagtgatggagtctcttgaggggctgctcgaatccccatctcccggcactagttggactaccagatcacaactcgcaaacactgaaccaacaaaaggcttacctgatcatccttcacggtccatgtag

SEQ ID NO: 39463 - DNA, 785 bp, Artificial Sequence
  derived and/or modified sequence
aaggggcggaggctgggcggcgttgctctgcgctctgcggctgacggcgcttttgtctccgggtccagaggcctttcagaaggagaaggcagctctgtttctctgcagaggagtagggtcctttcagccatgaagcatgtgttgaacctctacctgttaggtgtggtactgaccctactctccatcttcgttagagtgatggagtccctagagggcttactagagagcccatcgcctgggacctcctggaccaccagaagccaactagccaacacagagcccaccaagggccttccagaccatccatccagaagcatgtgataagacctccttccatactggccatattttggaacactgacctagacatgtccagatgggagtcccattcctagcagacaagctgagcaccgttgtaaccagagaactattactaggccttgaagaacctgtctaactggatgctcattgcctgggcaaggcctgtttaggccggttgcggtggctcatgcctgtaatcctagcactttgggaggctgaggtgggtggatcacctgaggtcaggagttcgagaccagcctcgccaacatggcgaaaccccatctctactaaaaatacaaaagttagctgggtgtggtggcagaggcctgtaatcccagctccttgggaggctgaggcgggagaattgcttgaacccggggacggaggttgcagtgagccgagatcgcactgctgtacccagcctgggccacagtgcaagactccatctcaaaaaaaaaagaaaa

SEQ ID NO: 39464 - DNA, 192 bp, Artificial Sequence
  derived and/or modified sequence
atgaagcacgtattaaatctgtatctactaggcgtcgttttaaccttactgtccatcttcgttagagtgatggaatccttagagggcttgcttgagtccccgagtccaggcacttcatggacaaccagatcacagctggcaaacaccgaacccacaaaaggactaccagatcatccttcccgcagcatgtag

SEQ ID NO: 39465 - DNA, 1349 bp, Artificial Sequence
  derived and/or modified sequence
gacggcgcttttgtctccggtgagttttgtggcgggaagcttctgcgctggtgcttagtaaccgactttcctccggactcctgcacgacctgctcctacagccggcgatccactcccggctgttcccccggagggtccagaggcctttcagaaggagaaggcagctctgtttctctgcagaggagtagggtcctttcagccatgaagcatgtgttgaacctctacctgttaggtgtggtactgaccctactctccatcttcgttagagtgatggagtccctagagggcttactagagagcccatcgcctgggacctcctggaccaccagaagccaactagccaacacagagcccaccaagggccttccagaccatccatccagaagcatgtgataagacctccttccatactggccatattttggaacactgacctagacatgtccagatgggagtcccattcctagcagacaagctgagcaccgttgtaaccagagaactattactaggccttgaagaacctgtctaactggatgctcattgcctgggcaaggcctgtttaggccggttgcggtggctcatgcctgtaatcctagcactttgggaggctgaggtgggtggatcacctgaggtcaggagttcgagaccagcctcgccaacatggcgaaaccccatctctactaaaaatacaaaagttagctgggtgtggtggcagaggcctgtaatcccagctccttgggaggctgaggcgggagaattgcttgaacccggggacggaggttgcagtgagccgagatcgcactgctgtacccagcctgggccacagtgcaagactccatctcaaaaaaaaaagaaaagaaaaagcctgtttaatgcacaggtgtgagtggattgcttatggctatgagataggttgatctcgcccttaccccggggtctggtgtatgctgtgctttcctcagcagtatggctctgacatctcttagatgtcccaacttcagctgttgggagatggtgatattttcaaccctacttcctaaacatctgtctggggttcctttagtcttgaatgtcttatgctcaattatttggtgttgagcctctcttccacaagagctcctccatgtttggatagcagttgaagaggttgtgtgggtgggctgttgggagtgaggatggagtgttcagtgcccatttctcattttacattttaaagtcgttcctccaacatagtgtgtattggtctgaagggggtggtgggatgccaaagcctgctcaagttatggacattgtggccaccatgtggcttaaatgattttttctaactaataaagtggaatatatatttc

SEQ ID NO: 39466 - DNA, 192 bp, Artificial Sequence
  derived and/or modified sequence
atgaagcacgtgctgaacctgtacctgctgggcgtggtgctgaccctgctgagcatcttcgtgagagtgatggagagcctggagggcctgctggagagccccagccccggcaccagctggaccaccagaagccagctggccaacaccgagcccaccaagggcctgcccgaccaccccagcagaagcatgtag

SEQ ID NO: 39467 - DNA, 192 bp, Artificial Sequence
  derived and/or modified sequence
atgaagcatgtcctgaacctgtacttactgggggttgtgctcaccctcctctcaatcttcgttagggtaatggaatcgctggagggcctcctggaatctccatcacctggtacttcttggaccacacgcagtcaacttgctaatactgagcccactaaggggctgccagaccacccgagccgaagtatgtag

SEQ ID NO: 39468 - DNA, 192 bp, Artificial Sequence
  derived and/or modified sequence
atgaagcacgtactgaatttatatctcctgggcgtggttctgaccttgctgagtatctttgtgcgcgtgatggagtctcttgaggggctgcttgaatcaccgagccctggcacctcctggactacccgctcccaactcgccaacactgaaccgaccaaaggcttacctgaccacccgagcaggtctatgtag

SEQ ID NO: 39469 - DNA, 192 bp, Artificial Sequence
  derived and/or modified sequence
atgaagcacgtgctgaacctgtacctgctgggcgtggtgctgaccctgctgagcatctttgtgcgggtgatggagagcctggagggcctgctggagagccccagccctggcacctcctggaccaccaggagccagctggccaacacagagcccaccaagggcctgcctgaccaccccagccgctccatgtag

SEQ ID NO: 39470 - DNA, 192 bp, Artificial Sequence
  derived and/or modified sequence
atgaagcacgtgctgaacctgtacctgctgggcgtggtgctgaccttactgtctatttttgttcgtgtgatggaatcgctggagggattacttgagtcacccagtccaggcactagctggaccaccaggtcccagttagccaacacagagccgacaaagggactgccagatcatccttcacggagcatgtag

SEQ ID NO: 39471 - DNA, 192 bp, Artificial Sequence
  derived and/or modified sequence
atgaagcacgtgctgaacctgtacctgctgggcgtggtgctgaccttgctgtcgatttttgtgcgagtgatggagtccctcgaaggcctgcttgagtcgccctcgcccggcactagctggacaacacgctctcaactagcgaataccgagccaacgaaagggcttccggatcatcccagccggtcaatgtag

SEQ ID NO: 39472 - RNA, 192 nt, Artificial Sequence
  derived and/or modified sequence
augaagcauguguugaaccuguaccugcuuggagucgugcugaccuuguuaaguauuuuugucagagugauggagucucuugaggggcugcucgaauccccaucucccggcacuaguuggacuaccagaucacaacucgcaaacacugaaccaacaaaaggcuuaccugaucauccuucacgguccauguag

SEQ ID NO: 39473 - RNA, 192 nt, Artificial Sequence
  derived and/or modified sequence
augaagcacguauuaaaucuguaucuacuaggcgucguuuuaaccuuacuguccaucuucguuagagugauggaauccuuagagggcuugcuugaguccccgaguccaggcacuucauggacaaccagaucacagcuggcaaacaccgaacccacaaaaggacuaccagaucauccuucccgcagcauguag

SEQ ID NO: 39474 - protein, 111 aa, Artificial Sequence
  derived and/or modified sequence
MADWARAQSPGAVEEILDRENKRMADSLASKVTRLKSLALDIDRDAEDQNRYLDGMDSDFTSMTSLLTGSVKRFSTMARSGQDNRKLLCGMAVGLIVAFFILSYFLSRART

SEQ ID NO: 39475 - DNA, 336 bp, Artificial Sequence
  derived and/or modified sequence
atggccgactgggccagagcccagagccccggcgccgtggaggagatcctggacagagagaacaagagaatggccgacagcctggccagcaaggtgaccagactgaagagcctggccctggacatcgacagagacgccgaggaccagaacagatacctggacggcatggacagcgacttcaccagcatgaccagcctgctgaccggcagcgtgaagagattcagcaccatggccagaagcggccaggacaacagaaagctgctgtgcggcatggccgtgggcctgatcgtggccttcttcatcctgagctacttcctgagcagagccagaacctag

SEQ ID NO: 39476 - DNA, 336 bp, Artificial Sequence
  derived and/or modified sequence
atggctgactgggcgcgcgcccaatcgccaggcgctgtggaggaaattctggatagggaaaacaaaagaatggctgactcattggcaagcaaggttacccgccttaagtcattggccctggatatcgatcgcgacgccgaagatcagaaccgttatcttgatggcatggatagcgattttaccagcatgacatctctcttgactggaagcgtgaagaggtttagtaccatggctcgttccgggcaggacaatcggaagcttttatgcggcatggctgtgggattaatcgtcgcatttttcattctaagctattttctttctcgtgctcgtacctag

SEQ ID NO: 39477 - DNA, 336 bp, Artificial Sequence
  derived and/or modified sequence
atggctgactgggcccgggcccagagccctggagctgtggaggagatcctggaccgggagaacaagaggatggctgacagcctggccagcaaggtgacccggctgaagagcctggccctggacatcgacagagatgctgaggaccagaaccgctacctggatggcatggacagcgacttcacctccatgaccagcctgctgaccggctctgtgaagcgcttcagcaccatggcccggagcggccaggacaacaggaagctgctgtgtggcatggctgtgggcctcatcgtggccttcttcatcctgagctacttcctgagccgggcccggacctag

SEQ ID NO: 39478 - DNA, 336 bp, Artificial Sequence
  derived and/or modified sequence
atggccgactgggcccgggcccagagccccggcgccgtggaggagattttagaccgggagaataagagaatggcagattcgttagcgagtaaagtgacacgacttaagagccttgcactcgacattgaccgggacgctgaggaccagaatcgttatctagatgggatggactctgactttacgtctatgaccagcctcttaacaggcagtgtgaaacggttctccaccatggcccggagtggccaggataacaggaaattgttgtgcggtatggccgtgggactgatcgtcgcctttttcatcctgtcatattttctgagtagggcaaggacctag

SEQ ID NO: 39479 - DNA, 336 bp, Artificial Sequence
  derived and/or modified sequence
atggctgattgggcacgagctcaatcaccaggagcggtagaggaaatcctggacagagaaaataaacgaatggccgatagcctggcatcaaaggtgactcgattaaagagtctagcactggacatcgacagggatgccgaggatcaaaaccggtacctggacggaatggatagtgactttaccagcatgacttcccttctgaccggctccgtaaagcggttctccacaatggcgcgtagtggacaagacaatcgcaaactgctctgcggaatggctgtggggctgatcgttgctttcttcatcttaagttattttctttctcgggctcgcacctag

SEQ ID NO: 39480 - DNA, 2819 bp, Artificial Sequence
  derived and/or modified sequence
atcgctagctgggggcggggccggaagctctttccccgcgactgcgccacgtctgaggcggctgtggccgcgtcggtgtccgcgtcgaggagccggggcagggcacgatggcggactgggctcgggctcagagcccgggcgctgtggaagagattctagaccgggagaacaagcgaatggctgacagcctggcctccaaagtcaccaggctcaaatcgctcgccctggacatcgatagggatgcagaggatcagaaccggtacctggatggcatggactcggatttcacaagcatgaccagcctgcttacagggagcgtgaagcgcttttccacaatggcaaggtccggacaagacaaccggaagcttctatgtggcatggccgtgggtctaattgtggccttcttcatcctctcctacttcttgtccagggcaaggacgtgagccagtgggagctggtgtctgtgggtgccaagggcagccagggtcttccctgcctggtgttttgggctccagaggacttacctacaaaatactcctttgcaatgataattgtgggtcaggaatcttcttcctgtgtggcaggaggctgcggctgcctgtgacctgatgagctcatgttggctggtcccatgtgtgaaagggactctctcggggaaaccaaggcccagcccctcccccctcccccaggtgctagagagccaggcagagctggggccacagcgtgtctggagaagccaggtctgagcagagcagctggtgaatcccagacgtggccacctgtggcttgcagcccttctccccgcgcttgggactctgacatcttaaggctgcacggtcgtgtccttgtctgggtgaggccatgtctgtgatccaaggttcctggaactgacacaggaaggggctgtgaaccctaagtgggtgtcatctcctccgaccgaggcttctcaccctggagatggcagttactcctggccatggttgctgagcatgggcagaccagtggaggccaccctactgtgttatctgcgccttcgatgaagtgagacccttggggagaacgggctgtggatgaaggagtggactgcagccttggcctagccactgggctgggatcttctgggtcatgtgactgtgtatccaggagcagaaacttgtattctcaggattcaggatctacccagcaccaaagatgtattttcaggagaacagacctagaaatgggcctgtctggcatttcagagtcaggcaaagcaggcagggccagggagcttctgtgggtctacacaagaaggttcctgtgagggctatcagttgttgccttctagcttgctggtaactttggcgcctccgccaagccctgccagactcccctggctgtgatggcattctgtgccatcctccttgtccccagcctctgcaggatgccctccctacccacctctccctgggccttccctgtccactgggctggattcatgttcaaaccactggactggcagggcaacgacttcttcccacctcaagatgaggtcctcgcccccttgtcttggcataaaaacacctttaaagcatgagccatgtgcttctttgcccttctctgtcctgttccaatcttctgcctcccagtcactccctggggactatgggatcactgtccccccacctgtgtggccacaccatatgtcctgtcaatccagaactgcctctgagctccaggctgaccacagatcagccacagcctgatgcctgcagccccactttgctcacccttcccctcccctcctccttccttccacacagcaagcctacctttctccatccatgctcaccatagcccccttccttgtgacctggaccctccattgtacctggctgagactgtcagcctcctggaggagtggggtccaccttcttcttgccctatgcagtgcaagctcacttctcacccagcaaggttgactcatctgcctccatgtctctggggctttgctgttgccctgaaacctagctgggctggtcttgctcccagcttgcttccccctcctcggatgtccctttgcaggcccctgtcgttcctccggcaccagtgtccttggctgccatggcaagctcatcaggggcttgtaccctggtcaccaagcatggtagcagctgcctgcattgtatctccatctggtcactgcaggtgccaacccttcatcccccatgttttcctgggccatggagggctgacctccgtttctggggaatgtggctgagctgtggtaaccagctacaccccaggtgctctttccatggtggtgcctgctcatcttgctgatgcaaactaggaagttaggctgcatctcggagtggctttcgctggagaggtgctttgctgtctctcagactcagtcactgtgttccctccccgcctctcttatctccatggctgtttgcagctctcccaggtactttggggtctgagctggaattcctttgtggtttgctcttctgcttctcactcttgtattaagaaggattccacaaagggagagtggcatccctgctgctgctgtgccagaccagagtttcctgaggggccctgaccctaaccctccagctcagccctgtacacctgaccctgtaaatgagtggggtttgctgactgtaatccctgacaccagtaaaaccaaaaggactcttgggggctcagtgtgagagccagggttacctactctgccaagtgaggacaaactgctaggctgtatcccataatttcaggatgagaaacattaacaataaaaatttgtagtaaacataacctcatgaagaact

SEQ ID NO: 39481 - protein, 464 aa, Artificial Sequence
  derived and/or modified sequence
MSDGNPELLSTSQTYNGQSENNEDYEIPPITPPNLPEPSLLHLGDHEASYHSLCHGLTPNGLLPAYSYQAMDLPAIMVSNMLAQDSHLLSGQLPTIQEMVHSEVAAYDSGRPGPLLGRPAMLASHMSALSQSQLISQMGIRSSIAHSSPSPPGSKSATPSPSSSTQEEESEVHFKISGEKRPSADPGKKAKNPKKKKKKDPNEPQKPVSAYALFFRDTQAAIKGQNPSATFGDVSKIVASMWDSLGEEQKQAYKRKTEAAKKEYLKALAAYRASLVSKSSPDQGETKSTQANPPAKMLPPKQPMYAMPGLASFLTPSDLQAFRSGASPASLARTLGSKSLLPGLSASPPPPPSFPLSPTLHQQLSLPPHAQGALLSPPVSMSPAPQPPVLPTPMALQVQLAMSPSPPGPQDFPHISEFPSSSGSCSPGPSNPTSSGDWDSSYPSGECGISTCSLLPRDKSLYLT

SEQ ID NO: 39482 - protein, 384 aa, Artificial Sequence
  derived and/or modified sequence
MEQEREGFSEEVTFQIQEMVHSEVAAYDSGRPGPLLGRPAMLASHMSALSQSQLISQMGIRSSIAHSSPSPPGSKSATPSPSSSTQEEESEVHFKISGEKRPSADPGKKAKNPKKKKKKDPNEPQKPVSAYALFFRDTQAAIKGQNPSATFGDVSKIVASMWDSLGEEQKQAYKRKTEAAKKEYLKALAAYRASLVSKSSPDQGETKSTQANPPAKMLPPKQPMYAMPGLASFLTPSDLQAFRSGASPASLARTLGSKSLLPGLSASPPPPPSFPLSPTLHQQLSLPPHAQGALLSPPVSMSPAPQPPVLPTPMALQVQLAMSPSPPGPQDFPHISEFPSSSGSCSPGPSNPTSSGDWDSSYPSGECGISTCSLLPRDKSLYLT

SEQ ID NO: 39483 - DNA, 1395 bp, Artificial Sequence
  derived and/or modified sequence
atgtctgacggtaatcccgagcttctgtctactagtcagacatataacggccagagtgaaaataatgaggattacgaaattcccccaatcactccccccaacctgcctgaacctagcctgctgcatctgggagaccatgaggcttcatatcattctctgtgccacgggctgactcccaatggattgctgcctgcgtatagctatcaggctatggatcttcccgctatcatggtatctaacatgcttgcacaggacagtcacctgctttccggccagctaccgactatccaggagatggtgcattcggaggtagccgcatatgatagtggacggcctggcccgcttcttgggaggcccgccatgctggcttcacacatgtccgccctgtcccagtcacagctcatcagtcagatgggcattcgctcttctattgcccatagctccccgagcccacccgggagcaaatccgccacgcctagtccctcgtccagcacccaggaggaggagtctgaagtccactttaaaatcagtggggagaaacgcccttcagccgatccgggaaaaaaggctaaaaatccaaagaagaaaaagaagaaggaccccaacgagccccaaaagccagtctccgcatacgctctgtttttccgcgacacccaggccgctattaaaggacagaatccttcagctacctttggcgacgtatcaaagattgtggcctctatgtgggattcacttggggaagagcagaaacaggcatataagcgtaagactgaggcagctaaaaaggaatatctgaaagctttggccgcgtatcgcgcctcgctggtaagcaagtctagccccgaccagggcgaaactaagtcgacccaggctaatcccccagccaagatgctgcctcctaaacagccgatgtatgctatgccagggctggcctcttttctgacaccatctgatcttcaagcttttaggtcaggggcaagtcctgcttccctggcacggacgctcggtagtaagagcctgctccccgggctgagcgccagtccccccccacccccttcattcccacttagcccaacactgcatcagcagctgtcgctgccacctcatgcccagggtgctctgctgtccccacccgtttctatgtcaccggccccccaaccacccgtactgcccaccccaatggcgcttcaagtgcagttagctatgagcccttcgcccccagggcctcaggatttcccccacataagtgagttcccctcaagctctgggagctgctcccccgggcctagcaatcctaccagctcaggggactgggattcgagctaccctagcggggaatgtggcatttctacgtgcagcctcttacctcgtgataaaagcctgtatctgacctag

SEQ ID NO: 39484 - DNA, 1395 bp, Artificial Sequence
  derived and/or modified sequence
atgagcgacggcaatcctgagctgctgtccacttcacaaacctataacggccagagtgagaataacgaagactacgagattccgccaatcactcctccaaatctcccggaaccgtcactactgcacttgggtgatcacgaagctagttatcacagcctttgccatggattgacacctaacggtcttctccccgcgtactcttatcaggccatggacttgccagctataatggttagcaacatgttagcgcaagatagtcacctcctcagtgggcagcttcccactattcaagagatggtccactcggaagtggcagcgtatgattctggccggcccggcccccttctaggtaggccagccatgcttgccagccacatgtcagcactgtcgcaaagccagctcatttctcagatgggtatccgctcttctatcgcacattcatcaccctctccccctggaagcaagtccgcgactcccagccccagcagcagtacccaggaagaagagagcgaggtgcactttaagatttcaggagagaaaaggcctagcgctgacccgggcaaaaaagcgaagaaccctaagaagaagaaaaaaaaagacccaaacgagcctcaaaaacccgtttccgcctacgcgttgttctttcgcgacacccaagccgcaatcaagggccaaaatccttcagcgacttttggtgacgtaagcaaaatcgttgcatcgatgtgggacagcctcggggaagaacagaagcaggcctacaaacgcaagactgaagccgctaaaaaagaatatctgaaggccctggctgcatacagggctagtctggtttccaaatccagtccagaccagggggagaccaagtcgactcaggccaatcccccggcaaagatgttgccaccaaagcaacctatgtatgccatgcctggcctggcctcctttcttacaccttccgacctacaagccttcagaagtggggcttccccagccagtctcgccagaacgctaggttccaagtcacttctgcccgggttgagcgcgtccccccctcctcccccgagttttccactgtctcccactctacatcagcagctttctttgccaccacacgcgcagggggccctgttatccccgcccgtaagcatgtcaccggccccccagcctcctgtgctacccaccccaatggcgctgcaagtacaactagcgatgtccccatcacctcccggccctcaagatttcccacacatcagcgagttcccctcaagctcaggttcgtgctctcctgggcccagtaatcccaccagcagcggagattgggattcctcctaccccagtggggagtgcggcataagcacttgcagtctcctcccaagggacaagtccctgtacctaacctag

SEQ ID NO: 39485 - DNA, 1155 bp, Artificial Sequence
  derived and/or modified sequence
atggagcaggaacgggagggatttagtgaggaggtaaccttccagattcaggaaatggttcacagcgaggtggcagcttatgattccggccgtcctggtcccctgctggggcggcctgctatgttggcctcacatatgagtgctctttcccagagtcagctcatatctcagatgggcattcggtcgagcatcgcacattcctccccctccccccctggcagtaaatccgccacgccaagcccgagttccagcacgcaagaggaagagtcagaagtgcactttaaaatcagtggagagaagaggccgagcgccgacccaggcaagaaggcaaagaaccccaaaaaaaaaaagaagaaggatcccaacgaaccccagaagcccgtttctgcctacgctttgttttttagagacacacaggcagctatcaagggccagaatccctccgccaccttcggagacgtgagtaaaatcgtggccagtatgtgggactctctcggtgaagaacaaaagcaggcctacaagagaaagaccgaagccgcgaaaaaggaatacttaaaagccctggctgcatatcgggccagtttagtctctaagagctctcctgaccagggagaaacaaaaagtacacaagccaatccaccggccaaaatgctgccaccgaagcagcctatgtatgccatgccagggctggcaagctttcttacaccatcagacctgcaggcgttcagatctggtgctagtccagcgtccctcgcgcgcaccttggggtccaaatccctcttacccggactcagtgcttccccacctccccctcctagttttccactgtctcccaccctccatcagcaactgagcctgccgccccacgcccagggcgccctgcttagcccccccgttagtatgtcccccgctcctcagccacctgttctccccacacccatggccctacaagttcagcttgccatgtctccttctccacccggtccccaggactttccccatatctctgaattccccagcagttccggcagctgttcccccggacccagtaatcccacctcctccggcgattgggactctagttacccatccggtgaatgcgggataagtacttgcagtctgcttcctcgcgacaagtctttgtatctgacatag

SEQ ID NO: 39486 - DNA, 1395 bp, Artificial Sequence
  derived and/or modified sequence
atgtctgatggcaaccctgagctgctgagcaccagccagacctacaacggccagagcgagaacaatgaagattatgagatcccccccatcaccccacccaacctgcctgagcccagcctgctgcacctgggggaccacgaggccagctaccacagcctgtgccacggcctgacccccaacggcctgctgcctgcctacagctaccaggccatggacctgcctgccatcatggtgagcaacatgctggcccaggacagccacctgctgagcggccagctgcccaccatccaggagatggtgcacagcgaggtggccgcctatgattctggccggcccggccccctgctgggccgcccagccatgctggccagccacatgtctgccctgagccagagccagctgatcagccagatgggcatccgcagcagcatcgcccacagcagccccagccccccaggcagcaagagcgccacccccagccccagcagcagcacccaggaggaggagagcgaggtgcacttcaagatctctggagagaagaggccttctgctgaccccgggaagaaggccaagaaccccaagaagaagaagaagaaggaccccaatgagccccagaagcctgtgtctgcctatgccctcttcttccgggacacccaggccgccatcaagggccagaaccccagcgccacctttggagatgtgtccaagatcgtggcctccatgtgggacagcctgggggaggagcagaagcaggcctacaagaggaagacagaagctgccaagaaggagtacctgaaggccctggccgcctaccgggccagcctggtgtccaagagcagcccagaccagggcgagaccaagagcacccaggccaaccccccagccaagatgctgccccccaagcagcccatgtatgccatgcctggcctggccagcttcctgacccccagcgacctgcaggccttccgcagcggggccagccctgccagcctggcccggaccctgggcagcaagagcctgctgcccggcctgagcgccagccccccacctcctccttccttccccctgagccccaccctgcaccagcagctgagcctgccccctcatgcccagggcgccctgctgagcccccctgtgtccatgagccctgccccccagccccctgtgctgcccacccccatggccctgcaggtgcagctggccatgagccccagccccccaggcccccaggacttcccccacatcagcgagttccccagcagcagcggcagctgcagccctggccccagcaaccccaccagcagcggggactgggacagcagctaccccagcggggagtgtggcatcagcacctgcagcctgctgccccgggacaagagcctgtacctgacctag

SEQ ID NO: 39487 - DNA, 1155 bp, Artificial Sequence
  derived and/or modified sequence
atggagcaggagcgggagggcttcagcgaggaggtgaccttccagatccaggagatggtgcacagcgaggtggccgcctatgattctggccggcccggccccctgctgggccgcccagccatgctggccagccacatgtctgccctgagccagagccagctgatcagccagatgggcatccgcagcagcatcgcccacagcagccccagccccccaggcagcaagagcgccacccccagccccagcagcagcacccaggaggaggagagcgaggtgcacttcaagatctctggagagaagaggccttctgctgaccccgggaagaaggccaagaaccccaagaagaagaagaagaaggaccccaatgagccccagaagcctgtgtctgcctatgccctcttcttccgggacacccaggccgccatcaagggccagaaccccagcgccacctttggagatgtgtccaagatcgtggcctccatgtgggacagcctgggggaggagcagaagcaggcctacaagaggaagacagaagctgccaagaaggagtacctgaaggccctggccgcctaccgggccagcctggtgtccaagagcagcccagaccagggcgagaccaagagcacccaggccaaccccccagccaagatgctgccccccaagcagcccatgtatgccatgcctggcctggccagcttcctgacccccagcgacctgcaggccttccgcagcggggccagccctgccagcctggcccggaccctgggcagcaagagcctgctgcccggcctgagcgccagccccccacctcctccttccttccccctgagccccaccctgcaccagcagctgagcctgccccctcatgcccagggcgccctgctgagcccccctgtgtccatgagccctgccccccagccccctgtgctgcccacccccatggccctgcaggtgcagctggccatgagccccagccccccaggcccccaggacttcccccacatcagcgagttccccagcagcagcggcagctgcagccctggccccagcaaccccaccagcagcggggactgggacagcagctaccccagcggggagtgtggcatcagcacctgcagcctgctgccccgggacaagagcctgtacctgacctag

SEQ ID NO: 39488 - DNA, 1395 bp, Artificial Sequence
  derived and/or modified sequence
atgagcgacggcaaccccgagctgctgagcaccagccagacctacaacggacagtccgagaacaacgaagattatgaaatccctccaattaccccgcccaatttgccggaaccatcgttgttacacctcggcgatcatgaggcctcttatcactctctctgtcacggacttactccgaacggtctcctgcctgcctattcatatcaggcaatggacctgccagctatcatggtctcgaatatgctggcccaggactcacatctcctgagtggccagttgcctaccatccaggagatggttcatagtgaagtggccgcctatgactcgggccggcccggccccctgctggggcggcctgccatgctcgcttcacatatgtctgccctgtctcagagtcaactgatatcccagatgggaatccgcagcagtattgcccactcctctccgagtcccccaggatccaagagtgccactccttcacctagcagtagcacccaggaggaagagagtgaagtccattttaagatcagcggcgaaaaacgacctagcgcagaccctggcaaaaaggcgaaaaatcctaaaaaaaaaaaaaagaaggaccccaatgagcctcagaagcctgtgtctgcatacgcactgttttttcgagacacacaggccgctatcaagggtcaaaacccatccgcaacgtttggtgacgtttcaaagattgttgcctcgatgtgggactcacttggagaagagcagaagcaggcatataaacgcaagaccgaagccgcgaaaaaggagtatctcaaagccctcgctgcttaccgtgctagcttggtttcgaagagtagccccgatcagggagagactaagtccacacaagccaatccaccggcgaagatgctccccccaaaacagcccatgtacgccatgcccggcttggctagctttctcacaccttccgacctgcaggctttccgcagtggggcctcacctgcatcattggccagaaccctgggcagtaagtcactgctgccagggctatcagcttccccgccaccccccccaagcttcccactttcccccacattgcaccagcagttgagcttgcctcctcatgctcaaggcgccctcttatctcctcctgtttctatgtctcccgcccctcagcccccagtcctacccacccccatggcactgcaggtgcaactggcaatgtctccctccccgcctggacctcaggatttcccgcatatcagcgaattcccgtcctcatctggttcgtgctcacccgggcctagtaaccctacaagttctggagactgggattcttcctacccatccggtgagtgcggaatttcaacctgtagccttctgcctcgcgataagtctctttatctgacctag

SEQ ID NO: 39489 - DNA, 1395 bp, Artificial Sequence
  derived and/or modified sequence
atgagcgacggcaaccccgagctgctgagcaccagccagacctacaacgggcagtcagagaacaacgaggactatgagatcccccctattactcctcccaatctcccagagcccagcttgctccatctgggggatcatgaggcaagttatcattctctgtgccatggtctgactcccaacgggctgctgcctgcttatagctatcaggccatggatctacctgctatcatggtgtcaaacatgctggcccaggactcccatctcctgagcggccagttgccaaccatacaggagatggtgcatagtgaagtcgctgcatacgacagtggtcgtccaggtccgctgttgggccggcccgcaatgctcgccagtcatatgagcgctttaagccagtcccagctgatttctcaaatggggatccggagctccatcgcacattcgtcccccagccctccgggaagcaagtccgcgacacccagcccaagcagcagcacacaggaggaggaatcggaggtgcactttaagatctctggcgaaaagcggcccagcgccgatcctgggaaaaaggctaaaaatcccaaaaaaaagaagaaaaaggatcctaatgaaccccaaaagccagtttcagcctacgccctgttctttagagacactcaggctgcaattaaagggcagaacccctccgcaacattcggcgatgtatctaaaatcgtagcttctatgtgggacagcctgggagaagagcagaagcaggcctacaagcggaaaaccgaggcagcgaagaaggagtacctcaaggctctggctgcctatcgcgccagcctcgtgagcaagtcctcccctgatcagggggaaactaagagcacgcaggcgaaccccccagccaagatgttgcccccaaagcagccaatgtacgcgatgccaggtctggcttctttcttgactccctccgacctccaagcgttcaggagcggcgccagccctgccagtttggcccgcactctgggaagcaagagcctgctgccagggctgtccgcttcccctccccctccccctagtttcccactgtcgcctacattgcatcaacagttgtcccttccaccccacgcacaaggcgcactgttgagtccgcctgtctcaatgtctccagcgccgcagcctccagtactgccaaccccgatggcactgcaggttcagctggccatgagcccgtccccaccagggccccaagacttcccccacatatctgaatttccctcctcgtctggttcctgtagccccggtccttccaacccaactagctctggcgactgggactcttcataccctagtggagagtgcggcataagtacctgctcattactgccacgcgacaagagcttgtacctgacctag

SEQ ID NO: 39490 - DNA, 1155 bp, Artificial Sequence
  derived and/or modified sequence
atggagcaggagcgggagggcttcagcgaggaggtgaccttccagatccaggagatggtccacagcgaagtggctgcctacgactccggccggccagggccattgctcgggaggcctgcaatgctggcctcacacatgtccgccctgagtcaatcacagctcatcagccagatgggtatacggtcatccatagcccactcaagtccttccccccccggatctaagtctgcaacaccaagcccgagctccagcacgcaagaagaggagtcagaagtccacttcaagatcagtggggagaaaaggcctagtgccgatcctgggaagaaggcgaaaaaccctaagaagaagaagaagaaggaccctaatgagccacagaaaccagtgagtgcctatgcactcttttttcgagatactcaggcggcgatcaaggggcagaacccctcagctacatttggcgacgtctctaaaatcgtggcgtccatgtgggacagtttgggagaggaacagaagcaggcgtataaaagaaagactgaggcagccaaaaaagagtatctgaaagcactggctgcttaccgagcctcccttgtgagtaaatcctccccagatcagggagagactaagtccactcaagccaatccacccgctaagatgttgccccccaaacagccgatgtatgctatgcccggcttggcctcgtttctgaccccttccgatctgcaggcattcaggagtggcgcaagtcctgcgagcctcgcgaggacgcttggatctaaatctctcctgccgggtttaagtgcaagtccacccccccctccatcctttcctttgagccccacacttcaccagcaactctctctgccgccccatgcgcagggagccctcctctctccaccagtttctatgtcccctgcccctcaaccccccgtgctgcctactcctatggctctccaggttcagttggcaatgtcaccgtccccacccggacctcaggattttccccacatttccgaatttccctctagctctggctcatgttcacccgggccttctaatccaaccagttcaggtgattgggatagctcttatccgtcaggagagtgcggaataagcacttgctcactgctgcctcgtgataaatctctctacctaacttag

SEQ ID NO: 39491 - DNA, 2262 bp, Artificial Sequence
  derived and/or modified sequence
gtttccaagagggaagcaggaggctggcttcacttggttcccagacatctcatgagtgccggctgcctgcccagccctctgcctggtgctgggaggcaggtgtctctgcacttgagcagatgccgggaggcaacgtgtggagagctctgccagaggcttggaaagagggtgaggccagaggatggagcaggagagggaaggcttctctgaggaggtgacatttcagatccaggagatggtccactcggaagtggctgcctatgactcgggccggcccgggcccctgctgggtcgcccggcaatgctggccagccacatgagtgccctcagccagtcccagctcatctcgcagatgggcatccggagcagcatcgcccacagctccccatcaccgccggggagcaagtcagcgaccccctctccctccagctccactcaggaagaggagtcggaagtgcatttcaagatctcgggagaaaagagaccttcagccgacccaggaaaaaaggccaagaacccgaagaagaagaaaaagaaggaccccaatgagccgcagaagcctgtgtcggcctacgcactcttcttcagagacactcaggccgccatcaagggtcagaaccccagtgccactttcggtgacgtgtccaaaatcgtggcctccatgtgggacagcctgggagaggaacagaagcaggcctacaagaggaagacagaagcagcaaagaaggaatatctgaaggccctggcagcctaccgggctagcctcgtctccaagagctccccagatcaaggtgagaccaagagcactcaggcaaacccaccagccaaaatgctcccacccaagcagcccatgtatgccatgccaggcctggcctccttcctgacgccgtcggacctgcaggccttccgcagtggggcctcccctgccagcctcgcccggacgctgggctccaagtctctgctgccaggcctcagtgcgtccccgccgccgccaccctccttcccgctcagccccacactgcaccagcagctgtcactgccccctcacgcccagggcgccctcctcagtccacctgttagcatgtccccagccccccagccccctgtcctgcccacccccatggcactccaggtgcagctggcgatgagcccctcacctccagggccacaggacttcccgcacatctctgagttccccagcagctcgggatcctgctcacctggcccatccaaccccaccagcagcggggactgggacagcagctaccccagtggggagtgtggcatcagcacctgcagcctgctccccagggacaaatcgctctacctcacctaatcccgcctccctaccatccctgaggctcgctggaaggcactgctcagagcctgaagggctgacagcagaaaagaggccctggccagaggcagggtggcccatcggagagagcagtgacacacccattgcccgggggctgagtctcttcctcaacctcccaccagactctgcagaggcagcccactgcccaccaccagcccaaagaacctgcaggaaccttccgcccgctgacctgcttgctccagggtaactgtggaccctgtcctcgccctgcgcacggtaccctatgtctggacacccggccccagctccagccccagcccaggtgggccgcccctggcggggtcgcttaccaacggacacccaccccagatgcatgggccagagggccggcccccggcatagatgtgcacatcggttttccagtgtgaacaaaagattacgaaacctagaaactgttggttccgtgtaagtagttgactacgtgttttagaactgtgctgaagacatctgtaagactattttgtgggggaaaaaagtagtttcctttaaggtaaaaagcattttatatgatccttagcacatttttaagttttatcttaagggagacgcgcacaaaagcggctgccaaaccgtttcgtcatcctcacagcaaggaccggacgcttgctagccaccccggagcactgctctccttttaatcatgtattcatctattttaaattgccggcgacgacttttgtctatttatgaagaaaccttgagaacgaagttacagcttatcctaccgtgtgtgtggttttggggtttcgtttgggtttgggttcttgacgtcgtttgcagctgtttcctggccctggcgagtgtctgtcttggtgcccagtgcttctctcaaatctctttataataaaacttctgaaaagctg

SEQ ID NO: 39492 - DNA, 1395 bp, Artificial Sequence
  derived and/or modified sequence
atgtctgacgggaacccggagttattgagcacatcccagacatacaatggccagtcagaaaacaacgaggattacgagattccacccatcacccctccaaaccttcctgagcctagcctgctgcacctaggagaccatgaagcctcctaccatagcctgtgtcacggactcactcctaatggactgttgcctgcctactcttatcaggccatggacctacctgctatcatggtttccaacatgctagcacaggactcccatctgttgtctggtcagctccccactatccaagagatggtgcacagtgaagtagccgcttatgatagcggacgaccgggacccctgttaggcagacctgcaatgctggccagccatatgtctgcgctgtcccagtctcagcttatctcacagatgggcatcagaagtagcattgcacactcttccccatcacctccagggtccaagagcgcgacaccaagtccctcttcttctacgcaggaggaagaaagtgaagtgcacttcaaaatctccggtgagaagcgccctagtgcagaccccggaaaaaaggctaagaatccaaagaaaaaaaagaaaaaggatcccaacgaaccgcagaagccagtgtccgcctacgccctgttcttccgagacacccaggcggcaattaagggacagaacccatcagcaacttttggggatgtaagcaaaatagttgccagcatgtgggattcactgggcgaggaacagaaacaggcttataaacggaagacagaggcagccaaaaaagaatacctgaaagccctcgcagcctaccgtgcaagtctggtgtccaagtcttccccagatcagggcgagaccaagtccacccaggctaacccaccagccaaaatgttgccacctaaacagccgatgtatgcaatgccaggactcgctagctttctgaccccttctgatctccaggcatttaggtcaggggctagccccgcatcactggcccgaacacttggtagtaagagcctccttccagggctgagtgcgtctccacctccaccccctagctttcccctgtctcctacgttgcaccagcagttgtcccttccccctcatgcccaaggcgctttactgtcccctcccgtgtcaatgagcccggctccccagccacctgtcttgccaacacccatggccctgcaggtgcagctggctatgtccccgtctccccctggtccacaggatttcccgcacatttctgaatttccaagttcctccggcagctgcagcccaggtccaagcaaccccaccagctcgggagactgggacagctcctacccttcgggcgagtgcggtatttcaacatgttctctgctcccacgcgataaaagcctgtatcttacatag

SEQ ID NO: 39493 - DNA, 1395 bp, Artificial Sequence
  derived and/or modified sequence
atgtccgacggcaatccggaactcctctcaacatctcaaacttacaatggacaatccgaaaataatgaagattatgagatcccccctataacaccaccaaatctgcctgagccatcactgctccatcttggcgatcatgaggcatcctaccacagtctgtgtcatggcctcacccctaatgggctgttgcctgcctattcttaccaagcaatggacctgccagcaattatggtctccaatatgctggctcaggacagccatctcctgtctggccagctgccaactatccaagaaatggtgcacagcgaagtcgccgcatatgattctggacgtcccggtcctttgctgggccgaccggcaatgctggcatcccatatgtccgcactgtcgcagtctcagcttataagccagatgggaattcggtcgagtatagcacacagctccccatcacctccaggcagcaaatctgccaccccctcgccttcatcgtccacccaggaggaggagtcagaggtgcacttcaagatctccggcgagaaacggccatccgccgacccagggaagaaagccaagaatccaaaaaagaaaaaaaagaaagaccctaacgagccgcagaagccagtgtcggcctatgcactcttcttccgcgacacccaggccgctatcaaaggtcaaaatccctctgccacgttcggagacgtcagcaagatcgtcgcctctatgtgggattccttaggggaggaacagaaacaggcctataagcgtaagaccgaggcggcaaagaaagaatatctaaaagctttagcagcgtaccgcgcttccttggtcagtaaatccagccctgatcaaggtgagaccaagtccacgcaggccaaccccccagccaaaatgttgccccctaagcagcccatgtatgcaatgcccggacttgccagtttccttactccatccgatttgcaggcattccgcagcggggcatcaccagcttcactggctcgaactttggggagcaagagtctccttccgggactatccgcctctcctccccctccaccctcctttccattgtcacccacgctgcatcagcagctgtccttgccaccacatgcccagggggctctgttatcacccccagtttctatgtctcctgcccctcagccgcctgtgttgcccactcccatggccctccaggtgcaattagccatgtcaccatctccccctggccctcaggactttcctcacattagcgagttccccagctcaagtggctcctgcagccccggtccttccaacccaacgtctagcggcgactgggattcctcttacccatccggcgaatgcgggatctccacttgctctctgcttccgagggataagtctctctacctcacttag

SEQ ID NO: 39494 - DNA, 1155 bp, Artificial Sequence
  derived and/or modified sequence
atggaacaggagagggagggcttcagcgaggaggtgactttccagatccaagagatggtccacagtgaagttgccgcttatgacagcggacgccctgggcctttattaggaagaccagctatgctcgcttcgcacatgtcagcactgtcccagtcccagctcatcagccagatggggatccggtcaagcattgctcattcatccccaagcccccctggctcgaaatccgccacccctagcccatcctcctctacacaggaggaggagtcagaagttcacttcaagatctccggggagaaaaggccaagcgccgatccgggtaagaaagccaagaatcccaagaaaaagaagaaaaaggatccgaacgagccccagaaacccgtttctgcctacgctctgtttttcagagatacacaagctgctatcaagggccagaatcctagcgcaacttttggtgatgtaagtaaaatagttgccagtatgtgggatagcctgggggaagagcagaagcaagcttataagcgaaagactgaggctgctaagaaagaatacctaaaagctctcgccgcatatcgggcatctttggtctccaagtcttctccagatcagggagaaactaagagcacccaggcaaacccgcctgcaaaaatgctgccccctaaacagcctatgtatgcaatgccagggctcgcatctttcctaaccccaagcgatctgcaggcgttcaggtctggcgcatcaccagcctcccttgcacggacattggggtcgaaatctctgctgccaggcctctctgcttcacccccaccccctcccagtttcccgctgagccctacattgcaccagcagttgtcactgccgcctcacgcccagggcgctcttctgtccccacccgtgtcaatgtcccctgccccacaacctcccgtgttaccaacaccaatggctttacaggtgcagctggcaatgtctccttcaccacccggtcctcaagacttccctcacataagtgagtttccatcttcgagtggaagttgttctcctggcccatccaacccgacctcatctggagattgggatagcagttatccgagtggagagtgtggtatcagtacctgctcactactccccagggacaaatcactgtacctgacctag

SEQ ID NO: 39495 - DNA, 1395 bp, Artificial Sequence
  derived and/or modified sequence
atgagcgacggcaaccccgagctgctgagcaccagccagacctacaacggccagagcgagaacaacgaggactacgagatcccccccatcaccccccccaacctgcccgagcccagcctgctgcacctgggcgaccacgaggccagctaccacagcctgtgccacggcctgacccccaacggcctgctgcccgcctacagctaccaggccatggacctgcccgccatcatggtgagcaacatgctggcccaggacagccacctgctgagcggccagctgcccaccatccaggagatggtgcacagcgaggtggccgcctacgacagcggcagacccggccccctgctgggcagacccgccatgctggccagccacatgagcgccctgagccagagccagctgatcagccagatgggcatcagaagcagcatcgcccacagcagccccagcccccccggcagcaagagcgccacccccagccccagcagcagcacccaggaggaggagagcgaggtgcacttcaagatcagcggcgagaagagacccagcgccgaccccggcaagaaggccaagaaccccaagaagaagaagaagaaggaccccaacgagccccagaagcccgtgagcgcctacgccctgttcttcagagacacccaggccgccatcaagggccagaaccccagcgccaccttcggcgacgtgagcaagatcgtggccagcatgtgggacagcctgggcgaggagcagaagcaggcctacaagagaaagaccgaggccgccaagaaggagtacctgaaggccctggccgcctacagagccagcctggtgagcaagagcagccccgaccagggcgagaccaagagcacccaggccaacccccccgccaagatgctgccccccaagcagcccatgtacgccatgcccggcctggccagcttcctgacccccagcgacctgcaggccttcagaagcggcgccagccccgccagcctggccagaaccctgggcagcaagagcctgctgcccggcctgagcgccagccccccccccccccccagcttccccctgagccccaccctgcaccagcagctgagcctgcccccccacgcccagggcgccctgctgagcccccccgtgagcatgagccccgccccccagccccccgtgctgcccacccccatggccctgcaggtgcagctggccatgagccccagcccccccggcccccaggacttcccccacatcagcgagttccccagcagcagcggcagctgcagccccggccccagcaaccccaccagcagcggcgactgggacagcagctaccccagcggcgagtgcggcatcagcacctgcagcctgctgcccagagacaagagcctgtacctgacctag

SEQ ID NO: 39496 - DNA, 1155 bp, Artificial Sequence
  derived and/or modified sequence
atggagcaggagagagagggcttcagcgaggaggtgaccttccagatccaggagatggtgcacagcgaggtggccgcctacgacagcggcagacccggccccctgctgggcagacccgccatgctggccagccacatgagcgccctgagccagagccagctgatcagccagatgggcatcagaagcagcatcgcccacagcagccccagcccccccggcagcaagagcgccacccccagccccagcagcagcacccaggaggaggagagcgaggtgcacttcaagatcagcggcgagaagagacccagcgccgaccccggcaagaaggccaagaaccccaagaagaagaagaagaaggaccccaacgagccccagaagcccgtgagcgcctacgccctgttcttcagagacacccaggccgccatcaagggccagaaccccagcgccaccttcggcgacgtgagcaagatcgtggccagcatgtgggacagcctgggcgaggagcagaagcaggcctacaagagaaagaccgaggccgccaagaaggagtacctgaaggccctggccgcctacagagccagcctggtgagcaagagcagccccgaccagggcgagaccaagagcacccaggccaacccccccgccaagatgctgccccccaagcagcccatgtacgccatgcccggcctggccagcttcctgacccccagcgacctgcaggccttcagaagcggcgccagccccgccagcctggccagaaccctgggcagcaagagcctgctgcccggcctgagcgccagccccccccccccccccagcttccccctgagccccaccctgcaccagcagctgagcctgcccccccacgcccagggcgccctgctgagcccccccgtgagcatgagccccgccccccagccccccgtgctgcccacccccatggccctgcaggtgcagctggccatgagccccagcccccccggcccccaggacttcccccacatcagcgagttccccagcagcagcggcagctgcagccccggccccagcaaccccaccagcagcggcgactgggacagcagctaccccagcggcgagtgcggcatcagcacctgcagcctgctgcccagagacaagagcctgtacctgacctag

SEQ ID NO: 39497 - protein, 506 aa, Artificial Sequence
  derived and/or modified sequence
MDVRLYPSAPAVGARPGAEPAGLAHLDYYHGGKFDGDSAYVGMSDGNPELLSTSQTYNGQSENNEDYEIPPITPPNLPEPSLLHLGDHEASYHSLCHGLTPNGLLPAYSYQAMDLPAIMVSNMLAQDSHLLSGQLPTIQEMVHSEVAAYDSGRPGPLLGRPAMLASHMSALSQSQLISQMGIRSSIAHSSPSPPGSKSATPSPSSSTQEEESEVHFKISGEKRPSADPGKKAKNPKKKKKKDPNEPQKPVSAYALFFRDTQAAIKGQNPSATFGDVSKIVASMWDSLGEEQKQAYKRKTEAAKKEYLKALAAYRASLVSKSSPDQGETKSTQANPPAKMLPPKQPMYAMPGLASFLTPSDLQAFRSGASPASLARTLGSKSLLPGLSASPPPPPSFPLSPTLHQQLSLPPHAQGALLSPPVSMSPAPQPPVLPTPMALQVQLAMSPSPPGPQDFPHISEFPSSSGSCSPGPSNPTSSGDWDSSYPSGECGISTCSLLPRDKSLYLT

SEQ ID NO: 39498 - DNA, 1521 bp, Artificial Sequence
  derived and/or modified sequence
atggatgtacggttgtatccttctgcccctgctgtaggggctcgtcctggcgcggagcccgccggattagctcatcttgactattaccacggcgggaaattcgatggtgactctgcctatgtgggcatgtctgacggtaatcccgagctgttatccacatcgcagacctacaacgggcaatccgaaaacaatgaggactacgaaattcccccaatcacccctcctaacctaccagagccgtcattactccatttaggggatcacgaggcctcgtaccattccctatgccacggattgacccccaatggtctacttccggcctattcctaccaagccatggaccttcccgccattatggtcagcaacatgctggcccaggacagtcacttgctgtctggtcagcttccaacaattcaggaaatggtccattctgaggtggccgcgtacgatagcggccggcccgggcctctcttaggtcgcccagcaatgctggcatcccacatgagcgccctgagtcagagtcaactgatatcacagatggggatccgcagcagtatcgcccatagcagcccctcacctccgggctctaaaagcgctactcccagcccttcttcctccacacaagaagaagagtccgaggtccactttaagatcagtggagaaaaaagaccgagcgccgacccagggaaaaaggctaagaacccaaagaagaaaaagaaaaaggaccccaacgaaccccagaagcccgtttctgcctacgccttattttttagagatactcaggcggctatcaagggacaaaacccatcagctactttcggagacgtctctaaaatcgtcgcaagtatgtgggactccttaggggaggaacagaagcaggcttacaagcgaaagaccgaagctgcgaaaaaagagtatctgaaagctctggctgcctatagagcatccctcgtcagcaagtcctcccctgatcagggtgaaaccaagtctacacaggccaacccgcccgcgaagatgctgccaccaaagcagccaatgtacgcgatgcctggactcgccagtttcctgactccctctgacctccaggcctttcgatccggcgccagccctgcatctctcgcccgcaccctcgggtcgaaaagcttactgcctggactttccgccagcccaccaccgccccctagtttccctctgagtcctacccttcaccaacagctctctctgccaccgcacgcacagggagccctgctgtccccccctgttagtatgtcccctgcaccacagccacctgttctgccgacacccatggccctccaggttcagctcgctatgagccccagtccccctggaccacaagatttcccgcacatttcagaattcccaagcagctcgggtagctgcagtcctggtcctagcaatcccacgtcatcaggggattgggattccagctatcctagtggggaatgcggcatttctacatgttctctgctgcctcgggataaatccctctatctgacttag

SEQ ID NO: 39499 - DNA, 1521 bp, Artificial Sequence
  derived and/or modified sequence
atggatgtgcggctgtaccccagcgccccagctgtgggcgcccggcctggagctgagcctgctggcctggcccacctggactactaccacggcggcaagtttgatggagacagcgcctacgtgggcatgtctgatggcaaccctgagctgctgagcaccagccagacctacaacggccagagcgagaacaatgaagattatgagatcccccccatcaccccacccaacctgcctgagcccagcctgctgcacctgggggaccacgaggccagctaccacagcctgtgccacggcctgacccccaacggcctgctgcctgcctacagctaccaggccatggacctgcctgccatcatggtgagcaacatgctggcccaggacagccacctgctgagcggccagctgcccaccatccaggagatggtgcacagcgaggtggccgcctatgattctggccggcccggccccctgctgggccgcccagccatgctggccagccacatgtctgccctgagccagagccagctgatcagccagatgggcatccgcagcagcatcgcccacagcagccccagccccccaggcagcaagagcgccacccccagccccagcagcagcacccaggaggaggagagcgaggtgcacttcaagatctctggagagaagaggccttctgctgaccccgggaagaaggccaagaaccccaagaagaagaagaagaaggaccccaatgagccccagaagcctgtgtctgcctatgccctcttcttccgggacacccaggccgccatcaagggccagaaccccagcgccacctttggagatgtgtccaagatcgtggcctccatgtgggacagcctgggggaggagcagaagcaggcctacaagaggaagacagaagctgccaagaaggagtacctgaaggccctggccgcctaccgggccagcctggtgtccaagagcagcccagaccagggcgagaccaagagcacccaggccaaccccccagccaagatgctgccccccaagcagcccatgtatgccatgcctggcctggccagcttcctgacccccagcgacctgcaggccttccgcagcggggccagccctgccagcctggcccggaccctgggcagcaagagcctgctgcccggcctgagcgccagccccccacctcctccttccttccccctgagccccaccctgcaccagcagctgagcctgccccctcatgcccagggcgccctgctgagcccccctgtgtccatgagccctgccccccagccccctgtgctgcccacccccatggccctgcaggtgcagctggccatgagccccagccccccaggcccccaggacttcccccacatcagcgagttccccagcagcagcggcagctgcagccctggccccagcaaccccaccagcagcggggactgggacagcagctaccccagcggggagtgtggcatcagcacctgcagcctgctgccccgggacaagagcctgtacctgacctag

SEQ ID NO: 39500 - DNA, 1521 bp, Artificial Sequence
  derived and/or modified sequence
atggacgtgcggctgtaccccagcgcccccgccgtgggcgcccggcccggagcagaaccagcggggctggcacacctagactactaccatgggggaaagtttgacggggactccgcgtacgtgggcatgagtgacggcaacccggagctcttgtcaacttcccagacatataacggtcaatcggagaacaacgaggactatgaaatcccacccatcacaccaccgaatttaccagagccttctctgttgcacttgggagaccacgaggcttcataccacagtttgtgccacggccttacgccaaatgggctgttgcccgcttactcctatcaggccatggacttacccgcaatcatggtcagtaatatgcttgcccaggatagccaccttctgagtggacagttgcctaccattcaggagatggttcactcagaggtggccgcttatgatagcggacgcccggggcccttattgggtagacccgcaatgctcgctagccatatgtcagcactctctcaatctcagttgatcagccagatggggatccggtcttccatcgcacattcatctccgtcccctccaggcagtaaatccgccacaccttctccctccagcagcactcaggaagaagaatcagaggtgcactttaaaatctctggagaaaaaaggcccagtgccgatcccggtaaaaaggctaagaatcctaagaagaagaagaagaaggatccgaatgaaccacagaagcctgtaagtgcatatgcgctgtttttccgcgatacgcaggccgctattaaggggcaaaatccatccgccacttttggtgacgttagcaagatagtagcttccatgtgggacagcttgggtgaggagcaaaaacaggcctataagcggaaaacggaagccgcaaagaaggagtatctgaaggccctagccgcctaccgcgcctccctggtgtccaagtctagccctgatcaaggtgaaacgaaatccacgcaggctaaccccccagctaagatgctgccacccaaacagcctatgtatgctatgcccgggctggcctcttttttgaccccctcagatttgcaggcgtttagatccggcgcgtcaccagcaagcctggcacgaactctcggtagcaaatccctactacccggattatccgcctctccacctccccccccgtccttccccctgagtcctaccctccaccagcagctgtcgcttccgccgcacgcacagggggcgctgttatcacctccagtaagcatgagcccagcaccccagccccccgtgctgcctactcctatggcactccaagtacagcttgccatgtcaccctcaccgccagggccacaggactttccgcatatcagtgagttcccatcctctagcggatcatgctcccccgggcccagtaatcccacatcatcaggtgattgggactcttcttatccctctggggagtgcgggatcagcacttgcagcctcttgcccagggacaaaagcctctacctaacttag

SEQ ID NO: 39501 - DNA, 2487 bp, Artificial Sequence
  derived and/or modified sequence
actgcccgcgggagccgccgccgccgccgccgcgcccgccatggacgtccgcctgtacccctcggcgcccgcggtgggcgcgcggcccggggccgagccggccggcctggcgcacctggactattaccacggcggcaagtttgatggtgacagtgcctacgtggggatgagtgacggaaacccagagctcctgtcaaccagccagacctacaacggccagagcgagaacaacgaagactatgagatccccccgataacacctcccaacctcccggagccatccctcctgcacctgggggaccacgaagccagctaccactcgctgtgccacggcctcacccccaacggtctgctccctgcctactcctatcaggccatggacctcccagccatcatggtgtccaacatgctagcacaggacagccacctgctgtcgggccagctgcccacgatccaggagatggtccactcggaagtggctgcctatgactcgggccggcccgggcccctgctgggtcgcccggcaatgctggccagccacatgagtgccctcagccagtcccagctcatctcgcagatgggcatccggagcagcatcgcccacagctccccatcaccgccggggagcaagtcagcgaccccctctccctccagctccactcaggaagaggagtcggaagtgcatttcaagatctcgggagaaaagagaccttcagccgacccaggaaaaaaggccaagaacccgaagaagaagaaaaagaaggaccccaatgagccgcagaagcctgtgtcggcctacgcactcttcttcagagacactcaggccgccatcaagggtcagaaccccagtgccactttcggtgacgtgtccaaaatcgtggcctccatgtgggacagcctgggagaggaacagaagcaggcctacaagaggaagacagaagcagcaaagaaggaatatctgaaggccctggcagcctaccgggctagcctcgtctccaagagctccccagatcaaggtgagaccaagagcactcaggcaaacccaccagccaaaatgctcccacccaagcagcccatgtatgccatgccaggcctggcctccttcctgacgccgtcggacctgcaggccttccgcagtggggcctcccctgccagcctcgcccggacgctgggctccaagtctctgctgccaggcctcagtgcgtccccgccgccgccaccctccttcccgctcagccccacactgcaccagcagctgtcactgccccctcacgcccagggcgccctcctcagtccacctgttagcatgtccccagccccccagccccctgtcctgcccacccccatggcactccaggtgcagctggcgatgagcccctcacctccagggccacaggacttcccgcacatctctgagttccccagcagctcgggatcctgctcacctggcccatccaaccccaccagcagcggggactgggacagcagctaccccagtggggagtgtggcatcagcacctgcagcctgctccccagggacaaatcgctctacctcacctaatcccgcctccctaccatccctgaggctcgctggaaggcactgctcagagcctgaagggctgacagcagaaaagaggccctggccagaggcagggtggcccatcggagagagcagtgacacacccattgcccgggggctgagtctcttcctcaacctcccaccagactctgcagaggcagcccactgcccaccaccagcccaaagaacctgcaggaaccttccgcccgctgacctgcttgctccagggtaactgtggaccctgtcctcgccctgcgcacggtaccctatgtctggacacccggccccagctccagccccagcccaggtgggccgcccctggcggggtcgcttaccaacggacacccaccccagatgcatgggccagagggccggcccccggcatagatgtgcacatcggttttccagtgtgaacaaaagattacgaaacctagaaactgttggttccgtgtaagtagttgactacgtgttttagaactgtgctgaagacatctgtaagactattttgtgggggaaaaaagtagtttcctttaaggtaaaaagcattttatatgatccttagcacatttttaagttttatcttaagggagacgcgcacaaaagcggctgccaaaccgtttcgtcatcctcacagcaaggaccggacgcttgctagccaccccggagcactgctctccttttaatcatgtattcatctattttaaattgccggcgacgacttttgtctatttatgaagaaaccttgagaacgaagttacagcttatcctaccgtgtgtgtggttttggggtttcgtttgggtttgggttcttgacgtcgtttgcagctgtttcctggccctggcgagtgtctgtcttggtgcccagtgcttctctcaaatctctttataataaaacttctgaaaagctg

SEQ ID NO: 39502 - DNA, 2519 bp, Artificial Sequence
  derived and/or modified sequence
cgcagccctggcgcagacgcgtgggctccgtggcgatgcggggtgttgcctgaggctccactgaagctatggcataatttgcagaatttgcacttcattacttttctgaaattcaaacaaattctgaaactgcacgagttctggctgagagctgtggatctgtgcattttgatggtgacagtgcctacgtggggatgagtgacggaaacccagagctcctgtcaaccagccagacctacaacggccagagcgagaacaacgaagactatgagatccccccgataacacctcccaacctcccggagccatccctcctgcacctgggggaccacgaagccagctaccactcgctgtgccacggcctcacccccaacggtctgctccctgcctactcctatcaggccatggacctcccagccatcatggtgtccaacatgctagcacaggacagccacctgctgtcgggccagctgcccacgatccaggagatggtccactcggaagtggctgcctatgactcgggccggcccgggcccctgctgggtcgcccggcaatgctggccagccacatgagtgccctcagccagtcccagctcatctcgcagatgggcatccggagcagcatcgcccacagctccccatcaccgccggggagcaagtcagcgaccccctctccctccagctccactcaggaagaggagtcggaagtgcatttcaagatctcgggagaaaagagaccttcagccgacccaggaaaaaaggccaagaacccgaagaagaagaaaaagaaggaccccaatgagccgcagaagcctgtgtcggcctacgcactcttcttcagagacactcaggccgccatcaagggtcagaaccccagtgccactttcggtgacgtgtccaaaatcgtggcctccatgtgggacagcctgggagaggaacagaagcaggcctacaagaggaagacagaagcagcaaagaaggaatatctgaaggccctggcagcctaccgggctagcctcgtctccaagagctccccagatcaaggtgagaccaagagcactcaggcaaacccaccagccaaaatgctcccacccaagcagcccatgtatgccatgccaggcctggcctccttcctgacgccgtcggacctgcaggccttccgcagtggggcctcccctgccagcctcgcccggacgctgggctccaagtctctgctgccaggcctcagtgcgtccccgccgccgccaccctccttcccgctcagccccacactgcaccagcagctgtcactgccccctcacgcccagggcgccctcctcagtccacctgttagcatgtccccagccccccagccccctgtcctgcccacccccatggcactccaggtgcagctggcgatgagcccctcacctccagggccacaggacttcccgcacatctctgagttccccagcagctcgggatcctgctcacctggcccatccaaccccaccagcagcggggactgggacagcagctaccccagtggggagtgtggcatcagcacctgcagcctgctccccagggacaaatcgctctacctcacctaatcccgcctccctaccatccctgaggctcgctggaaggcactgctcagagcctgaagggctgacagcagaaaagaggccctggccagaggcagggtggcccatcggagagagcagtgacacacccattgcccgggggctgagtctcttcctcaacctcccaccagactctgcagaggcagcccactgcccaccaccagcccaaagaacctgcaggaaccttccgcccgctgacctgcttgctccagggtaactgtggaccctgtcctcgccctgcgcacggtaccctatgtctggacacccggccccagctccagccccagcccaggtgggccgcccctggcggggtcgcttaccaacggacacccaccccagatgcatgggccagagggccggcccccggcatagatgtgcacatcggttttccagtgtgaacaaaagattacgaaacctagaaactgttggttccgtgtaagtagttgactacgtgttttagaactgtgctgaagacatctgtaagactattttgtgggggaaaaaagtagtttcctttaaggtaaaaagcattttatatgatccttagcacatttttaagttttatcttaagggagacgcgcacaaaagcggctgccaaaccgtttcgtcatcctcacagcaaggaccggacgcttgctagccaccccggagcactgctctccttttaatcatgtattcatctattttaaattgccggcgacgacttttgtctatttatgaagaaaccttgagaacgaagttacagcttatcctaccgtgtgtgtggttttggggtttcgtttgggtttgggttcttgacgtcgtttgcagctgtttcctggccctggcgagtgtctgtcttggtgcccagtgcttctctcaaatctctttataataaaacttctgaaaagctgaaaa

SEQ ID NO: 39503 - DNA, 2415 bp, Artificial Sequence
  derived and/or modified sequence
gattgaacagcgcgcgtgggtttcccgcagccctggcgcagacgcgtgggctccgtggcgatgcgggtttgatggtgacagtgcctacgtggggatgagtgacggaaacccagagctcctgtcaaccagccagacctacaacggccagagcgagaacaacgaagactatgagatccccccgataacacctcccaacctcccggagccatccctcctgcacctgggggaccacgaagccagctaccactcgctgtgccacggcctcacccccaacggtctgctccctgcctactcctatcaggccatggacctcccagccatcatggtgtccaacatgctagcacaggacagccacctgctgtcgggccagctgcccacgatccaggagatggtccactcggaagtggctgcctatgactcgggccggcccgggcccctgctgggtcgcccggcaatgctggccagccacatgagtgccctcagccagtcccagctcatctcgcagatgggcatccggagcagcatcgcccacagctccccatcaccgccggggagcaagtcagcgaccccctctccctccagctccactcaggaagaggagtcggaagtgcatttcaagatctcgggagaaaagagaccttcagccgacccaggaaaaaaggccaagaacccgaagaagaagaaaaagaaggaccccaatgagccgcagaagcctgtgtcggcctacgcactcttcttcagagacactcaggccgccatcaagggtcagaaccccagtgccactttcggtgacgtgtccaaaatcgtggcctccatgtgggacagcctgggagaggaacagaagcaggcctacaagaggaagacagaagcagcaaagaaggaatatctgaaggccctggcagcctaccgggctagcctcgtctccaagagctccccagatcaaggtgagaccaagagcactcaggcaaacccaccagccaaaatgctcccacccaagcagcccatgtatgccatgccaggcctggcctccttcctgacgccgtcggacctgcaggccttccgcagtggggcctcccctgccagcctcgcccggacgctgggctccaagtctctgctgccaggcctcagtgcgtccccgccgccgccaccctccttcccgctcagccccacactgcaccagcagctgtcactgccccctcacgcccagggcgccctcctcagtccacctgttagcatgtccccagccccccagccccctgtcctgcccacccccatggcactccaggtgcagctggcgatgagcccctcacctccagggccacaggacttcccgcacatctctgagttccccagcagctcgggatcctgctcacctggcccatccaaccccaccagcagcggggactgggacagcagctaccccagtggggagtgtggcatcagcacctgcagcctgctccccagggacaaatcgctctacctcacctaatcccgcctccctaccatccctgaggctcgctggaaggcactgctcagagcctgaagggctgacagcagaaaagaggccctggccagaggcagggtggcccatcggagagagcagtgacacacccattgcccgggggctgagtctcttcctcaacctcccaccagactctgcagaggcagcccactgcccaccaccagcccaaagaacctgcaggaaccttccgcccgctgacctgcttgctccagggtaactgtggaccctgtcctcgccctgcgcacggtaccctatgtctggacacccggccccagctccagccccagcccaggtgggccgcccctggcggggtcgcttaccaacggacacccaccccagatgcatgggccagagggccggcccccggcatagatgtgcacatcggttttccagtgtgaacaaaagattacgaaacctagaaactgttggttccgtgtaagtagttgactacgtgttttagaactgtgctgaagacatctgtaagactattttgtgggggaaaaaagtagtttcctttaaggtaaaaagcattttatatgatccttagcacatttttaagttttatcttaagggagacgcgcacaaaagcggctgccaaaccgtttcgtcatcctcacagcaaggaccggacgcttgctagccaccccggagcactgctctccttttaatcatgtattcatctattttaaattgccggcgacgacttttgtctatttatgaagaaaccttgagaacgaagttacagcttatcctaccgtgtgtgtggttttggggtttcgtttgggtttgggttcttgacgtcgtttgcagctgtttcctggccctggcgagtgtctgtcttggtgcccagtgcttctctcaaatctctttataataaaacttctgaaaagctg

SEQ ID NO: 39504 - DNA, 687 bp, Artificial Sequence
  derived and/or modified sequence
agccgccgccgccgccgccgcgcccgccatggacgtccgcctgtacccctcggcgcccgcggtgggcgcgcggcccggggccgagccggccggcctggcgcacctggactattaccacggcggcaagtttgatggtgacagtgcctacgtggggatgagtgacggaaacccagagctcctgtcaaccagccagacctacaacggccagagcgagaacaacgaagactatgagatccccccgataacacctcccaacctcccggagccatccctcctgcacctgggggaccacgaagccagctaccactcgctgtgccacggcctcacccccaacggtctgctccctgcctactcctatcaggccatggacctcccagccatcatggtgtccaacatgctagcacaggacagccacctgctgtcgggccagctgcccacgatccaggagatggtccactcggaagtggctgcctatgactcgggccggcccgggcccctgctgggtcgcccggcaatgctggccagccacatgagtgccctcagccagtcccagctcatctcgcagatgggcatccggagcagcatcgcccacagctccccatcaccgccggggagcaagtcagcgaccccctctccctccagctccactcaggaagaggagtcggaagtgcatttcaagatctcggg

SEQ ID NO: 39505 - DNA, 1521 bp, Artificial Sequence
  derived and/or modified sequence
atggacgtgaggctgtatcctagcgcgccagcagttggggcaaggcccggagccgagcctgcgggactggctcacctggattactatcacgggggaaaattcgatggcgactcggcgtacgtggggatgtcggatggaaaccccgagctgctgagcacctctcagacctataatggacagagtgaaaataacgaggactatgagataccacctatcacacccccaaacctgcctgagcccagtctgcttcacttgggggaccacgaggcttcatatcactccttatgccatgggttgacccccaatggactcctacccgcttactcctatcaggcaatggacctgccggcaattatggtgagcaacatgctggctcaagactcccacctgttgtccgggcagttgcccaccattcaagaaatggtacatagcgaggtcgcagcctacgacagcggacgtccgggacccttgcttggccgaccagccatgctggcaagccatatgtccgcactgtcacagagtcagctcatatcacagatgggtatccgctcttcgattgcccacagttcccccagcccaccgggttctaagtccgctacaccatctccctcctcctctacacaggaggaagaaagcgaggtgcactttaaaatttccggagagaaaaggccatccgctgatcctggaaaaaaagccaagaatccaaagaagaaaaaaaaaaaggacccgaatgaaccccagaaacctgtttctgcgtacgctctgttctttagggacacgcaagcagccatcaaaggccagaatcccagcgctacattcggtgacgtgtcaaaaattgtggcatcgatgtgggacagcctgggggaggaacagaagcaggcttataagaggaagacggaggcggcaaagaaggagtaccttaaggccttggcggcatatcgggcttccctggtgtccaaatctagtccggaccagggggagacaaagagcactcaagcgaatccccctgcgaagatgcttcctccaaagcaaccaatgtatgctatgccgggtcttgcaagctttctcaccccctctgacctgcaggcattccgttctggggcttccccagcctccctggccaggacactcggatcgaaatctctgctgcccggactgtccgcctcaccccctcctcctccaagcttccccctttctccaactcttcatcagcagctttctcttcctccacatgcccagggagccttgttgtcaccccctgtcagcatgtctcctgcaccacagccaccagtgttgccaaccccaatggccctgcaggtgcaacttgcaatgtctccatcgccccctgggccacaggactttcctcacatttcggaatttccctccagtagtggttcatgtagtcctgggccttcgaaccctacgtcatcaggtgactgggattcttcataccctagtggtgagtgcgggatctccacatgctccctgctgcctcgcgacaagtctctttatcttacttag

SEQ ID NO: 39506 - DNA, 1521 bp, Artificial Sequence
  derived and/or modified sequence
atggacgtgagactgtaccccagcgcccccgccgtgggcgccagacccggcgccgagcccgccggcctggcccacctggactactaccacggcggcaagttcgacggcgacagcgcctacgtgggcatgagcgacggcaaccccgagctgctgagcaccagccagacctacaacggccagagcgagaacaacgaggactacgagatcccccccatcaccccccccaacctgcccgagcccagcctgctgcacctgggcgaccacgaggccagctaccacagcctgtgccacggcctgacccccaacggcctgctgcccgcctacagctaccaggccatggacctgcccgccatcatggtgagcaacatgctggcccaggacagccacctgctgagcggccagctgcccaccatccaggagatggtgcacagcgaggtggccgcctacgacagcggcagacccggccccctgctgggcagacccgccatgctggccagccacatgagcgccctgagccagagccagctgatcagccagatgggcatcagaagcagcatcgcccacagcagccccagcccccccggcagcaagagcgccacccccagccccagcagcagcacccaggaggaggagagcgaggtgcacttcaagatcagcggcgagaagagacccagcgccgaccccggcaagaaggccaagaaccccaagaagaagaagaagaaggaccccaacgagccccagaagcccgtgagcgcctacgccctgttcttcagagacacccaggccgccatcaagggccagaaccccagcgccaccttcggcgacgtgagcaagatcgtggccagcatgtgggacagcctgggcgaggagcagaagcaggcctacaagagaaagaccgaggccgccaagaaggagtacctgaaggccctggccgcctacagagccagcctggtgagcaagagcagccccgaccagggcgagaccaagagcacccaggccaacccccccgccaagatgctgccccccaagcagcccatgtacgccatgcccggcctggccagcttcctgacccccagcgacctgcaggccttcagaagcggcgccagccccgccagcctggccagaaccctgggcagcaagagcctgctgcccggcctgagcgccagccccccccccccccccagcttccccctgagccccaccctgcaccagcagctgagcctgcccccccacgcccagggcgccctgctgagcccccccgtgagcatgagccccgccccccagccccccgtgctgcccacccccatggccctgcaggtgcagctggccatgagccccagcccccccggcccccaggacttcccccacatcagcgagttccccagcagcagcggcagctgcagccccggccccagcaaccccaccagcagcggcgactgggacagcagctaccccagcggcgagtgcggcatcagcacctgcagcctgctgcccagagacaagagcctgtacctgacctag

SEQ ID NO: 39507 - protein, 488 aa, Artificial Sequence
  derived and/or modified sequence
MQQTRTEAVAGAFSRCLGFCGMRLGLLLLARHWCIAGVFPQKFDGDSAYVGMSDGNPELLSTSQTYNGQSENNEDYEIPPITPPNLPEPSLLHLGDHEASYHSLCHGLTPNGLLPAYSYQAMDLPAIMVSNMLAQDSHLLSGQLPTIQEMVHSEVAAYDSGRPGPLLGRPAMLASHMSALSQSQLISQMGIRSSIAHSSPSPPGSKSATPSPSSSTQEEESEVHFKISGEKRPSADPGKKAKNPKKKKKKDPNEPQKPVSAYALFFRDTQAAIKGQNPSATFGDVSKIVASMWDSLGEEQKQSSPDQGETKSTQANPPAKMLPPKQPMYAMPGLASFLTPSDLQAFRSGASPASLARTLGSKSLLPGLSASPPPPPSFPLSPTLHQQLSLPPHAQGALLSPPVSMSPAPQPPVLPTPMALQVQLAMSPSPPGPQDFPHISEFPSSSGSCSPGPSNPTSSGDWDSSYPSGECGISTCSLLPRDKSLYLT

SEQ ID NO: 39508 - DNA, 1467 bp, Artificial Sequence
  derived and/or modified sequence
atgcagcagacccggactgaggccgtcgctggggcattctcaagatgtttaggattttgtggcatgcgcctgggacttctactgctggctcgccactggtgcatcgcaggagtgttcccccagaaattcgacggagactctgcctatgtgggcatgtctgacggcaatccagaactgctctccacatcccagacatataatggacagtctgaaaataatgaggattacgaaatacctcccattacgcctccgaatctccctgaacccagcctgcttcacttgggtgatcacgaggcatcctaccacagcctgtgccacggcctgactcccaatggactgctgccagcctacagctatcaggccatggatctgccagctatcatggtttcgaatatgctggcacaggacagccacctgttgagcggtcaacttcctacgattcaagaaatggtgcattccgaagtggccgcctacgacagtgggcgccccgggccgctgctggggaggcccgctatgcttgcctctcacatgtcggcccttagccaatcccaactaatttcgcagatggggatccggtcatcaatagcacattcctcccccagcccacccggcagcaagagtgccacccccagcccgagcagctcaactcaggaagaggagagcgaggtacattttaagatcagtggcgaaaaacgaccctctgccgatcccggcaaaaaggccaaaaaccccaagaaaaaaaagaaaaaggacccgaacgaaccccagaaaccagtgagcgcctatgcactgttcttccgggacacacaagcagcaatcaaggggcagaacccaagcgctacgtttggtgatgtctccaaaattgtcgcctcaatgtgggactcgcttggggaggaacagaaacagagtagtccggaccagggcgagactaagtcaactcaggctaatccgccagcaaagatgctgcctcccaagcagccaatgtacgctatgcctggtctggcgtctttcttaactccaagtgatctccaagcattccggtcaggagcctcccctgcctccctcgcccgcactctgggcagtaaatcacttctgcccggtttgtcagctagccccccaccccccccaagcttccccctatcgcccacactgcatcagcaacttagtcttcctccccatgctcagggagccctgctgtctccacccgtgtctatgtctccagctccgcaaccaccggtgttgcctactcctatggctctgcaggtccagttggccatgtcaccctcacctccaggcccccaggacttcccacacataagcgagttccccagttcttccggaagttgctcacccggtcccagcaatcctaccagttctggtgattgggatagttcttatccttctggcgagtgcggcatctctacctgcagtctgctgcctagagataagtctttgtacctgacatag

SEQ ID NO: 39509 - DNA, 1467 bp, Artificial Sequence
  derived and/or modified sequence
atgcagcagaccaggacagaggccgtggccggggccttcagccgctgcctgggcttctgtggcatgaggctgggcctgctgctgctggcccggcactggtgcatcgccggggtcttcccccagaagtttgatggagacagcgcctacgtgggcatgtctgatggcaaccctgagctgctgagcaccagccagacctacaacggccagagtgaaaataatgaagattatgagatcccccccatcaccccacccaacctgcctgagcccagcctgctgcacctgggggaccacgaggccagctaccacagcctgtgccacggcctgaccccaaatggcctgctgcctgcctacagctaccaggccatggacctgcctgccatcatggtgagcaacatgctggcccaggacagccacctgctgagcggccagctgcccaccatccaggagatggtgcacagcgaggtggccgcctatgacagcggccggcccggccccctgctgggccggcctgccatgctggccagccacatgtctgccctgagccagagccagctgatcagccagatgggcatccgcagcagcatcgcccacagcagccccagccccccaggcagcaagagcgccacccccagccccagcagcagcacccaggaggaggagagcgaggtgcacttcaagatcagcggggagaagaggcccagcgctgaccccgggaagaaggccaagaaccccaagaagaagaagaagaaggaccccaatgagccccagaagcctgtgtctgcctatgccctcttcttccgggacacccaggccgccatcaagggccagaaccccagcgccacctttggagatgtgtccaagatcgtggcctccatgtgggacagcctgggggaggagcagaagcagagcagcccagaccagggcgagaccaagagcacccaggccaaccccccagccaagatgctgccccccaagcagcccatgtatgccatgcctggcctggccagcttcctgacccccagcgacctgcaggccttccgcagcggggccagccctgccagcctggcccggaccctgggcagcaagagcctgctgcccggcctgagcgccagccccccacctcctccttccttccccctgagccccaccctgcaccagcagctgagcctgccccctcatgcccagggcgccctgctgagcccccctgtgtccatgagccctgccccccagccccctgtgctgcccacccccatggccctgcaggtgcagctggccatgagccccagccccccaggcccccaggacttcccccacatcagcgagttccccagcagcagcggcagctgcagccctggccccagcaaccccaccagcagcggggactgggacagcagctaccccagcggggagtgtggcatcagcacctgcagcctgctgccccgggacaagagcctgtacctgacctag

SEQ ID NO: 39510 - DNA, 1467 bp, Artificial Sequence
  derived and/or modified sequence
atgcagcagacccggaccgaggccgtggccggcgccttcagccggtgcttgggattctgtggcatgagactcggcctcctactcctcgctagacactggtgcatcgcaggggtcttccctcagaaattcgacggggactccgcttacgtgggtatgtctgacggcaatccggagctgctgtctacttctcagacctacaatgggcagtccgagaataacgaagattacgagattccacccatcaccccccctaatctgcccgaaccatctctgctgcatttaggcgatcacgaagcttcctatcactccctctgccacgggctgacacctaacgggttactaccggcatattcctaccaggctatggatcttcccgccatcatggtgtctaatatgctagcccaggattcccatcttttaagcggacagctgccaacgatacaggagatggttcactccgaggtagcagcttatgacagtgggcgcccgggtccactcctcggccgtcccgcaatgttagcaagccacatgagcgctctcagccaatctcagcttatttcgcagatgggcatccgctcctctattgctcacagctctcccagtcctcccggctctaagagcgctactccttctccttcctcgagcacacaggaggaagagagtgaagtgcactttaaaatcagcggtgaaaaacgaccttccgcagaccccggcaaaaaggctaaaaatcccaaaaagaagaaaaagaaggatcccaacgagccccagaagcccgtgtccgcctatgcgctgttcttccgagatacccaagccgccattaaaggccaaaatccctccgcaacttttggagatgtgtctaaaatcgtagcgtcaatgtgggactctttgggagaggaacagaaacaaagctcgcccgaccagggagagacaaagagcacgcaggccaatccaccagccaagatgctgccacccaaacagcctatgtatgccatgccgggtcttgcaagctttctcactccaagcgatctgcaggccttccggtctggcgccagtccagccagtttggccagaactctcggttcaaagtcactgttacccggtctcagcgcatcccctccacctcctcctagctttccactgtcacccaccctgcaccaacagctctcccttccacctcatgctcagggagctctgctctctccacccgtgtccatgtcacccgcaccccaaccccccgtgctacctacccccatggccctgcaggtacagctcgccatgagcccgtctccccctggcccccaggacttcccgcacatctccgagtttccttcctcctctggttcatgtagtccagggccatccaatccaacatcttcaggggattgggatagttcttacccttctggagagtgcgggatctctacttgcagtttgttaccaagggacaaatcgctatatttgacgtag

SEQ ID NO: 39511 - DNA, 2605 bp, Artificial Sequence
  derived and/or modified sequence
accaggagctccgaacacgcaggcccaaattggaataggagatggattttgataaaagaggttaaataacaggtttttccatttcaccttatacgaatgggatggggggtgggggtgctgggcctccagccaatagaggaccaagagttgtcaggagggcttataaagcttgctatttctggcattttttcctctttctctgctgattatgcagcagactcgcacagaggctgtcgcgggcgcgttctctcgctgcctgggcttctgtggaatgagactcgggctccttctacttgcaagacactggtgcattgcaggtgtgtttccgcagaagtttgatggtgacagtgcctacgtggggatgagtgacggaaacccagagctcctgtcaaccagccagacctacaacggccagagcgagaacaacgaagactatgagatccccccgataacacctcccaacctcccggagccatccctcctgcacctgggggaccacgaagccagctaccactcgctgtgccacggcctcacccccaacggtctgctccctgcctactcctatcaggccatggacctcccagccatcatggtgtccaacatgctagcacaggacagccacctgctgtcgggccagctgcccacgatccaggagatggtccactcggaagtggctgcctatgactcgggccggcccgggcccctgctgggtcgcccggcaatgctggccagccacatgagtgccctcagccagtcccagctcatctcgcagatgggcatccggagcagcatcgcccacagctccccatcaccgccggggagcaagtcagcgaccccctctccctccagctccactcaggaagaggagtcggaagtgcatttcaagatctcgggagaaaagagaccttcagccgacccaggaaaaaaggccaagaacccgaagaagaagaaaaagaaggaccccaatgagccgcagaagcctgtgtcggcctacgcactcttcttcagagacactcaggccgccatcaagggtcagaaccccagtgccactttcggtgacgtgtccaaaatcgtggcctccatgtgggacagcctgggagaggaacagaagcagagctccccagatcaaggtgagaccaagagcactcaggcaaacccaccagccaaaatgctcccacccaagcagcccatgtatgccatgccaggcctggcctccttcctgacgccgtcggacctgcaggccttccgcagtggggcctcccctgccagcctcgcccggacgctgggctccaagtctctgctgccaggcctcagtgcgtccccgccgccgccaccctccttcccgctcagccccacactgcaccagcagctgtcactgccccctcacgcccagggcgccctcctcagtccacctgttagcatgtccccagccccccagccccctgtcctgcccacccccatggcactccaggtgcagctggcgatgagcccctcacctccagggccacaggacttcccgcacatctctgagttccccagcagctcgggatcctgctcacctggcccatccaaccccaccagcagcggggactgggacagcagctaccccagtggggagtgtggcatcagcacctgcagcctgctccccagggacaaatcgctctacctcacctaatcccgcctccctaccatccctgaggctcgctggaaggcactgctcagagcctgaagggctgacagcagaaaagaggccctggccagaggcagggtggcccatcggagagagcagtgacacacccattgcccgggggctgagtctcttcctcaacctcccaccagactctgcagaggcagcccactgcccaccaccagcccaaagaacctgcaggaaccttccgcccgctgacctgcttgctccagggtaactgtggaccctgtcctcgccctgcgcacggtaccctatgtctggacacccggccccagctccagccccagcccaggtgggccgcccctggcggggtcgcttaccaacggacacccaccccagatgcatgggccagagggccggcccccggcatagatgtgcacatcggttttccagtgtgaacaaaagattacgaaacctagaaactgttggttccgtgtaagtagttgactacgtgttttagaactgtgctgaagacatctgtaagactattttgtgggggaaaaaagtagtttcctttaaggtaaaaagcattttatatgatccttagcacatttttaagttttatcttaagggagacgcgcacaaaagcggctgccaaaccgtttcgtcatcctcacagcaaggaccggacgcttgctagccaccccggagcactgctctccttttaatcatgtattcatctattttaaattgccggcgacgacttttgtctatttatgaagaaaccttgagaacgaagttacagcttatcctaccgtgtgtgtggttttggggtttcgtttgggtttgggttcttgacgtcgtttgcagctgtttcctggccctggcgagtgtctgtcttggtgcccagtgcttctctcaaatctctttataataaaacttctgaaaagctgaaaa

SEQ ID NO: 39512 - DNA, 1467 bp, Artificial Sequence
  derived and/or modified sequence
atgcaacagactcgaaccgaggctgtggcaggggcattctctagatgtctcggattttgtggcatgagactcggcctgcttctgttagcgcgtcactggtgtatcgcaggggtatttccacagaaattcgacggtgactctgcttatgtcggcatgagtgatggaaaccccgagctccttagtacgtcccagacatataacggccagtccgagaataacgaagattacgagatccccccaatcacaccacccaatctccctgaacctagtctattgcatttgggcgaccacgaagcatcttaccactcactttgtcacgggctcacccctaatgggcttctacctgcatatagttatcaggccatggacctgccagctataatggtgagcaacatgctcgcccaggattctcatctgttgtcgggtcagctgccaacaatccaggagatggtgcactccgaggtggctgcgtacgacagcggcagacccggaccacttctcggacgccctgcaatgctggcaagccacatgagcgcactatcacagtcacaattaatctcccaaatggggatccgctccagcatcgcccatagttcaccctcccccccaggatctaaatcagcaaccccctctcctagctcatctactcaggaggaggagtccgaggtccactttaaaatcagcggggaaaaacggccaagcgcagatcccggtaagaaggcaaaaaatcccaaaaaaaaaaagaaaaaagaccctaatgaaccccagaagccggtatctgcatacgcattattttttcgcgacacgcaggcagcaattaagggacaaaatccaagcgcaaccttcggagatgtgtccaagatcgtcgccagtatgtgggactcccttggggaagagcagaagcagtcctctccagaccagggagaaacaaagagtactcaagcgaatccaccagcaaaaatgctccctccgaagcagcccatgtatgcaatgcccggactcgcttcattcctgacgccttccgatctgcaagcgttcaggtctggcgcatctccagcctcgctcgccaggacactgggaagtaaatcactgcttcccggtctgtccgcgagtcctccccctccgcctagttttccgctgagtcctacccttcaccagcagttgtctctgcctcctcatgcccagggagcgctgctcagccccccagtgtctatgagtccggcaccccagcctccggttttacccacacccatggcactccaggtccaactagcgatgagtccctccccacctggaccccaggatttcccacacatcagcgaatttccgtcatctagtggctcatgttctccaggcccatctaaccccacgtcctccggtgactgggactcctcttatccttctggcgagtgtgggatctctacatgtagcctgttgccacgtgacaagtctctctacctgacctag

SEQ ID NO: 39513 - DNA, 1467 bp, Artificial Sequence
  derived and/or modified sequence
atgcagcagaccagaaccgaggccgtggccggcgccttcagcagatgcctgggcttctgcggcatgagactgggcctgctgctgctggccagacactggtgcatcgccggcgtgttcccccagaagttcgacggcgacagcgcctacgtgggcatgagcgacggcaaccccgagctgctgagcaccagccagacctacaacggccagagcgagaacaacgaggactacgagatcccccccatcaccccccccaacctgcccgagcccagcctgctgcacctgggcgaccacgaggccagctaccacagcctgtgccacggcctgacccccaacggcctgctgcccgcctacagctaccaggccatggacctgcccgccatcatggtgagcaacatgctggcccaggacagccacctgctgagcggccagctgcccaccatccaggagatggtgcacagcgaggtggccgcctacgacagcggcagacccggccccctgctgggcagacccgccatgctggccagccacatgagcgccctgagccagagccagctgatcagccagatgggcatcagaagcagcatcgcccacagcagccccagcccccccggcagcaagagcgccacccccagccccagcagcagcacccaggaggaggagagcgaggtgcacttcaagatcagcggcgagaagagacccagcgccgaccccggcaagaaggccaagaaccccaagaagaagaagaagaaggaccccaacgagccccagaagcccgtgagcgcctacgccctgttcttcagagacacccaggccgccatcaagggccagaaccccagcgccaccttcggcgacgtgagcaagatcgtggccagcatgtgggacagcctgggcgaggagcagaagcagagcagccccgaccagggcgagaccaagagcacccaggccaacccccccgccaagatgctgccccccaagcagcccatgtacgccatgcccggcctggccagcttcctgacccccagcgacctgcaggccttcagaagcggcgccagccccgccagcctggccagaaccctgggcagcaagagcctgctgcccggcctgagcgccagccccccccccccccccagcttccccctgagccccaccctgcaccagcagctgagcctgcccccccacgcccagggcgccctgctgagcccccccgtgagcatgagccccgccccccagccccccgtgctgcccacccccatggccctgcaggtgcagctggccatgagccccagcccccccggcccccaggacttcccccacatcagcgagttccccagcagcagcggcagctgcagccccggccccagcaaccccaccagcagcggcgactgggacagcagctaccccagcggcgagtgcggcatcagcacctgcagcctgctgcccagagacaagagcctgtacctgacctag

SEQ ID NO: 39514 - protein, 739 aa, Artificial Sequence
  derived and/or modified sequence
MAEGSFSVQSESYSVEDMDEGSDEVGEEEMVEGNDYEEFGAFGGYGTLTSFDIHILRAFGSLGPGLRILSNEPWELENPVLAQTLVEALQLDPETLANETAARAANVARAAASNRAARAAAAAARTAFSQVVASHRVATPQVSGEDTQPTTYAAEAQGPTPEPPLASPQTSQMLVTSKMAAPEAPATSAQSQTGSPAQEAATEGPSSACAFSQAPCAREVDANRPSTAFLGQNDVFDFTQPAGVSGMAFPRPKRPAPAQEAATEGPSAASGVPQTGPGREVAATRPKTTKSGKALAKTRWVEPQNVVAAAAAKAKMATSIPEPEGAAAATAQHSAEPWARMGGKRTKKSKHLDDEYESSEEERETPAVPPTWRASQPSLTVRAQLAPRPPMAPRSQIPSRHVLCLPPRNVTLLQERANKLVKYLMIKDYKKIPIKRADMLKDVIREYDEHFPEIIERATYTLEKKFGIHLKEIDKEEHLYILVCTRDSSARLLGKTKDTPRLSLLLVILGVIFMNGNRASEAVLWEALRKMGLRPGVRHPFLGDLRKLITDDFVKQKYLEYKKIPNSNPPEYEFLWGLRARHETSKMRVLRFIAQNQNRDPREWKAHFLEAVDDAFKTMDVDMAEEHARAQMRAQMNIGDEALIGRWSWDDIQVELLTWDEDGDFGDAWARIPFAFWARYHQYILNSNRANRRATWRAGVSSGTNGGASTSVLDGPSTSSTIRTRNAARAGASFFSWIQ

SEQ ID NO: 39515 - protein, 931 aa, Artificial Sequence
  derived and/or modified sequence
MRALVLLGCLLASLLFSGQAELQVSASGGTEDVGNLLENHFSAGDASLEEKERALYADTAPQDKKLLLHYPDGREAESPKKTPASAASAGPDPEASLSNASATESPPPGERDDRDAAGPGEEKNGPPVASALPPGGAKGPVEEEWPEPSSGEGQGEEETGFGLPTEGTASGEAGGQAGGHELPEEVQEVQGDSLVQGAVAGTAEPKAEGASPHSEGDGVGPLNAEAEGSPGPGEEPAVPEGAPDVAAVGGESEPDIDTQASEGTEDQGEPGPAAEASAEPGGAQSVKAGDTEENQSPEMTEEDADEASSEEESGDGSGSEEEGGVPSEEESEEDSGDGASSEEAEGASEEATEPQEAGEPQEAREPQEGGDLQEAEESQEGGDPQEAEEPQEGGAPQEGGEPQEGGDPQEAREPQEAREPQEGAELPEATGTTSHRDRGAQPGPEELNTESMGSETLDMKAEEPEEGHQRESPIIVAQEETEDANEEAPLRDRSHIEKTLMLNEDKPSDDYSAVLQRLRKIYHSSIKPLEQSYKYNELRQHEITDGEITSKPMVLFLGPWSVGKSTMINYLLGLENTRYQLYTGAEPTTSEFTVLMHGPKLKTIEGIVMAADSARSFSPLEKFGQNFLEKLIGIEVPHKLLERVTFVDTPGIIENRKQQERGYPFNDVCQWFIDRADLIFVVFDPTKLDVGLELEMLFRQLKGRESQIRIILNKADNLATQMLMRVYGALFWSLAPLINVTEPPRVYVSSFWPQEYKPDTHQELFLQEEISLLEDLNQVIENRLENKIAFIRQHAIRVRIHALLVDRYLQTYKDKMTFFSDGELVFKDIVEDPDKFYIFKTILAKTNVSKFDLPNREAYKDFFGINPISSFKLLSQQCSYMGGCFLEKIERAITQELPGLLGSLGLGKNPGALNCDKTGCSETPKNRYRKH

SEQ ID NO: 39516 - protein, 473 aa, Artificial Sequence
  derived and/or modified sequence
MRALVLLGCLLASLLFSGQAEETEDANEEAPLRDRSHIEKTLMLNEDKPSDDYSAVLQRLRKIYHSSIKPLEQSYKYNELRQHEITDGEITSKPMVLFLGPWSVGKSTMINYLLGLENTRYQLYTGAEPTTSEFTVLMHGPKLKTIEGIVMAADSARSFSPLEKFGQNFLEKLIGIEVPHKLLERVTFVDTPGIIENRKQQERGYPFNDVCQWFIDRADLIFVVFDPTKLDVGLELEMLFRQLKGRESQIRIILNKADNLATQMLMRVYGALFWSLAPLINVTEPPRVYVSSFWPQEYKPDTHQELFLQEEISLLEDLNQVIENRLENKIAFIRQHAIRVRIHALLVDRYLQTYKDKMTFFSDGELVFKDIVEDPDKFYIFKTILAKTNVSKFDLPNREAYKDFFGINPISSFKLLSQQCSYMGGCFLEKIERAITQELPGLLGSLGLGKNPGALNCDKTGCSETPKNRYRKH

SEQ ID NO: 39517 - protein, 431 aa, Artificial Sequence
  derived and/or modified sequence
MLNEDKPSDDYSAVLQRLRKIYHSSIKPLEQSYKYNELRQHEITDGEITSKPMVLFLGPWSVGKSTMINYLLGLENTRYQLYTGAEPTTSEFTVLMHGPKLKTIEGIVMAADSARSFSPLEKFGQNFLEKLIGIEVPHKLLERVTFVDTPGIIENRKQQERGYPFNDVCQWFIDRADLIFVVFDPTKLDVGLELEMLFRQLKGRESQIRIILNKADNLATQMLMRVYGALFWSLAPLINVTEPPRVYVSSFWPQEYKPDTHQELFLQEEISLLEDLNQVIENRLENKIAFIRQHAIRVRIHALLVDRYLQTYKDKMTFFSDGELVFKDIVEDPDKFYIFKTILAKTNVSKFDLPNREAYKDFFGINPISSFKLLSQQCSYMGGCFLEKIERAITQELPGLLGSLGLGKNPGALNCDKTGCSETPKNRYRKH

SEQ ID NO: 39518 - DNA, 2796 bp, Artificial Sequence
  derived and/or modified sequence
atgcgagccttagttttgctcggctgtctgctggcaagtcttttgttcagtggacaggccgaactgcaggtctcagcgagtggcgggactgaggatgtgggaaatctcttagagaaccattttagcgcaggggatgcgtccctcgaggagaaagagagagccctctacgcagataccgccccccaagacaaaaagctgctcctccactacccagacggacgtgaagctgaatctcccaaaaagacacctgctagtgccgccagtgccgggccggacccggaagcgagcctttcaaatgcttctgctacagagagtcctccgcctggagagcgagacgatcgagatgccgcgggtccaggtgaagagaaaaatggcccccccgtggcttctgcattacctcctggtggggcaaaagggcccgtggaggaagaatggcctgaacctagtagcggagaaggccaaggcgaggaagaaactggctttggactccctactgaggggacagcttctggcgaggctgggggtcaggcaggggggcatgagttaccagaagaggtgcaagaggtccagggagatagcttagttcagggagctgttgccggcactgcagagcccaaagccgagggcgcaagcccacattccgagggagatggcgtcggacccctgaatgccgaggccgagggttctcctggtcctggcgaagaacctgccgtacccgagggcgcacctgacgtagcggccgtaggtggagaatccgaaccagacatcgatactcaggccagcgagggcaccgaagatcagggcgagccaggacctgcagccgaggcgtcagcagaacccggcggtgcccagagcgtcaaggccggcgataccgaggagaaccagtcaccggaaatgacagaagaggatgccgacgaagcttcctccgaggaggaatcaggcgacggcagtggatccgaggaagaggggggcgtgccttccgaagaggagtctgaagaggacagcggagatggcgccagctcagaggaagccgaaggcgccagcgaggaagctaccgagccccaagaggcaggagagccccaggaggcacgtgaaccacaagaggggggggatctgcaggaagctgaggaatctcaagagggtggcgatccccaagaggcggaggagcctcaggagggaggtgcaccacaggaggggggcgaacctcaggagggcggggatccccaagaggcaagggaaccccaggaggctagggagccccaagagggggccgagcttcccgaagccaccggcaccacaagccatagggacaggggtgcccaaccgggtccggaggagctaaacacggagagcatgggctccgagacactggatatgaaagcagaagagccagaagaaggacatcaacgtgagagccctattattgtggcccaggaggaaacagaggatgcaaacgaggaggcgcccttgagagatcgctcccatattgagaagaccctgatgctgaacgaagacaagccctccgatgattactctgccgtgctgcagcggctgcggaaaatctatcactcaagcattaaacctctcgagcagtcctacaagtataacgagctgcgccagcacgaaatcaccgacggcgagatcacatccaaaccgatggtactgtttctgggtccgtggtccgtaggaaaaagtacaatgattaattacctccttggcttagaaaacactcggtatcagctgtacaccggagccgagcccaccacctcagagtttactgtgctgatgcatggcccgaaactgaaaacaattgagggcatagtgatggcggcggactccgcaaggtcttttagcccactggagaaatttggccagaatttcctcgaaaagctgattggaattgaagtaccacataagcttttggaacgcgttacattcgtagatacgccaggcatcatcgaaaaccgcaagcagcaggagagaggttatcccttcaatgacgtttgccagtggttcatcgatcgggcagatctcattttcgtggtcttcgaccctacgaaactcgacgtgggattagagttggagatgctttttcggcagctcaagggccgggagagccaaattcgcatcattcttaacaaagccgacaatcttgcaacccagatgctgatgcgcgtctacggtgccttgttttggtccctggcaccactcattaatgtaaccgagccacctagagtttacgtgagcagcttctggccacaagaatataaacctgatacacatcaggagctcttcctacaggaggaaatctcccttttggaggatctgaatcaggtgattgagaaccgcctcgaaaacaagatcgcctttatccgacagcatgcaattagggtgcgcattcatgcgctgctggtggaccgataccttcagacatacaaggacaagatgacattcttctctgatggcgagttggtatttaaagacatagtcgaggatcctgacaagttttatattttcaaaacaatcctcgccaaaactaacgtcagtaaatttgacctgcccaaccgggaggcgtataaagacttttttggaatcaatcccatatcgagttttaagctgctgtctcagcagtgttcttacatggggggctgtttccttgaaaagatagaacgcgctatcacgcaggagctccccggactattggggagcttagggcttgggaaaaacccgggtgctctgaactgcgacaaaacggggtgctcagagacgcccaagaatcggtataggaaacactag

SEQ ID NO: 39519 - DNA, 1422 bp, Artificial Sequence
  derived and/or modified sequence
atgcgggcgttggttctgctcggatgcctcctggcatctttgctgtttagtggacaggcagaggagacagaggacgccaatgaagaagctcctcttcgagataggtcccacatcgagaaaactctaatgctgaacgaggataagccctcagacgactatagtgcagttctgcagagacttcgcaagatataccactcctctatcaagccgttggagcaatcttacaagtacaacgaactgcgccaacacgaaattactgacggagaaattacaagtaaacccatggtgctgtttctgggtccttggagcgtgggtaagagcacaatgatcaactatttgttaggcctggagaataccagataccaactgtacacaggtgcagaaccaactacgagtgaattcaccgtgctaatgcacggacctaaattaaaaactatagaaggtatagtaatggccgccgattctgcaaggtctttctccccattagaaaagttcgggcagaacttcttagagaagctcatcgggattgaagtgccacacaagctgctggagagagtgacattcgtggatacacctggcatcattgagaatcggaaacagcaagagagaggctatccctttaatgacgtgtgccaatggtttattgatagggccgatttaatcttcgttgtctttgatcccactaagctagatgtaggcctggagttagaaatgctctttagacagttgaaagggcgagaaagccagatcagaattattcttaacaaagccgacaacctggcaacacaaatgttgatgagggtgtacggggctctgttttggagcctcgcacctctgatcaatgtcacggagcctccaagggtctatgtgagttctttctggccacaagagtataagccagacacacaccaagaactgttcctgcaggaggagatatccctgctggaggatctgaatcaggtcatcgagaaccgccttgaaaataagattgcattcatcaggcagcacgccatacgagtgcgcattcatgccttgctggtggacaggtatctacaaacatataaagacaagatgactttctttagcgacggggagctcgtctttaaggacatagtcgaagacccggataagttctatatctttaaaacaatactagcgaagacgaacgttagcaagttcgatttgccaaacagggaggcatacaaggactttttcggaataaatcccatctctagtttcaagctcctctcccagcaatgcagttacatgggaggctgttttctcgaaaaaattgagcgggcgattactcaggagctgcctgggttgttagggtctcttggactgggtaagaatcctggagccttgaactgtgacaagacaggctgctcagagacgccaaaaaaccggtatcgcaagcattag

SEQ ID NO: 39520 - DNA, 1296 bp, Artificial Sequence
  derived and/or modified sequence
atgctgaacgaagacaaacccagcgacgattactccgccgttcttcaaagacttcgaaaaatctatcattcatctatcaaacccctagaacagtcttacaaatacaatgagctgcggcaacatgaaattactgatggagagatcactagtaaacctatggtgctctttctgggaccctggagtgtcggcaaatcaactatgattaactacttattgggactggaaaacacgagatatcagctgtacaccggagcagagcctaccactagcgagtttaccgtgttgatgcatggtcccaaactgaagacaatcgaaggaatcgtgatggctgccgatagcgcaaggagcttttcacccttggaaaagttcggccagaatttcttagaaaagttgatcggcattgaagttccccacaagctgctggagcgggtcaccttcgttgacacccctggcataattgagaatagaaagcagcaggagcgcggatatccgttcaacgacgtctgccagtggttcatcgacagggcagatttgatcttcgtggtatttgatcccaccaagctggatgtgggtcttgaattggagatgctgtttcgtcagctcaaggggcgtgagtcacagattaggatcatcttgaataaagccgacaatctcgctacacagatgctcatgagggtgtacggcgccctcttttggtcactagcgccccttataaacgtcaccgagcctccccgggtctatgtaagctcattctggccacaggaatacaaaccggacactcatcaggagctgtttctgcaggaagagatctctttgttggaggacctgaatcaggtgattgaaaatcgcttggagaacaaaatcgccttcatccggcagcacgcaatccgcgtacgcatccacgctctgttggtggatagatatttgcagacctataaagataagatgacctttttcagcgatggagagctcgtctttaaagatattgtagaggatcctgacaagttctatattttcaaaaccattcttgcaaaaaccaatgtgagcaaatttgacctgcccaatagggaagcctataaagacttcttcgggattaatcccatcagttcctttaaattgctatctcagcagtgcagctatatgggcggatgctttcttgaaaaaatcgaacgtgccatcacacaggagctgcctgggctcctgggcagcctggggctcggaaaaaatccaggtgcacttaactgtgacaaaactggctgctctgagacccccaagaataggtaccggaaacattag

SEQ ID NO: 39521 - DNA, 2796 bp, Artificial Sequence
  derived and/or modified sequence
atgagggccctggtgctgctgggctgcctgctggccagcctgctcttcagcggccaggccgagctgcaggtgtctgccagcggcggcacagaagatgtgggcaacctgctggagaaccacttctctgctggagatgccagcctggaggagaaggagcgggccctgtatgctgacacagccccccaggacaagaagctgctgctgcactacccagatggccgggaggccgagagccccaagaagaccccagccagcgctgccagcgctggccctgaccctgaggccagcctgagcaatgccagcgccacagagagccccccacctggagagagagatgacagagatgctgctggccctggagaggagaagaatggcccccctgtggccagcgccctgcccccaggaggagccaagggccctgtggaggaggagtggccagagcccagcagcggggagggccagggcgaggaggagactggatttggcctgcccacagagggcacagccagcggggaggccggcggccaggccggcggccacgagctgcctgaggaggtgcaggaggtgcagggcgacagcctggtgcagggcgctgtggccggcacagctgagcccaaggccgagggcgccagcccccacagtgaaggagatggagtgggccccctgaatgctgaggccgagggcagccctggccctggagaggagcctgctgtgcctgagggcgccccagatgtggccgctgtgggcggggagagcgagccagacatcgacacccaggccagcgagggcacagaggaccagggcgagcccggccctgctgctgaggccagcgctgagcccggcggggcccagagcgtgaaggccggggacacagaggagaaccagagccctgagatgacagaggaggatgctgatgaggccagcagcgaggaggagagcggagatggcagcggcagcgaggaggagggcggcgtgcccagcgaggaggagagtgaagaagattctggagatggagccagcagcgaggaggccgagggcgccagcgaggaggccacagagccccaggaggccggggagccccaggaggcccgggagccccaggagggcggggacctgcaggaggccgaggagagccaggagggcggggacccccaggaggccgaggagccccaggagggcggggccccccaggagggcggggagccccaggagggcggggacccccaggaggcccgggagccccaggaggcccgggagccccaggagggcgctgagctgcctgaggccaccggcaccaccagccaccgggacagaggagcccagcccggccctgaggagctgaacacagagagcatgggcagcgagaccctggacatgaaggccgaggagcctgaggagggccaccagcgggagagccccatcatcgtggcccaggaggagacagaagatgccaatgaggaggcccccctgcgggacaggagccacatcgagaagaccctgatgctgaatgaagacaagcccagtgatgactacagcgctgtgctgcagaggctgaggaagatctaccacagcagcatcaagcccctggagcagagctacaagtacaatgagctgcggcagcacgagatcacagatggagagatcaccagcaagcccatggtgctcttcctgggcccctggagcgtgggcaagagcaccatgatcaactacctgctgggcctggagaacacccgctaccagctgtacacaggagctgagcccaccaccagcgagttcaccgtgctgatgcacggccccaagctgaagaccatcgagggcatcgtgatggctgctgacagcgcccggagcttcagccccctggagaagtttggccagaacttcctggagaagctgattggcatcgaggtgccccacaagctgctggagcgggtgacctttgtggacaccccaggcatcatcgagaacaggaagcagcaggagcggggctaccccttcaatgatgtgtgccagtggttcatcgacagagctgacctgatctttgtggtgtttgaccccaccaagctggatgtgggcctggagctggagatgctgttccggcagctgaagggccgggagagccagatccgcatcatcctgaacaaggctgacaacctggccacccagatgctgatgagggtgtatggagccctcttctggagcctggcccccctcatcaacgtgacagagcccccccgggtgtatgtgagcagcttctggccccaggagtacaagccagacacccaccaggagctgttcctgcaggaggagatcagcctgctggaggacctgaaccaggtgattgaaaatcggctggagaacaagatcgccttcatccggcagcacgccatccgggtgcgcatccacgccctgctggtggaccgctacctgcagacctacaaggacaagatgaccttcttcagtgatggagagctggtgttcaaggacatcgtggaggaccctgacaagttctacatcttcaagaccatcctggccaagaccaacgtgtccaagtttgacctgcccaaccgggaggcctacaaggacttcttcggcatcaaccccatcagcagcttcaagctgctgagccagcagtgcagctacatgggcggctgcttcctggagaagattgagcgggccatcacccaggagctgcccggcctgctgggcagcctgggcctgggcaagaaccctggggccctgaactgtgacaagacaggctgcagcgagacccccaagaaccgctacaggaagcactag

SEQ ID NO: 39522 - DNA, 1422 bp, Artificial Sequence
  derived and/or modified sequence
atgagggccctggtgctgctgggctgcctgctggccagcctgctcttcagcggccaggccgaggagacagaagatgccaatgaggaggcccccctgcgggacaggagccacatcgagaagaccctgatgctgaatgaagacaagcccagtgatgactacagcgctgtgctgcagaggctgaggaagatctaccacagcagcatcaagcccctggagcagagctacaagtacaatgagctgcggcagcacgagatcacagatggagagatcaccagcaagcccatggtgctcttcctgggcccctggagcgtgggcaagagcaccatgatcaactacctgctgggcctggagaacacccgctaccagctgtacacaggagctgagcccaccaccagcgagttcaccgtgctgatgcacggccccaagctgaagaccatcgagggcatcgtgatggctgctgacagcgcccggagcttcagccccctggagaagtttggccagaacttcctggagaagctgattggcatcgaggtgccccacaagctgctggagcgggtgacctttgtggacaccccaggcatcatcgagaacaggaagcagcaggagcggggctaccccttcaatgatgtgtgccagtggttcatcgacagagctgacctgatctttgtggtgtttgaccccaccaagctggatgtgggcctggagctggagatgctgttccggcagctgaagggccgggagagccagatccgcatcatcctgaacaaggctgacaacctggccacccagatgctgatgagggtgtatggagccctcttctggagcctggcccccctcatcaacgtgacagagcccccccgggtgtatgtgagcagcttctggccccaggagtacaagccagacacccaccaggagctgttcctgcaggaggagatcagcctgctggaggacctgaaccaggtgattgaaaatcggctggagaacaagatcgccttcatccggcagcacgccatccgggtgcgcatccacgccctgctggtggaccgctacctgcagacctacaaggacaagatgaccttcttcagtgatggagagctggtgttcaaggacatcgtggaggaccctgacaagttctacatcttcaagaccatcctggccaagaccaacgtgtccaagtttgacctgcccaaccgggaggcctacaaggacttcttcggcatcaaccccatcagcagcttcaagctgctgagccagcagtgcagctacatgggcggctgcttcctggagaagattgagcgggccatcacccaggagctgcccggcctgctgggcagcctgggcctgggcaagaaccctggggccctgaactgtgacaagacaggctgcagcgagacccccaagaaccgctacaggaagcactag

SEQ ID NO: 39523 - DNA, 1296 bp, Artificial Sequence
  derived and/or modified sequence
atgctgaatgaagacaagcccagtgatgactacagcgctgtgctgcagaggctgaggaagatctaccacagcagcatcaagcccctggagcagagctacaagtacaatgagctgcggcagcacgagatcacagatggagagatcaccagcaagcccatggtgctcttcctgggcccctggagcgtgggcaagagcaccatgatcaactacctgctgggcctggagaacacccgctaccagctgtacacaggagctgagcccaccaccagcgagttcaccgtgctgatgcacggccccaagctgaagaccatcgagggcatcgtgatggctgctgacagcgcccggagcttcagccccctggagaagtttggccagaacttcctggagaagctgattggcatcgaggtgccccacaagctgctggagcgggtgacctttgtggacaccccaggcatcatcgagaacaggaagcagcaggagcggggctaccccttcaatgatgtgtgccagtggttcatcgacagagctgacctgatctttgtggtgtttgaccccaccaagctggatgtgggcctggagctggagatgctgttccggcagctgaagggccgggagagccagatccgcatcatcctgaacaaggctgacaacctggccacccagatgctgatgagggtgtatggagccctcttctggagcctggcccccctcatcaacgtgacagagcccccccgggtgtatgtgagcagcttctggccccaggagtacaagccagacacccaccaggagctgttcctgcaggaggagatcagcctgctggaggacctgaaccaggtgattgaaaatcggctggagaacaagatcgccttcatccggcagcacgccatccgggtgcgcatccacgccctgctggtggaccgctacctgcagacctacaaggacaagatgaccttcttcagtgatggagagctggtgttcaaggacatcgtggaggaccctgacaagttctacatcttcaagaccatcctggccaagaccaacgtgtccaagtttgacctgcccaaccgggaggcctacaaggacttcttcggcatcaaccccatcagcagcttcaagctgctgagccagcagtgcagctacatgggcggctgcttcctggagaagattgagcgggccatcacccaggagctgcccggcctgctgggcagcctgggcctgggcaagaaccctggggccctgaactgtgacaagacaggctgcagcgagacccccaagaaccgctacaggaagcactag

SEQ ID NO: 39524 - DNA, 2796 bp, Artificial Sequence
  derived and/or modified sequence
atgcgggccctggtgctgctgggctgcctgctggccagcctgctgttctctggccaggccgagctgcaggtctctgcttcaggcggcactgaagacgtgggaaacttgctcgaaaatcatttttcagcgggggatgcctcccttgaagaaaaagaaagagccctgtacgctgacaccgccccacaagataaaaaactcttactgcactatccagacggtagggaggctgaatctcctaaaaagacccccgcctccgccgcatccgctggcccggatcccgaggcttctctgagcaatgccagcgccaccgagtctccccctcctggagagagggacgacagagatgctgcgggacccggcgaggagaaaaatggaccacctgtcgctagcgcccttcctcccggaggagcaaaagggccagttgaagaggagtggccagaaccctccagcggagaaggtcaaggcgaggaggaaaccggatttggactccctaccgagggtacggcctctggggaagctggggggcaggccgggggacacgagttaccagaggaagtgcaagaagtccagggcgacagtctcgtgcagggcgccgtggctggtacagccgagccaaaggcagagggcgccagtccacatagcgagggggatggcgtagggccactgaacgcggaagcggaaggcagccctgggccaggcgaggagcctgccgtccctgagggagccccagacgttgccgctgttggcggagagtccgaaccagacatcgatacccaggcttctgagggaacagaagatcagggagagccaggccccgccgctgaggcttctgccgaacccggaggtgcccagagcgtcaaggccggcgataccgaggagaaccagtcccccgaaatgacagaagaggacgccgatgaggcgagcagcgaggaggagagcggcgacggatctgggtcagaggaggagggtggcgttccatccgaggaggaatcggaggaagattcaggtgacggcgcatcatctgaagaggccgaaggcgcttccgaggaggcgactgagccacaggaagcaggagagccgcaggaagcccgagagccccaggaaggaggcgacctacaggaggctgaagagtcccaggaaggcggggatccccaggaggcagaggagccccaagagggcggcgcaccgcaggagggcggcgagccccaagaggggggggaccctcaggaggcaagagagccacaggaggcgcgcgagccccaggaaggggccgagcttcccgaggctaccggcacgaccagccatagagatcgcggcgcccagcccggacctgaggaactgaacaccgagtctatgggaagcgagaccctggatatgaaggcagaagagccagaagagggacaccagcgcgagagcccgataatcgttgcccaagaagaaacagaagatgcaaatgaagaggcgccactaagggataggtctcatatcgaaaaaacgctgatgttgaatgaggataagccaagtgatgattatagcgcggtgctgcagcgattaagaaagatataccatagcagcattaagcctctggaacagtcatataaatataatgagctgcgccagcatgaaattacggatggagagatcacctccaaacccatggtcctcttcttggggccctggagtgtaggcaagtccaccatgatcaactacctgctgggtctggagaatacgaggtaccagctatacaccggtgccgagcccacaaccagtgagtttacagtcctgatgcacggaccgaagttgaaaaccatagagggcatcgtcatggccgccgactcagcacgtagctttagccctttggagaaatttggccagaacttcctcgaaaaactgattggaattgaggtcccccacaagttgcttgagcgagtgacctttgttgacaccccggggatcatcgaaaatcggaaacaacaggaacgaggataccctttcaacgacgtgtgccagtggttcatcgaccgcgctgatcttatcttcgtagtattcgacccaacaaaactggatgttggattggaactggagatgttgttcagacaacttaaggggcgggaatcccagatcagaatcatattgaacaaggccgataacctggcaactcagatgctaatgcgtgtgtacggtgccctgttctggagtctcgcccccttaattaatgttacggagccccctcgggtgtatgtgagtagcttctggcctcaggaatataagcccgacacccatcaggaacttttcctgcaggaagaaattagccttctggaagatctgaatcaagtcatcgagaatcgccttgaaaacaagatcgcttttattcggcagcatgccattagggtccggatacacgcactcctggtggatcgctacctccaaacttacaaggacaagatgaccttcttttctgacggagagctagtgttcaaggatatcgttgaagatccagataaattctacattttcaagacaatcctcgccaagaccaacgtgagcaagttcgacctaccaaatagagaggcatacaaggacttttttggaattaatcccatttcttcctttaaactgttgtcgcagcagtgtagctatatgggcggatgctttctagaaaagatcgagcgggccataactcaggaactgcctggactactcggttctctagggctgggaaagaatccaggggccctgaactgcgacaagacagggtgtagtgaaacccctaagaatcgatacaggaagcactag

SEQ ID NO: 39525 - DNA, 1422 bp, Artificial Sequence
  derived and/or modified sequence
atgcgggccctggtgctgctgggctgcctgctggccagcctgctgttttctgggcaggcggaggagaccgaggacgccaacgaggaagctccactgcgggatcgatcccacatcgagaaaacccttatgctaaacgaagataagccttcagatgactatagtgctgtcctccagaggctaaggaagatataccactcatctattaagcctctggagcaatcttataaatacaatgagctgcgacagcacgagatcaccgacggcgaaataacctcaaagcctatggtcttgtttctcggcccctggtcagttgggaaatccaccatgattaactatctgttaggcctggagaacactcgctatcaactctacacgggcgcagagcctacaactagcgaatttacagtgctcatgcacggccccaaactcaaaaccattgaaggcatcgtgatggccgcagactccgccaggagctttagcccactggagaaatttgggcagaactttctggagaagctgatcgggatcgaggtgcctcacaaattgctcgagcgggtgacttttgtggacactcctggcattatcgaaaatcgaaagcagcaggagagaggatatccgttcaacgacgtttgccagtggttcatcgatagggccgatcttatctttgtagtattcgatccaaccaaattggacgtgggcctcgaactcgaaatgctctttcgccagctcaaggggcgggagtcccagatccgcatcatcctgaataaagctgacaatctggcaacgcagatgctaatgcgcgtgtacggcgcactcttctggtctctcgcacccttgatcaatgtgaccgagcctccaagagtttatgtcagctcattttggcctcaggagtataagccggatacccaccaggagcttttcttgcaggaggagataagtctcctggaggacttgaatcaggtgattgagaatagactggaaaacaagattgccttcataaggcagcacgccatcagagttagaattcacgctcttctggtggatcgctacctccagacctacaaagataagatgacatttttctccgacggcgaacttgtttttaaagacattgtggaagacccagataaattttatatctttaaaaccatcctggcaaaaaccaacgtaagtaaattcgacctgccaaatagggaggcctataaagacttttttgggatcaacccaatctctagtttcaagcttctcagtcagcagtgtagctacatgggagggtgcttcctggagaagattgagcgggccataacgcaggagcttccagggctgctcggctctctgggcttggggaagaatccaggcgcactgaactgcgacaagaccggctgcagcgagaccccaaagaatagatataggaagcactag

SEQ ID NO: 39526 - DNA, 1296 bp, Artificial Sequence
  derived and/or modified sequence
atgctgaacgaggacaagcccagcgacgactacagcgccgtgctgcagcggctccgtaagatttatcattcgtctatcaagcccctggaacagtcatataagtacaatgagttgagacagcatgaaattacagatggagagatcacctcgaaacccatggtgctgttcctgggtccttggtccgttgggaagagtactatgatcaactatttgcttggtttggaaaacaccagatatcagctgtacacaggagccgagcccactactagcgagttcaccgttctgatgcacgggcccaaacttaagactattgaaggcattgtgatggcagctgatagcgctcggtctttctctcccctggaaaaatttgggcagaattttctagagaagctgatcggcatcgaagttcctcataaattactcgaacgtgtgacttttgtcgacacccctggtattatcgagaaccggaaacagcaggaacggggctacccctttaacgatgtgtgtcagtggttcattgatagagctgatctgatcttcgtggtattcgatcccactaaactcgacgtaggcctcgagctcgaaatgctctttcgccagctaaaggggcgcgaatctcaaatcagaattatattaaataaagccgacaacctcgcaacccagatgcttatgcgggtttatggagctctcttctggagcctggctccactcattaacgtgactgaacccccccgcgtgtacgtttccagcttttggccacaggaatacaaaccagatacccaccaagaactgtttctgcaggaggagatttccctactggaagatctcaatcaggtaatcgagaacaggctggaaaataaaattgccttcatcagacagcacgctattcgagtgcgcatacatgcgctgctagttgatcgctacctccagacttataaagataagatgacctttttttcggatggagagctggtattcaaggatatcgtggaggatcctgataaattctatattttcaagaccatcctggctaaaaccaacgttagtaagttcgacctgcctaaccgggaggcttataaagacttttttgggattaacccaatcagttcctttaaactgcttagtcagcagtgctcttacatggggggttgcttcctcgagaagatcgagagggccattacccaggagctgcctggtctgctgggtagtctgggtctgggcaaaaatcccggagctctgaactgcgataaaactggatgttccgagacacctaagaaccgctacagaaaacactag

SEQ ID NO: 39527 - DNA, 2796 bp, Artificial Sequence
  derived and/or modified sequence
atgcgggctcttgtgttgctgggatgccttctggcatctttactgttttccggtcaggccgaactgcaggtctcagcatccggtggaactgaggacgtcgggaaccttctggagaatcactttagcgccggagatgcttctctcgaggagaaggagcgtgcactgtatgctgacacagcccctcaagataaaaagcttcttttgcattatcccgatggacgcgaggctgagtccccaaagaaaactccagccagcgctgctagcgccggacccgatccagaggcttcactctccaacgcatcggctactgagtcaccccctcctggagaacgagacgatcgagatgccgctgggcctggggaggagaaaaatggcccacctgtggcaagcgctctcccaccaggaggcgctaaagggccagtggaggaagagtggcccgaaccttcaagtggagaggggcagggtgaggaagagacagggtttggactgcccacagagggaaccgcctctggggaggcgggaggccaggccggaggtcacgagcttccagaagaggtgcaggaggtgcagggcgatagtttggtccagggcgcagtggcaggtacggctgagcctaaggctgaaggcgcatctccgcactccgaaggagacggtgttggacctttaaacgccgaagccgaaggctcaccaggaccaggagaggaacccgctgtgccggagggcgctcctgatgtggctgcggtaggcggagagtctgagccggacatcgatacacaagcctctgaggggacggaagatcaaggtgagccaggccctgctgcagaggcatctgccgagcccggaggggcacaaagcgtgaaagccggagacaccgaagagaatcagtcgccagaaatgacagaggaggacgcggatgaagcttccagtgaggaggagtccggggacggctccggatctgaagaagagggaggcgtcccatccgaggaggaatctgaggaggactccggggatggagcgtcttccgaggaagctgaaggcgcaagcgaggaagcgacggagcctcaggaggctggcgaacctcaagaggcaagagaaccacaggaaggaggcgacctacaggaggctgaggaaagccaggaggggggagacccacaggaagcggaggagccccaggaggggggtgcccctcaagagggtggagagccccaggaagggggagatccacaggaagctagagaaccccaggaggctcgggaaccacaggagggcgcagagctgcccgaggcaaccgggacgacctcccacagggaccgtggcgctcagcctggtcccgaagagctaaacacagagagcatgggttcagagacgctggacatgaaggccgaagagcccgaagagggacatcagagagagagcccaatcatagtggcacaagaggaaaccgaagatgcgaatgaggaagcaccgctgagggacagatctcacatcgagaaaaccctgatgctaaacgaggacaaacccagcgatgactactccgcagtactacagaggcttcggaaaatctatcactccagcatcaaaccactcgagcagtcatataaatataacgaattacgccagcatgaaatcacagacggagagataacttccaaacctatggtgttgtttcttgggccttggtccgtgggaaaatctacaatgatcaattacctgctcggattggaaaatactcgctaccagctttatactggagctgaacccacaacctcggagttcaccgtactgatgcacggcccaaagctgaaaacgattgagggtattgtgatggcagcggattcagcccgaagtttcagtccactggagaaatttggccagaacttcctggagaagctgatcggtatcgaagttccccataaattactcgagagagtcaccttcgtcgatacccccggtattatcgagaataggaagcagcaagaaagaggatatccgtttaatgatgtttgccagtggtttatcgaccgcgctgatctgatttttgtggtgttcgatcccaccaagctcgatgttggcctagaactcgagatgctttttaggcagctcaagggaagggagtctcagatcagaattattctgaataaggccgacaacctagcaacccagatgctgatgcgggtctatggagcattgttctggtccctggcccctctgataaatgtcaccgagcccccacgagtgtacgtgagcagcttctggcctcaggagtacaaaccggacactcatcaggagttattcctccaggaagagatcagcctactggaggaccttaaccaggtgattgagaaccggctggaaaacaagatcgcctttatcagacaacatgcaattagggtacgtatccacgccctcctggttgataggtatttacagacatataaagacaaaatgactttttttagcgatggcgaactggtgttcaaagacatagtagaagacccggataagttttacatttttaagacgatacttgccaaaactaacgtgtcaaaattcgatctgcctaatcgcgaagcgtataaagatttttttggtattaatcccatctcatctttcaagctgctctctcagcaatgctcatatatgggcggttgctttttggagaaaatagaaagagcaattacccaggagctgcccggactccttggaagcctggggttgggcaaaaatccaggagccttgaattgcgacaaaaccggctgtagcgagactcccaagaatcgctaccggaagcactag

SEQ ID NO: 39528 - DNA, 1422 bp, Artificial Sequence
  derived and/or modified sequence
atgagagctttggtgctactgggatgcctcctggccagccttctgttctcgggacaggcggaagagactgaggacgccaacgaagaggcacccctgcgagaccggtctcatatcgagaaaaccctaatgctcaacgaggacaaaccttccgacgactatagtgccgtgctgcagaggctgcggaaaatttatcatagtagcatcaagccccttgaacagtcctataagtacaatgagctgcgtcagcacgaaattacagacggcgagattacctctaagcccatggtgctctttctggggccttggagtgtgggtaaatctaccatgatcaactaccttctgggactcgagaatacaaggtaccagctctatacaggcgctgagcccaccacctccgaattcaccgtgctgatgcacggtccaaagttaaagaccatcgagggaatcgttatggccgctgacagtgccagatccttcagtcctttggagaagtttggtcagaactttctggagaaactgataggaattgaggtgcctcacaaattgctggagcgggtgacctttgtggacacccctggcattatagaaaatcgcaagcaacaggagcgaggctacccatttaacgacgtatgtcaatggttcatcgaccgtgcggatctgatttttgtggtgtttgacccgactaagttagacgtcgggcttgagctcgagatgttattcagacaactgaaaggaagagagagtcagattaggatcatattaaacaaggccgataacctcgccactcagatgctaatgagggtttatggggctctgttttggagcctggcacccttaatcaatgtgactgagccgccacgagtttacgtaagttccttttggccgcaggaatataagcctgacacccaccaagagctgttcctgcaggaagaaatctccctactggaggacctcaatcaggtgatcgagaaccggctcgaaaataagattgcgttcattaggcagcacgctatccgcgtgagaattcacgccctgctggtggatcggtatctgcagacctacaaagataagatgacatttttctccgacggcgaactcgtatttaaggatatcgtagaggatcccgataagttctacatttttaagacaatactggccaaaaccaacgtgagtaaatttgacctaccaaatcgggaagcgtataaggactttttcgggataaaccctattagttctttcaaattactttcccaacaatgctcttacatgggaggctgcttcttagagaagattgaaagagccattacacaagagctccctggcttgctggggtccctgggtctgggcaaaaaccctggggcattgaattgtgataagaccggctgttccgagacgcccaaaaacagatacaggaagcactag

SEQ ID NO: 39529 - DNA, 1296 bp, Artificial Sequence
  derived and/or modified sequence
atgctcaatgaggacaagccctccgacgactactccgccgtgctccaaagattgagaaaaatctaccacagctcgatcaagccactggagcagtcgtacaaatacaacgaacttaggcaacacgagatcactgatggtgagatcacctccaagccaatggtgctttttttggggccatggtcagtaggtaagagtaccatgattaactacctgctgggcttagagaatacaaggtaccagctgtatacaggagccgaacccaccacttccgaattcactgtgctcatgcatggcccaaagctgaaaacaattgaagggattgttatggcagccgacagcgctcgatcttttagccctctggaaaaatttggtcaaaattttcttgaaaaactgatcggtatcgaggtcccacacaaactgttagaacgggtgactttcgtagacactccaggaattattgagaataggaagcagcaggaaaggggataccccttcaatgacgtgtgtcaatggttcatcgaccgcgctgatcttattttcgtggtttttgatcctacaaaactggatgtgggcctggagctggaaatgcttttcaggcagctgaagggacgagagtcccagataagaataatacttaacaaggcagacaatttagctacacagatgctgatgcgagtgtacggcgcattgttttggagcttggcacccctcattaatgttactgagcctcctcgcgtctatgtctcctcattctggccacaggaatacaagcccgacactcaccaggaactctttttgcaggaagaaatcagcctgcttgaggatctgaaccaggtaatagaaaatagactggagaataaaatcgcttttatccgacaacacgccataagagtccgaatccatgctctgttggtggacagatatctgcagacttataaggacaagatgacgtttttttctgatggagagctggtctttaaagatattgtagaggaccccgataaattctatatatttaagacaatactggctaagaccaatgtgtctaagttcgatctacccaacagggaggcgtataaagattttttcgggatcaatccgattagtagtttcaaactgttatctcaacagtgctcctacatggggggatgtttcctggaaaagattgagcgcgcaatcacacaagagctccccggtctgctgggatcactagggttaggcaaaaatcccggagctttgaattgtgataaaacaggctgtagtgaaactcctaaaaatcggtaccgaaagcactag

SEQ ID NO: 39530 - DNA, 5581 bp, Artificial Sequence
  derived and/or modified sequence
cagtcaccatgagggcgctggtcctgctcggctgcctcctggcctcgctcctgttctcaggacaagcagaactgcaagtctccgcgtcgggtggcacagaagatgttggcaatttgttggagaatcatttctctgctggagacgcaagtctagaggagaaagaaagggcgctttatgcagacacagcccctcaagacaagaaactgctccttcactacccagatggcagggaggccgagagccccaagaagacccccgcgtctgccgccagcgcgggccccgatcctgaagccagcctctccaatgcctcagccacagagtcacctccacctggggaaagggacgacagggacgctgcggggcctggggaggaaaagaatggcccaccagtggcaagcgccctccctccaggaggggccaaggggcctgtggaagaggagtggccggagcccagttctggagagggacaaggagaggaggagactgggtttgggctccccacggagggaactgccagtggagaggcaggaggacaggctgggggccatgaactccccgaggaagtccaggaggtccaaggggacagcctggtgcagggagcagtagcagggacagcagagccaaaggcagagggggcctctcctcactcagagggtgatggggtcggcccactgaacgcagaggccgagggcagccctgggcctggcgaggagcctgcagtgccagagggagcccctgacgtcgcggctgttgggggagagtcggagccagatattgacacacaagccagtgagggcaccgaggaccagggggagcccggcccagctgcagaggccagtgcagagcctgggggcgcccaaagcgttaaggcaggggacactgaggagaaccagtccccagagatgactgaggaggacgcagatgaagcctcctctgaagaggaaagtggtgatggaagtggaagcgaggaagaaggaggagttccctccgaagaggagtccgaagaggacagcggcgatggggctagctcagaagaagcagagggcgcctccgaggaggccacggagccccaggaggctggggagccccaggaagccagggagccccaggaaggcggggatctgcaggaagccgaggagtcccaggaaggcggggatccccaggaagccgaggagccccaggaaggtggagcgccacaggaaggcggggagccccaggaaggtggggatccccaggaagccagggagccccaggaagccagggaaccccaggaaggtgcagagcttccggaagccacaggaaccacaagtcacagggacagaggggcccagcctggcccggaggaattgaatacagagtccatgggcagtgagaccctggatatgaaggcagaggagcccgaggagggacatcagagggagagtcccatcattgttgcccaggaagagacggaggatgcaaatgaagaagccccattgagggaccgctcccacatcgagaagaccctcatgctgaatgaggacaagccatccgatgactactctgcggtgctgcagcggcttcggaagatctaccactcatccatcaagcctctggagcagtcctacaagtacaatgagctccggcagcatgagatcacagatggagagattacctccaagcccatggtactgttcctgggaccgtggagtgttggtaaatctaccatgataaactacctccttgggctggaaaatactcgctatcagctctatacaggcgctgaacccaccacctctgagttcacggtcctcatgcatgggcctaagctgaaaaccatcgagggcatcgtcatggctgctgacagcgcccgttccttctcaccccttgagaagtttggccagaatttcctagagaagctgattggcattgaggttccccacaaacttctggagagggtcacttttgtggatacaccaggcatcatcgagaaccgcaagcagcaagaaagaggctaccccttcaacgacgtgtgccagtggttcatcgacagagctgacctcatctttgtcgtctttgacccaacaaagctggatgtgggtctagagctggagatgctcttccgccagttgaaggggcgtgaatcccagataaggatcatcctgaacaaggctgacaatctggccacccaaatgctcatgcgggtttacggggccctcttctggagcttggcccctctcatcaatgtcacagagcccccaagggtttacgtcagctccttctggccacaagagtataagccggacacccatcaggaactgttcctccaagaagagatctccctcctagaagacctgaatcaggtgatcgagaacagactggagaacaagattgccttcatccgccagcacgccatccgggtccgcatccacgccctcctggttgaccgctacctgcagacttacaaggacaaaatgaccttcttcagtgatggagaactggtctttaaggacattgtggaagatcccgataaattctacatcttcaagaccatcctggcaaagaccaatgtcagcaaatttgaccttcccaaccgcgaggcctataaggacttcttcggcatcaatcccatttccagtttcaaactgctctcccagcagtgctcctacatgggaggttgctttctggagaagattgagcgggccatcactcaggagcttccgggcctcctgggtagcctcgggctcgggaagaatccaggtgctctcaactgtgacaaaacagggtgtagcgaaacaccaaaaaatcgctacaggaagcactaggtggtggagcggtccttgggttcctgttggtgaatcagcttgtgtcctaactgtctgagaggtcctggtttattaaccctttgagccacactggcaggaattattacacagtggagagttgggagttcattgaggccaggggtcggggcaggtgtgtgggtctagggaggagagtggaaactgtgaattcctgtgtgcttgtcttgttgcttcaatgaggaggcctgattgaggcaagtcagcctccacctgcttttcctgggtcctgtcttggaaggacagagagcagctaaattctagtgtatcttaaatcagtgagggtcaaataagctaaaagcagctgaaattcctttgttccctgtgagctgggaaaacagcgaaggcctgagtcgtagagattgtcaggtccattttggcttctttccacacccacagtctcgcgtttgttccccagccctcggctgcctcttaactttgggttgactttcaacagtgaatagtctcttgggtctgaatatacctgggtttgtttttgtgtttttgagacggagtctcgctctgtcggccaggttggagtgcagtggtgcaatctcagctcactgcaacctccccctcctgggttcaagcgattctcctgcctcagcctcctgagtagctgagattataggcctaccaccatgcccagccaatttttgtatttttagtagaaacgggacttcaccatgttgcccaggctggcctcgaactcctgacctcaagtgatccacccgcctcggcctcccaaagtgctgggattacaggcatgagctgccgcacccggcctccacctgggttttgagccaatcccccggacttgctcctggtttcctcaaggggtggggcagtggtttaggacactcgacaactaagaacaggagttcccaggaaggacaaggatctgcctcccccactgccacttctctgatgtgttcctcaaagctggctcgagggctcgatcccttcatcggacccaggaggggactggttggtgtatccaggtaatttactcttggaagtgactgtagtgaaggtcgtggaagggctcagagggttaattggtttgcagtgcgtctttgtctattgcatgtcttggaaaactcagatcccaaaggcgctgggtttcagagaggacagtggagaccttgctccttttccttaggccgccagtctctcaaatttcagaggaggctgtttccacaactcccctgtggaaacacttggcagcggagttgctcctttgcagtttccacaccatggcttttcctttcctttcttctccattccctgatgcatcaacacttacttggagcaatttcctaggagtcagaaccagcaccagccactcggtgtcggtggccaccaaggcttaacattgaccttcccgcctgaccttgatgcagatgtccactgaacacaccgcaggaaagccagggccttcaataccaataagtgtgaatatgtgtgtatgttgtccaagagagattagggagatcacatagactctagggagtagagaacttgtaacagtcttgcaaggctagcatgcacggctccacagcaggtggtggggagcagaggggcaggacctgcagggaagaagcagcctttggatggtgaaatgtgcatggtgcacagtctgtgcatgcccaggagacccagcccgggctgcctcgaggggctcctttgtacacagccagccgcttctcttgggaacaagctgtcctgggggccttacccacgaggcaggagtcaggatgcaccagctcagcaccaggaagtcatcctggacccaggacagtggaaaggcaggcagagggagaggcactctgaggtcaggcagggtaagccagttggcagtcaggttaggtctatgaggagaacctcgagttaggaattcccggttctcagaattgttatcactctggtgcatgctgtcacaggggccgttgcgtttggctttgtggagggcctggacccttccacaagaacacccgaggttccagggcactcaggacaatgtttccaaggaacgagtcgaccaggaaagaacagtgagttctgcaaggggcatccacggagcctgtgataggggctgatgagatggaatctgtcctggacttttcttctcattaaccaccctccgcaaaccccagaacccctcgcctcatctctgtactgtctgccctcttgggggatgggccctcccactttcccctgcctgctcctccatgctgtgagctgctttggcagatctgtttttctgtgtagtcaggggaaaaacaaaaaaagatgcacaactgtgtgggcattgtcatagctgttggtgtcaccactgctttgggggaaatggctgggatgaggctaatacattcatgcaatatttatattttcagggggctgcgttatcagcatgctctccctgccttgggcttttctttccgtcatgttttccttttcgtgttccttctctgatttctcttgtctctgctgctcacaggcctgcccatcagtcagtacagatactcagtgtctggtttctggccagctccgtggagggggctttaagcagaattctgactctttggggtgggggattaggaactgggggaaacttaatgatccagagattcccccaagaggagtgtctggaaggatctgtgcctggacagtggcagaacctttccagtgttcttttggttctgatttcatcagtctcaataaagttccgatctctcttt

SEQ ID NO: 39531 - DNA, 4212 bp, Artificial Sequence
  derived and/or modified sequence
cttggcagtcaccatgagggcgctggtcctgctcggctgcctcctggcctcgctcctgttctcaggacaagcagaagagacggaggatgcaaatgaagaagccccattgagggaccgctcccacatcgagaagaccctcatgctgaatgaggacaagccatccgatgactactctgcggtgctgcagcggcttcggaagatctaccactcatccatcaagcctctggagcagtcctacaagtacaatgagctccggcagcatgagatcacagatggagagattacctccaagcccatggtactgttcctgggaccgtggagtgttggtaaatctaccatgataaactacctccttgggctggaaaatactcgctatcagctctatacaggcgctgaacccaccacctctgagttcacggtcctcatgcatgggcctaagctgaaaaccatcgagggcatcgtcatggctgctgacagcgcccgttccttctcaccccttgagaagtttggccagaatttcctagagaagctgattggcattgaggttccccacaaacttctggagagggtcacttttgtggatacaccaggcatcatcgagaaccgcaagcagcaagaaagaggctaccccttcaacgacgtgtgccagtggttcatcgacagagctgacctcatctttgtcgtctttgacccaacaaagctggatgtgggtctagagctggagatgctcttccgccagttgaaggggcgtgaatcccagataaggatcatcctgaacaaggctgacaatctggccacccaaatgctcatgcgggtttacggggccctcttctggagcttggcccctctcatcaatgtcacagagcccccaagggtttacgtcagctccttctggccacaagagtataagccggacacccatcaggaactgttcctccaagaagagatctccctcctagaagacctgaatcaggtgatcgagaacagactggagaacaagattgccttcatccgccagcacgccatccgggtccgcatccacgccctcctggttgaccgctacctgcagacttacaaggacaaaatgaccttcttcagtgatggagaactggtctttaaggacattgtggaagatcccgataaattctacatcttcaagaccatcctggcaaagaccaatgtcagcaaatttgaccttcccaaccgcgaggcctataaggacttcttcggcatcaatcccatttccagtttcaaactgctctcccagcagtgctcctacatgggaggttgctttctggagaagattgagcgggccatcactcaggagcttccgggcctcctgggtagcctcgggctcgggaagaatccaggtgctctcaactgtgacaaaacagggtgtagcgaaacaccaaaaaatcgctacaggaagcactaggtggtggagcggtccttgggttcctgttggtgaatcagcttgtgtcctaactgtctgagaggtcctggtttattaaccctttgagccacactggcaggaattattacacagtggagagttgggagttcattgaggccaggggtcggggcaggtgtgtgggtctagggaggagagtggaaactgtgaattcctgtgtgcttgtcttgttgcttcaatgaggaggcctgattgaggcaagtcagcctccacctgcttttcctgggtcctgtcttggaaggacagagagcagctaaattctagtgtatcttaaatcagtgagggtcaaataagctaaaagcagctgaaattcctttgttccctgtgagctgggaaaacagcgaaggcctgagtcgtagagattgtcaggtccattttggcttctttccacacccacagtctcgcgtttgttccccagccctcggctgcctcttaactttgggttgactttcaacagtgaatagtctcttgggtctgaatatacctgggtttgtttttgtgtttttgagacggagtctcgctctgtcggccaggttggagtgcagtggtgcaatctcagctcactgcaacctccccctcctgggttcaagcgattctcctgcctcagcctcctgagtagctgagattataggcctaccaccatgcccagccaatttttgtatttttagtagaaacgggacttcaccatgttgcccaggctggcctcgaactcctgacctcaagtgatccacccgcctcggcctcccaaagtgctgggattacaggcatgagctgccgcacccggcctccacctgggttttgagccaatcccccggacttgctcctggtttcctcaaggggtggggcagtggtttaggacactcgacaactaagaacaggagttcccaggaaggacaaggatctgcctcccccactgccacttctctgatgtgttcctcaaagctggctcgagggctcgatcccttcatcggacccaggaggggactggttggtgtatccaggtaatttactcttggaagtgactgtagtgaaggtcgtggaagggctcagagggttaattggtttgcagtgcgtctttgtctattgcatgtcttggaaaactcagatcccaaaggcgctgggtttcagagaggacagtggagaccttgctccttttccttaggccgccagtctctcaaatttcagaggaggctgtttccacaactcccctgtggaaacacttggcagcggagttgctcctttgcagtttccacaccatggcttttcctttcctttcttctccattccctgatgcatcaacacttacttggagcaatttcctaggagtcagaaccagcaccagccactcggtgtcggtggccaccaaggcttaacattgaccttcccgcctgaccttgatgcagatgtccactgaacacaccgcaggaaagccagggccttcaataccaataagtgtgaatatgtgtgtatgttgtccaagagagattagggagatcacatagactctagggagtagagaacttgtaacagtcttgcaaggctagcatgcacggctccacagcaggtggtggggagcagaggggcaggacctgcagggaagaagcagcctttggatggtgaaatgtgcatggtgcacagtctgtgcatgcccaggagacccagcccgggctgcctcgaggggctcctttgtacacagccagccgcttctcttgggaacaagctgtcctgggggccttacccacgaggcaggagtcaggatgcaccagctcagcaccaggaagtcatcctggacccaggacagtggaaaggcaggcagagggagaggcactctgaggtcaggcagggtaagccagttggcagtcaggttaggtctatgaggagaacctcgagttaggaattcccggttctcagaattgttatcactctggtgcatgctgtcacaggggccgttgcgtttggctttgtggagggcctggacccttccacaagaacacccgaggttccagggcactcaggacaatgtttccaaggaacgagtcgaccaggaaagaacagtgagttctgcaaggggcatccacggagcctgtgataggggctgatgagatggaatctgtcctggacttttcttctcattaaccaccctccgcaaaccccagaacccctcgcctcatctctgtactgtctgccctcttgggggatgggccctcccactttcccctgcctgctcctccatgctgtgagctgctttggcagatctgtttttctgtgtagtcaggggaaaaacaaaaaaagatgcacaactgtgtgggcattgtcatagctgttggtgtcaccactgctttgggggaaatggctgggatgaggctaatacattcatgcaatatttatattttcagggggctgcgttatcagcatgctctccctgccttgggcttttctttccgtcatgttttccttttcgtgttccttctctgatttctcttgtctctgctgctcacaggcctgcccatcagtcagtacagatactcagtgtctggtttctggccagctccgtggagggggctttaagcagaattctgactctttggggtgggggattaggaactgggggaaacttaatgatccagagattcccccaagaggagtgtctggaaggatctgtgcctggacagtggcagaacctttccagtgttcttttggttctgatttcatcagtctcaataaagttccgatctctcttt

SEQ ID NO: 39532 - DNA, 1814 bp, Artificial Sequence
  derived and/or modified sequence
agacagcgcgtcagtgacaggcacacccgggccagggtcctctcctttcctcagcccgtctctctgtgacagaccctgcctgcactcccaagcccctctctccctgtacgaagagacggaggatgcaaatgaagaagccccattgagggaccgctcccacatcgagaagaccctcatgctgaatgaggacaagccatccgatgactactctgcggtgctgcagcggcttcggaagatctaccactcatccatcaagcctctggagcagtcctacaagtacaatgagctccggcagcatgagatcacagatggagagattacctccaagcccatggtactgttcctgggaccgtggagtgttggtaaatctaccatgataaactacctccttgggctggaaaatactcgctatcagctctatacaggcgctgaacccaccacctctgagttcacggtcctcatgcatgggcctaagctgaaaaccatcgagggcatcgtcatggctgctgacagcgcccgttccttctcaccccttgagaagtttggccagaatttcctagagaagctgattggcattgaggttccccacaaacttctggagagggtcacttttgtggatacaccaggcatcatcgagaaccgcaagcagcaagaaagaggctaccccttcaacgacgtgtgccagtggttcatcgacagagctgacctcatctttgtcgtctttgacccaacaaagctggatgtgggtctagagctggagatgctcttccgccagttgaaggggcgtgaatcccagataaggatcatcctgaacaaggctgacaatctggccacccaaatgctcatgcgggtttacggggccctcttctggagcttggcccctctcatcaatgtcacagagcccccaagggtttacgtcagctccttctggccacaagagtataagccggacacccatcaggaactgttcctccaagaagagatctccctcctagaagacctgaatcaggtgatcgagaacagactggagaacaagattgccttcatccgccagcacgccatccgggtccgcatccacgccctcctggttgaccgctacctgcagacttacaaggacaaaatgaccttcttcagtgatggagaactggtctttaaggacattgtggaagatcccgataaattctacatcttcaagaccatcctggcaaagaccaatgtcagcaaatttgaccttcccaaccgcgaggcctataaggacttcttcggcatcaatcccatttccagtttcaaactgctctcccagcagtgctcctacatgggaggttgctttctggagaagattgagcgggccatcactcaggagcttccgggcctcctgggtagcctcgggctcgggaagaatccaggtgctctcaactgtgacaaaacagggtgtagcgaaacaccaaaaaatcgctacaggaagcactaggtggtggagcggtccttgggttcctgttggtgaatcagcttgtgtcctaactgtctgagaggtcctggtttattaaccctttgagccacactggcaggaattattacacagtggagagttgggagttcattgaggccaggggtcggggcaggtgtgtgggtctagggaggagagtggaaactgtgaattcctgtgtgcttgtcttgttgcttcaatgaggaggcctgattgaggcaagtcagcctccacctgcttttcctgggtcctgtcttggaaggacagagagcagctaaattctagtgtatcttaaatcagtgagggtcaaataagctaaaagcagctg

SEQ ID NO: 39533 - DNA, 2796 bp, Artificial Sequence
  derived and/or modified sequence
atgagagccctggtgctgctgggctgcctgctggccagcctgctgttcagcggccaggccgagctgcaggtgagcgccagcggcggcaccgaggacgtgggcaacctgctggagaaccacttcagcgccggcgacgccagcctggaggagaaggagagagccctgtacgccgacaccgccccccaggacaagaagctgctgctgcactaccccgacggcagagaggccgagagccccaagaagacccccgccagcgccgccagcgccggccccgaccccgaggccagcctgagcaacgccagcgccaccgagagccccccccccggcgagagagacgacagagacgccgccggccccggcgaggagaagaacggcccccccgtggccagcgccctgccccccggcggcgccaagggccccgtggaggaggagtggcccgagcccagcagcggcgagggccagggcgaggaggagaccggcttcggcctgcccaccgagggcaccgccagcggcgaggccggcggccaggccggcggccacgagctgcccgaggaggtgcaggaggtgcagggcgacagcctggtgcagggcgccgtggccggcaccgccgagcccaaggccgagggcgccagcccccacagcgagggcgacggcgtgggccccctgaacgccgaggccgagggcagccccggccccggcgaggagcccgccgtgcccgagggcgcccccgacgtggccgccgtgggcggcgagagcgagcccgacatcgacacccaggccagcgagggcaccgaggaccagggcgagcccggccccgccgccgaggccagcgccgagcccggcggcgcccagagcgtgaaggccggcgacaccgaggagaaccagagccccgagatgaccgaggaggacgccgacgaggccagcagcgaggaggagagcggcgacggcagcggcagcgaggaggagggcggcgtgcccagcgaggaggagagcgaggaggacagcggcgacggcgccagcagcgaggaggccgagggcgccagcgaggaggccaccgagccccaggaggccggcgagccccaggaggccagagagccccaggagggcggcgacctgcaggaggccgaggagagccaggagggcggcgacccccaggaggccgaggagccccaggagggcggcgccccccaggagggcggcgagccccaggagggcggcgacccccaggaggccagagagccccaggaggccagagagccccaggagggcgccgagctgcccgaggccaccggcaccaccagccacagagacagaggcgcccagcccggccccgaggagctgaacaccgagagcatgggcagcgagaccctggacatgaaggccgaggagcccgaggagggccaccagagagagagccccatcatcgtggcccaggaggagaccgaggacgccaacgaggaggcccccctgagagacagaagccacatcgagaagaccctgatgctgaacgaggacaagcccagcgacgactacagcgccgtgctgcagagactgagaaagatctaccacagcagcatcaagcccctggagcagagctacaagtacaacgagctgagacagcacgagatcaccgacggcgagatcaccagcaagcccatggtgctgttcctgggcccctggagcgtgggcaagagcaccatgatcaactacctgctgggcctggagaacaccagataccagctgtacaccggcgccgagcccaccaccagcgagttcaccgtgctgatgcacggccccaagctgaagaccatcgagggcatcgtgatggccgccgacagcgccagaagcttcagccccctggagaagttcggccagaacttcctggagaagctgatcggcatcgaggtgccccacaagctgctggagagagtgaccttcgtggacacccccggcatcatcgagaacagaaagcagcaggagagaggctaccccttcaacgacgtgtgccagtggttcatcgacagagccgacctgatcttcgtggtgttcgaccccaccaagctggacgtgggcctggagctggagatgctgttcagacagctgaagggcagagagagccagatcagaatcatcctgaacaaggccgacaacctggccacccagatgctgatgagagtgtacggcgccctgttctggagcctggcccccctgatcaacgtgaccgagccccccagagtgtacgtgagcagcttctggccccaggagtacaagcccgacacccaccaggagctgttcctgcaggaggagatcagcctgctggaggacctgaaccaggtgatcgagaacagactggagaacaagatcgccttcatcagacagcacgccatcagagtgagaatccacgccctgctggtggacagatacctgcagacctacaaggacaagatgaccttcttcagcgacggcgagctggtgttcaaggacatcgtggaggaccccgacaagttctacatcttcaagaccatcctggccaagaccaacgtgagcaagttcgacctgcccaacagagaggcctacaaggacttcttcggcatcaaccccatcagcagcttcaagctgctgagccagcagtgcagctacatgggcggctgcttcctggagaagatcgagagagccatcacccaggagctgcccggcctgctgggcagcctgggcctgggcaagaaccccggcgccctgaactgcgacaagaccggctgcagcgagacccccaagaacagatacagaaagcactag

SEQ ID NO: 39534 - DNA, 1422 bp, Artificial Sequence
  derived and/or modified sequence
atgagagccctggtgctgctgggctgcctgctggccagcctgctgttcagcggccaggccgaggagaccgaggacgccaacgaggaggcccccctgagagacagaagccacatcgagaagaccctgatgctgaacgaggacaagcccagcgacgactacagcgccgtgctgcagagactgagaaagatctaccacagcagcatcaagcccctggagcagagctacaagtacaacgagctgagacagcacgagatcaccgacggcgagatcaccagcaagcccatggtgctgttcctgggcccctggagcgtgggcaagagcaccatgatcaactacctgctgggcctggagaacaccagataccagctgtacaccggcgccgagcccaccaccagcgagttcaccgtgctgatgcacggccccaagctgaagaccatcgagggcatcgtgatggccgccgacagcgccagaagcttcagccccctggagaagttcggccagaacttcctggagaagctgatcggcatcgaggtgccccacaagctgctggagagagtgaccttcgtggacacccccggcatcatcgagaacagaaagcagcaggagagaggctaccccttcaacgacgtgtgccagtggttcatcgacagagccgacctgatcttcgtggtgttcgaccccaccaagctggacgtgggcctggagctggagatgctgttcagacagctgaagggcagagagagccagatcagaatcatcctgaacaaggccgacaacctggccacccagatgctgatgagagtgtacggcgccctgttctggagcctggcccccctgatcaacgtgaccgagccccccagagtgtacgtgagcagcttctggccccaggagtacaagcccgacacccaccaggagctgttcctgcaggaggagatcagcctgctggaggacctgaaccaggtgatcgagaacagactggagaacaagatcgccttcatcagacagcacgccatcagagtgagaatccacgccctgctggtggacagatacctgcagacctacaaggacaagatgaccttcttcagcgacggcgagctggtgttcaaggacatcgtggaggaccccgacaagttctacatcttcaagaccatcctggccaagaccaacgtgagcaagttcgacctgcccaacagagaggcctacaaggacttcttcggcatcaaccccatcagcagcttcaagctgctgagccagcagtgcagctacatgggcggctgcttcctggagaagatcgagagagccatcacccaggagctgcccggcctgctgggcagcctgggcctgggcaagaaccccggcgccctgaactgcgacaagaccggctgcagcgagacccccaagaacagatacagaaagcactag

SEQ ID NO: 39535 - DNA, 1296 bp, Artificial Sequence
  derived and/or modified sequence
atgctgaacgaggacaagcccagcgacgactacagcgccgtgctgcagagactgagaaagatctaccacagcagcatcaagcccctggagcagagctacaagtacaacgagctgagacagcacgagatcaccgacggcgagatcaccagcaagcccatggtgctgttcctgggcccctggagcgtgggcaagagcaccatgatcaactacctgctgggcctggagaacaccagataccagctgtacaccggcgccgagcccaccaccagcgagttcaccgtgctgatgcacggccccaagctgaagaccatcgagggcatcgtgatggccgccgacagcgccagaagcttcagccccctggagaagttcggccagaacttcctggagaagctgatcggcatcgaggtgccccacaagctgctggagagagtgaccttcgtggacacccccggcatcatcgagaacagaaagcagcaggagagaggctaccccttcaacgacgtgtgccagtggttcatcgacagagccgacctgatcttcgtggtgttcgaccccaccaagctggacgtgggcctggagctggagatgctgttcagacagctgaagggcagagagagccagatcagaatcatcctgaacaaggccgacaacctggccacccagatgctgatgagagtgtacggcgccctgttctggagcctggcccccctgatcaacgtgaccgagccccccagagtgtacgtgagcagcttctggccccaggagtacaagcccgacacccaccaggagctgttcctgcaggaggagatcagcctgctggaggacctgaaccaggtgatcgagaacagactggagaacaagatcgccttcatcagacagcacgccatcagagtgagaatccacgccctgctggtggacagatacctgcagacctacaaggacaagatgaccttcttcagcgacggcgagctggtgttcaaggacatcgtggaggaccccgacaagttctacatcttcaagaccatcctggccaagaccaacgtgagcaagttcgacctgcccaacagagaggcctacaaggacttcttcggcatcaaccccatcagcagcttcaagctgctgagccagcagtgcagctacatgggcggctgcttcctggagaagatcgagagagccatcacccaggagctgcccggcctgctgggcagcctgggcctgggcaagaaccccggcgccctgaactgcgacaagaccggctgcagcgagacccccaagaacagatacagaaagcactag

SEQ ID NO: 39536 - protein, 2769 aa, Artificial Sequence
  derived and/or modified sequence
MDVKERKPYRSLTRRRDAERRYTSSSADSEEGKAPQKSYSSSETLKAYDQDARLAYGSRVKDIVPQEAEEFCRTGANFTLRELGLEEVTPPHGTLYRTDIGLPHCGYSMGAGSDADMEADTVLSPEHPVRLWGRSTRSGRSSCLSSRANSNLTLTDTEHENTETDHPGGLQNHARLRTPPPPLSHAHTPNQHHAASINSLNRGNFTPRSNPSPAPTDHSLSGEPPAGGAQEPAHAQENWLLNSNIPLETRNLGKQPFLGTLQDNLIEMDILGASRHDGAYSDGHFLFKPGGTSPLFCTTSPGYPLTSSTVYSPPPRPLPRSTFARPAFNLKKPSKYCNWKCAALSAIVISATLVILLAYFVAMHLFGLNWHLQPMEGQMYEITEDTASSWPVPTDVSLYPSGGTGLETPDRKGKGTTEGKPSSFFPEDSFIDSGEIDVGRRASQKIPPGTFWRSQVFIDHPVHLKFNVSLGKAALVGIYGRKGLPPSHTQFDFVELLDGRRLLTQEARSLEGTPRQSRGTVPPSSHETGFIQYLDSGIWHLAFYNDGKESEVVSFLTTAIESVDNCPSNCYGNGDCISGTCHCFLGFLGPDCGRASCPVLCSGNGQYMKGRCLCHSGWKGAECDVPTNQCIDVACSNHGTCITGTCICNPGYKGESCEEVDCMDPTCSGRGVCVRGECHCSVGWGGTNCETPRATCLDQCSGHGTFLPDTGLCSCDPSWTGHDCSIEICAADCGGHGVCVGGTCRCEDGWMGAACDQRACHPRCAEHGTCRDGKCECSPGWNGEHCTIAHYLDRVVKEGCPGLCNGNGRCTLDLNGWHCVCQLGWRGAGCDTSMETACGDSKDNDGDGLVDCMDPDCCLQPLCHINPLCLGSPNPLDIIQETQVPVSQQNLHSFYDRIKFLVGRDSTHIIPGENPFDGGHACVIRGQVMTSDGTPLVGVNISFVNNPLFGYTISRQDGSFDLVTNGGISIILRFERAPFITQEHTLWLPWDRFFVMETIIMRHEENEIPSCDLSNFARPNPVVSPSPLTSFASSCAEKGPIVPEIQALQEEISISGCKMRLSYLSSRTPGYKSVLRISLTHPTIPFNLMKVHLMVAVEGRLFRKWFAAAPDLSYYFIWDKTDVYNQKVFGLSEAFVSVGYEYESCPDLILWEKRTTVLQGYEIDASKLGGWSLDKHHALNIQSGILHKGNGENQFVSQQPPVIGSIMGNGRRRSISCPSCNGLADGNKLLAPVALTCGSDGSLYVGDFNYIRRIFPSGNVTNILELRNKDFRHSHSPAHKYYLATDPMSGAVFLSDSNSRRVFKIKSTVVVKDLVKNSEVVAGTGDQCLPFDDTRCGDGGKATEATLTNPRGITVDKFGLIYFVDGTMIRRIDQNGIISTLLGSNDLTSARPLSCDSVMDISQVHLEWPTDLAINPMDNSLYVLDNNVVLQISENHQVRIVAGRPMHCQVPGIDHFLLSKVAIHATLESATALAVSHNGVLYIAETDEKKINRIRQVTTSGEISLVAGAPSGCDCKNDANCDCFSGDDGYAKDAKLNTPSSLAVCADGELYVADLGNIRIRFIRKNKPFLNTQNMYELSSPIDQELYLFDTTGKHLYTQSLPTGDYLYNFTYTGDGDITLITDNNGNMVNVRRDSTGMPLWLVVPDGQVYWVTMGTNSALKSVTTQGHELAMMTYHGNSGLLATKSNENGWTTFYEYDSFGRLTNVTFPTGQVSSFRSDTDSSVHVQVETSSKDDVTITTNLSASGAFYTLLQDQVRNSYYIGADGSLRLLLANGMEVALQTEPHLLAGTVNPTVGKRNVTLPIDNGLNLVEWRQRKEQARGQVTVFGRRLRVHNRNLLSLDFDRVTRTEKIYDDHRKFTLRILYDQAGRPSLWSPSSRLNGVNVTYSPGGYIAGIQRGIMSERMEYDQAGRITSRIFADGKTWSYTYLEKSMVLLLHSQRQYIFEFDKNDRLSSVTMPNVARQTLETIRSVGYYRNIYQPPEGNASVIQDFTEDGHLLHTFYLGTGRRVIYKYGKLSKLAETLYDTTKVSFTYDETAGMLKTINLQNEGFTCTIRYRQIGPLIDRQIFRFTEEGMVNARFDYNYDNSFRVTSMQAVINETPLPIDLYRYDDVSGKTEQFGKFGVIYYDINQIITTAVMTHTKHFDAYGRMKEVQYEIFRSLMYWMTVQYDNMGRVVKKELKVGPYANTTRYSYEYDADGQLQTVSINDKPLWRYSYDLNGNLHLLSPGNSARLTPLRYDIRDRITRLGDVQYKMDEDGFLRQRGGDIFEYNSAGLLIKAYNRAGSWSVRYRYDGLGRRVSSKSSHSHHLQFFYADLTNPTKVTHLYNHSSSEITSLYYDLQGHLFAMELSSGDEFYIACDNIGTPLAVFSGTGLMIKQILYTAYGEIYMDTNPNFQIIIGYHGGLYDPLTKLVHMGRRDYDVLAGRWTSPDHELWKHLSSSNVMPFNLYMFKNNNPISNSQDIKCFMTDVNSWLLTFGFQLHNVIPGYPKPDMDAMEPSYELIHTQMKTQEWDNSKSILGVQCEVQKQLKAFVTLERFDQLYGSTITSCQQAPKTKKFASSGSVFGKGVKFALKDGRVTTDIISVANEDGRRVAAILNHAHYLENLHFTIDGVDTHYFVKPGPSEGDLAILGLSGGRRTLENGVNVTVSQINTVLNGRTRRYTDIQLQYGALCLNTRYGTTLDEEKARVLELARQRAVRQAWAREQQRLREGEEGLRAWTEGEKQQVLSTGRVQGYDGFFVISVEQYPELSDSANNIHFMRQSEMGRR

SEQ ID NO: 39537 - DNA, 8310 bp, Artificial Sequence
  derived and/or modified sequence
atggatgtgaaagaacgtaaaccttaccgcagtctgactcgacgccgagacgccgagcgaagatatacatcgtctagtgcagacagcgaggagggcaaggctcctcagaaatcatatagcagctcagagacacttaaagcatatgatcaggatgcccgcctcgcctatggaagccgggtaaaggacattgtcccccaggaagcggaggagttctgtagaactggggctaatttcaccctgagggagcttggtttagaggaagtgaccccacctcatggaacattgtatcggacggacatcggcctcccccactgcgggtactctatgggcgctggcagtgacgctgacatggaggcggacaccgtgctatcacctgagcatcccgtccgcctgtggggacgctctacacgtagtggcaggtccagctgcctgtccagcagagcaaacagcaacttgacgctcaccgataccgaacacgaaaacaccgaaaccgaccacccgggagggctacagaaccacgctaggctaaggacacctccccccccactctcgcatgcacatacccctaaccagcaccacgcagccagcattaacagcctgaatcgcggaaacttcactccaagatctaacccatctccagctccgactgatcatagcctgagtggagagcctccggcggggggcgctcaggagccagcccatgcacaagagaactggctgcttaatagcaatattcctctggagacccgtaacctcggaaagcagccgtttcttgggactcttcaagacaatttgattgaaatggacatattaggcgctagcaggcacgacggcgcttatagtgacggccattttctatttaaaccgggaggcacatctccactgttctgcaccacctcccccggctaccctctgacaagttccacagtatattccccgcccccccgcccactgccaaggtctaccttcgcccgacccgcctttaacctcaaaaaaccttccaagtactgtaattggaaatgtgccgctctctccgcaatcgtcatcagcgccacactggtgattctcctggcatacttcgtggcgatgcatctgttcggactgaactggcatttacagccaatggagggacagatgtacgagatcacggaggataccgcatcttcctggcctgttcccaccgacgtatctctgtacccttcggggggcactgggctggaaactccagacaggaaggggaagggcacgaccgagggtaaaccatcctccttcttccctgaagactcgtttattgactcaggcgaaatcgatgttgggcgtagggcgagccagaagatcccacctggcactttctggcggagccaggtctttatagatcaccctgtgcatctgaaattcaatgtatcacttggaaaagccgcgctggtgggcatctatggcagaaaagggctaccaccgagtcatacacagttcgactttgtggaactcctcgatgggaggagactgttgacacaggaggcacgaagtttggagggcaccccacgtcagtctcgcggaactgttccaccgtcttcgcatgagaccgggttcatccaatacctggattctggcatttggcacctggctttttacaacgatggcaaagagtcagaagttgtgagctttctgaccaccgccattgagtcggtggacaactgtccctcaaattgctacgggaacggtgactgtatcagcggtacctgccattgcttccttggttttcttgggcccgactgtggacgcgcctcatgcccggtgctttgtagcggcaatggacagtacatgaaagggagatgtctatgccactccggttggaagggggctgagtgcgacgtccccacaaaccagtgtatagacgtagcatgctcaaaccatggaacatgtattacagggacctgcatctgtaaccctgggtataaaggggagagctgcgaggaggtcgattgcatggacccaacttgttctggccggggggtgtgtgtgagaggcgagtgtcactgcagtgtggggtggggagggaccaattgtgaaactccacgggccacatgtctcgatcagtgctctgggcacgggaccttcctccctgacacagggttatgttcctgtgacccctcatggacaggccacgattgctctatagaaatctgtgcagccgattgcggaggccacggtgtttgcgtagggggcacttgtcgctgcgaggacggctggatgggtgccgcctgtgatcagcgggcctgccacccccgctgcgcagagcacggaacctgcagggatgggaaatgcgagtgctcaccaggatggaacggagaacactgcactattgcccactatctggatcgagtcgtaaaggagggctgcccaggtctgtgcaatgggaacgggcgatgcacactggatctcaacgggtggcattgtgtatgccaactcggctggcggggcgccggatgcgacaccagtatggaaacagcttgtggggatagtaaggacaacgatggggacggtctggtcgattgtatggatccagattgttgtcttcagccactgtgccatataaaccctctgtgtctaggaagcccgaatcctctggacatcattcaggaaacccaggtccctgttagccagcagaatctgcacagcttctacgatcgtataaagttcctcgtggggagggactccacgcacattatccctggcgaaaatccatttgacggggggcatgcgtgcgtcatacgggggcaggtgatgacaagcgacggcaccccgctggttggcgttaacatcagtttcgttaacaaccctctctttggatacacgatctccagacaagacggttccttcgatctggtcacaaacggcggaataagcataattttacgttttgagcgggccccatttataactcaggagcataccctgtggctgccatgggacagattttttgtgatggagacaattataatgcggcatgaggagaacgagatccctagctgtgacctctctaacttcgctcggccgaatccagttgtctccccatctcctctaaccagctttgcatcctcctgtgccgagaagggtccaatcgtccccgaaatccaggcacttcaggaagagatctctattagtgggtgtaagatgcggctctcttacctttcatcacgcacacctgggtataaatccgtgcttaggatctcccttacgcacccgactattccatttaatctgatgaaggtgcacctcatggtcgccgtggaaggccggctctttagaaagtggttcgctgctgcgcctgacctctcatattatttcatttgggacaagactgacgtgtacaaccaaaaggtgtttggtctctccgaggcttttgtcagcgtggggtatgagtacgaatcttgccccgatctgatactttgggagaaaagaaccacggtgctgcaaggctatgaaatcgatgcaagtaagctggggggttggtcgttggacaagcatcatgccttgaatattcagtctggcatcttgcacaaagggaatggagaaaatcagttcgtctcacagcagccaccagtcataggatcaatcatgggaaatgggcgtcgtagatcaataagttgtcctagttgcaatggcctggctgatggaaacaaactgctggctccagtggctttgacgtgtggctctgacggaagtctgtacgtcggcgacttcaactacatccgtaggatttttccctcaggcaacgtgaccaatatcctggagctccggaataaggatttccgccatagccattctccagcgcataaatactacctggccaccgacccaatgtccggggccgtttttttgtctgatagcaactcaagacgggtctttaagatcaagagcactgttgtggtcaaggatttggtaaaaaatagcgaggtggtggccgggaccggcgatcaatgtcttccttttgacgacactcgatgtggggatggtgggaaggctacggaagcaactttgaccaatcctcgggggattacagtcgataagttcgggctaatctattttgtagatggaaccatgattcggcgcatcgaccagaacggcattatatctacactcctcggctccaacgacctcacttcggctcgtccactatcatgcgattccgtcatggatatctcccaagtccacctggagtggccaacggacctcgccataaatcctatggacaattctctgtatgttttggataacaacgtggtactacagatcagtgaaaatcatcaggtgagaatcgtggcagggagacccatgcattgtcaagtcccggggatcgaccatttcttgttgagcaaagtggccatccacgcaacactggagtccgctactgccctggctgtgtctcacaacggagtgctgtatattgctgagacagatgagaaaaagataaataggatccgtcaggttactacctctggtgagatctctctggtggctggagcccctagtggatgtgactgcaaaaatgatgcgaattgcgactgcttctctggcgacgacgggtatgctaaggacgcaaaactcaataccccatccagtttggccgtttgtgccgacggagagctgtatgtcgccgacttgggaaatattaggatcaggttcatccgcaagaataagccattcctcaacacccagaacatgtatgaactgtcttccccaattgatcaggagttgtacctgtttgatacaactggcaagcatctttacacacagagtctgccaacgggggactacctatacaattttacatataccggtgacggagacattacactaattacggacaataatgggaatatggtgaatgttaggagagatagtactgggatgcctttgtggctggtggtgccggatggccaggtttactgggttactatggggacaaactcggcactaaaaagtgtgacaacacagggacacgagctagccatgatgacataccacggaaatagtgggctgcttgcaaccaagtccaatgaaaacgggtggacaaccttttatgagtacgactcctttggccgattgacaaacgttacatttcctactggacaggtcagctccttcaggagtgatactgattcttccgttcatgtgcaagtagaaacatcttcgaaagacgatgtgacgatcaccactaacttatctgccagcggcgccttctacaccctcctgcaggaccaggtgcgcaattcttattacataggcgctgacgggagtctgcggctccttctcgctaatggcatggaagtcgccttacaaactgaaccgcatttgctcgccggcaccgttaatcccaccgtgggaaagcgcaatgtgacattacccatagataacggccttaacctggtggaatggagacagcggaaggaacaggcgcgaggccaggtaaccgtttttgggaggcggctccgggtccacaacaggaatctattgtccctggactttgatcgggtcactcggacagagaaaatctatgatgaccaccgaaagttcacattgaggattctgtatgatcaggccggacgcccctcgctgtggagcccgagttctcgtctgaacggtgtcaacgtaacctattcaccgggcggatacattgctggaatccagaggggtatcatgagtgagcgaatggagtacgaccaggccgggcgcatcaccagtcggatctttgctgacgggaagacatggtcctacacgtatttagagaagagtatggtgctgctgttgcactcacagaggcaatacatatttgagtttgataagaatgaccggctgtcttctgtcacgatgcccaatgtggcaagacagactctggagacaattcgaagtgtaggatattataggaatatctatcagcccccagagggtaatgccagtgtgatccaggatttcactgaggacggacatctgctgcatacgttctatctgggcacgggccgtcgcgtgatttataaatacggtaaactatcaaagttggccgagactttgtatgataccaccaaagtctcatttacctacgacgaaactgcgggtatgctaaagaccatcaacctccagaatgagggtttcacatgtacaatccgctaccggcagatcggtccgttaatcgacagacaaatcttccgctttaccgaagagggaatggtgaacgcccgttttgattataactacgataattccttccgagttacaagcatgcaggctgtaatcaatgaaacgcccctgccaattgacctgtaccggtacgacgatgtctcaggcaagacagagcagttcggcaaattcggtgttatctactacgacattaaccagataatcactacagcagtgatgacgcacacgaagcactttgatgcctatgggcggatgaaagaagtgcagtacgaaattttcagatccctgatgtactggatgacagtccaatatgataacatggggcgagtcgtgaagaaggagctgaaagttggaccatatgcgaacactactcgctatagctacgagtacgatgctgatggtcagcttcagactgtcagcattaacgataaacccctctggcggtattcttacgatctcaacggcaatttacacctcttgagtcctggaaatagtgcccggctcaccccgttacgctacgacatccgagatcgtataacacgcctcggagacgtacaatacaaaatggacgaagacggcttcctgcggcagcgcggcggcgacatctttgagtacaattccgctggactgttgatcaaggcctacaatcgggccggctcctggagtgtgcggtaccggtacgacggtctgggaaggcgtgtgtctagcaagtcgagccactcccatcacctacagttcttttatgcagacctgaccaatccaactaaagtcacacacctatacaatcattcaagtagtgagatcaccagtttatactacgacctgcaaggtcacctgttcgctatggagctatcatccggggatgagttctacatcgcctgcgacaacatcggcaccccactcgccgttttctccgggactgggctgatgatcaagcagatcttatacactgcgtatggtgaaatatacatggacaccaatccgaatttccagattataatcggataccacggcggactctatgacccattaaccaagctggttcacatggggcgcagagactatgacgtcctggcgggccgttggacaagccctgatcatgaattgtggaaacatctgagttcttccaatgtgatgcccttcaacctgtatatgttcaaaaacaacaatcccatatcaaattcacaggatattaagtgtttcatgaccgacgtcaatagctggctgcttacattcgggtttcagctccacaacgtaattcccggctacccaaaaccagatatggatgccatggagcccagctatgagctgatccatacacagatgaaaacccaagaatgggataactccaaaagtatcctcggcgtgcaatgcgaggtgcagaaacaactgaaagcttttgtgacactggaacgcttcgaccagctatacggtagcaccattacaagttgtcaacaggctccaaagaccaagaaatttgcctcttccgggtcagtgttcggcaagggggtgaaattcgctttgaaagacggtcgggtgaccactgacataattagtgtggctaacgaggatggccgacgagtggccgccatcctgaaccatgcacattacctggagaatttgcattttacgatagatggagtggacacccactattttgttaagcctgggccaagtgagggtgacctggcaatcctgggcctgagcggcggccgccgaacccttgaaaacggcgttaacgtgacagtgtcacaaattaataccgtgctgaacggcagaacccgcaggtataccgatatccagctgcaatacggggccctctgtctgaatacacgctacggtaccactctggatgaagagaaagcccgagtgctggagctggccaggcagcgagctgtgcgccaggcctgggctcgggagcagcaaagattgagggaaggggaagaaggcttgagagcctggactgagggtgagaaacagcaggtgctctcgaccggccgggtccaaggatacgatgggttttttgtgatcagcgtggagcagtacccagaactgtccgacagtgctaataacattcatttcatgcgccagtcagaaatgggccgccgttag

SEQ ID NO: 39538 - DNA, 8310 bp, Artificial Sequence
  derived and/or modified sequence
atggatgtgaaggagaggaagccctaccgcagcctgaccaggagaagagatgctgagcggcgctacaccagcagcagcgctgacagcgaggagggcaaggccccccagaagagctacagcagcagcgagaccctgaaggcctatgaccaggatgcccggctggcctacggcagccgggtgaaggacatcgtgccccaggaggccgaggagttctgcaggactggagccaacttcaccctgcgggagctgggcctggaggaggtgaccccaccccacggcaccctgtacagaacagacatcggcctgccccactgcggctacagcatgggcgccggcagtgatgctgacatggaggccgacacagtgctgagccctgagcaccctgtgcggctgtggggccgcagcaccaggagcggccgcagcagctgcctgagcagccgggccaacagcaacctgaccctgacagacacagaacatgagaacacagaaacagaccaccctgggggcctgcagaaccacgcccggctgcggaccccacctccacccctgagccacgcccacacccccaaccagcaccacgccgccagcatcaacagcctgaacagaggcaacttcacccccaggagcaaccccagccctgcccccacagaccacagcctgtctggagagcccccagctgggggcgcccaggagcccgcccacgcccaggagaactggctgctgaacagcaacatccccctggagaccaggaacctgggcaagcagcccttcctgggcaccctgcaggacaacctgattgagatggacatcctgggcgccagcagacatgatggagcctacagtgatggccacttcctgttcaagccaggcggcaccagccccctcttctgcaccaccagccctggctaccccctgaccagcagcacagtgtacagccccccaccccggcccctgcccaggagcacctttgcccggcctgccttcaacctgaagaagcccagcaagtactgcaactggaagtgtgccgccctgagcgccatcgtcatcagcgccaccctggtgatcctgctggcctactttgtggccatgcacctgtttggcctgaactggcacctgcagcccatggagggccagatgtatgagatcacagaggacacagccagctcctggcctgtgcccacagatgtgtccctgtaccccagcggcggcaccggcctggagaccccagacaggaagggcaagggcaccacagagggcaagcccagcagcttcttcccagaagattccttcattgattctggagaaattgatgtgggccggcgggccagccagaagatccccccaggcaccttctggaggagccaggtgttcatcgaccaccctgtgcacctgaagttcaacgtgtccctgggcaaggccgccctggtgggcatctacggcaggaagggcctgccccccagccacacccagtttgattttgtggagctgctggatggccggcggctgctgacccaggaggcccggagcctggagggcaccccccggcagagccggggcaccgtgccccccagcagccatgagaccggcttcatccagtacctggacagcggcatctggcacctggccttctacaatgatggcaaggagagcgaggtggtgtccttcctgaccacagccatcgagagcgtggacaactgccccagcaactgctatggaaatggagactgcatcagcggcacctgccactgcttcctgggcttcctgggccctgactgtggccgggccagctgccctgtgctgtgcagcggaaatggccagtacatgaagggccgctgcctgtgccacagcggctggaagggagcagaatgtgatgtgcccaccaaccagtgcattgatgtggcctgcagcaaccacggcacctgcatcaccggcacctgcatctgcaaccctggctacaagggggagagctgtgaggaggtggactgcatggaccccacctgcagcggccggggcgtgtgtgtgagaggagagtgccactgcagcgtgggctggggcggcaccaactgtgagaccccccgggccacctgcctggaccagtgcagcggccacggcaccttcctgcctgacaccggcctgtgcagctgtgaccccagctggacaggccatgactgcagcattgagatctgtgccgctgactgtggcggccacggcgtgtgtgtgggcggcacctgccgctgtgaagatggctggatgggcgccgcctgtgaccagagggcctgccacccccgctgtgccgagcacggcacctgcagagatggaaaatgtgagtgcagccctggctggaatggagagcactgcaccatcgcccactacctggacagagtggtgaaggagggctgccccggcctgtgcaatggaaatggccgctgcaccctggacctgaatggctggcactgtgtgtgccagctgggctggaggggggccggctgtgacacctccatggagacagcctgtggggacagcaaggacaatgatggagatggcctggtggactgcatggaccctgactgctgcctgcagcccctgtgccacatcaaccccctgtgcctgggcagccccaaccccctggacatcatccaggagacccaggtgcctgtgtcccagcagaacctgcacagcttctatgaccgcatcaagttcctggtgggccgggacagcacccacatcatccctggagagaacccctttgatggcggccacgcctgcgtcatccggggccaggtgatgaccagtgatggcacccccctggtgggcgtgaacatcagctttgtgaacaaccccctgtttggctacaccatcagccggcaggacggcagctttgacctggtgaccaatggaggcatcagcatcatcctgcgctttgagcgggcccccttcatcacccaggagcacaccctgtggctgccctgggaccgcttctttgtgatggagaccatcatcatgagacatgaagaaaatgagatccccagctgtgacctgagcaactttgcccggcccaaccctgtggtgagccccagccccctgaccagctttgccagcagctgtgccgagaagggccccatcgtgcctgagatccaggccctgcaggaggagatcagcatcagcggctgcaagatgaggctgagctacctgagcagcaggaccccaggctacaagtctgtgctgcgcatcagcctgacccaccccaccatccccttcaacctgatgaaggtgcacctgatggtggccgtggagggccgcctcttcaggaagtggtttgctgctgccccagacctgagctactacttcatctgggacaagacagatgtgtacaaccagaaggtgtttggcctgtctgaggcctttgtgtctgtgggctatgaatatgagagctgcccagacctgatcctgtgggagaagaggaccaccgtgctgcagggctatgaaattgatgccagcaagctgggcggctggagcctggacaagcaccacgccctgaacatccagagcggcatcctgcacaagggaaatggagagaaccagtttgtgtcccagcagccccctgtgattggcagcatcatgggaaatggaagaagaagaagcatcagctgccccagctgcaatggcctggctgatggcaacaagctgctggcccctgtggccctgacctgtggcagtgatggcagcctgtatgtgggggacttcaactacatccgccgcatcttccccagcggaaatgtgaccaacatcctggagctgaggaacaaggacttccgccacagccacagccctgcccacaagtactacctggccacagaccccatgtctggagctgtgttcctgagtgacagcaacagccggcgggtcttcaagatcaagagcacagtggtggtgaaggacctggtgaagaacagcgaggtggtggccggcaccggggaccagtgcctgccctttgatgacacccgctgtggagatggcggcaaggccacagaggccaccctgaccaacccccggggcatcaccgtggacaagtttggcctcatctactttgtggatggcaccatgatcagaagaattgaccagaatggcatcatcagcaccctgctgggcagcaatgacctgaccagcgcccggcccctgagctgtgacagcgtgatggacatcagccaggtgcacctggagtggcccacagacctggccatcaaccccatggacaacagcctgtatgtgctggacaacaacgtggtgctgcagatcagcgagaaccaccaggtgcgcatcgtggccggccggcccatgcactgccaggtgcccggcatcgaccacttcctgctgagcaaggtggccatccacgccaccctggagagcgccacagccctggccgtgagccacaacggggtgctgtacatcgccgagacagatgagaagaagatcaaccgcatccggcaggtgaccaccagcggggagatcagcctggtggccggggcccccagcggctgtgactgcaagaatgatgccaactgtgactgcttctctggagatgatggctacgccaaggatgccaagctgaacacccccagcagcctggccgtgtgtgctgatggagagctgtatgtggccgacctgggcaacatccgcatccgcttcatcaggaagaacaagcccttcctgaacacccagaacatgtatgagctgagcagccccatcgaccaggagctgtacctgtttgacaccaccgggaagcacctgtacacccagagcctgcccactggagactacctgtacaacttcacctacacaggagatggagacatcaccctcatcacagacaacaatggaaacatggtgaatgtgcggcgggacagcacaggcatgcccctgtggctggtggtgcctgatggccaggtgtactgggtgaccatgggcaccaacagcgccctgaagtctgtgaccacccagggccacgagctggccatgatgacctaccacggcaacagcggcctgctggccaccaagagcaatgaaaatggctggaccaccttctatgaatatgacagctttggccgcctgaccaacgtgaccttccccaccggccaggtgtcctccttcagaagtgacacagacagctctgtgcacgtgcaggtggagaccagcagcaaggatgatgtgaccatcaccaccaacctgagcgccagcggggccttctacaccctgctgcaggaccaggtgagaaattcctactacatcggggctgatggcagcctgcggctgctgctggccaacggcatggaggtggccctgcagacagagccccacctgctggccggcaccgtgaaccccaccgtgggcaagagaaatgtgaccctgcccatcgacaatggcctgaacctggtggagtggaggcagaggaaggagcaggcccggggccaggtgacagtgtttggaagaaggctgcgggtgcacaacagaaacctgctgagcctggactttgacagagtgaccaggacagagaagatctatgatgaccacaggaagttcaccctgcgcatcctgtatgaccaggccggccggcccagcctgtggagccccagcagccggctgaatggagtgaatgtgacctacagccctgggggctacatcgccggcatccagaggggcatcatgtctgagaggatggagtatgaccaggccggccgcatcaccagccgcatctttgctgatggcaagacctggagctacacctacctggagaagtccatggtgctgctgctgcacagccagaggcagtacatctttgaatttgacaagaatgaccggctgagctctgtgaccatgcccaacgtggcccggcagaccctggagaccatccgctctgtgggctactacagaaacatctaccagcccccagagggcaatgccagcgtcatccaggacttcacagaagatggccacctgctgcacaccttctacctgggcaccggccggcgggtcatctacaagtatggcaagctgagcaagctggccgagaccctgtatgacaccaccaaggtgtccttcacctatgatgaaacagctggcatgctgaagaccatcaacctgcagaatgaaggcttcacctgcaccatccgctaccggcagatcggccccctgattgaccggcagatcttccgcttcacagaggagggcatggtgaatgccaggtttgactacaactatgacaacagcttccgggtgacctccatgcaggccgtcatcaatgagacccccctgcccatcgacctgtaccgctatgatgatgtgtctgggaagacagagcagtttgggaagtttggagtcatctactatgacatcaaccagatcatcaccacagctgtgatgacccacaccaagcactttgatgcctacggccgcatgaaggaggtgcagtatgagatcttccgcagcctgatgtactggatgacagtgcagtatgacaacatgggccgggtggtgaagaaggagctgaaggtgggcccctatgccaacaccacccgctacagctatgaatatgatgctgatggccagctgcagacagtgtccatcaatgacaagcccctgtggagatacagctatgacctgaatggaaacctgcacctgctgagccctggcaacagcgcccggctgacccccctgcgctatgacatccgggaccgcatcacccggctgggagatgtgcagtacaagatggatgaagatggcttcctgcggcagagaggaggagacatctttgagtacaacagcgctggcctgctgatcaaggcctacaacagagctggctcctggagcgtgcgctaccgctatgatggcctgggccggcgggtgagcagcaagagcagccacagccaccacctgcagttcttctatgctgacctgaccaaccccaccaaggtgacccacctgtacaaccacagcagcagcgagatcaccagcctgtactatgacctgcagggccacctgtttgccatggagctgagcagtggagatgagttctacatcgcctgtgacaacatcggcacccccctggccgtgttttctggaacaggcctgatgatcaagcagatcctgtacacagcctatggagagatctacatggacaccaaccccaacttccagatcatcatcggctaccatggaggcctgtatgaccccctgaccaagctggtgcacatgggccggcgggactatgatgtgctggccggccgctggaccagcccagaccacgagctgtggaagcacctgagcagcagcaatgtgatgcccttcaacctgtacatgttcaagaacaacaaccccatcagcaacagccaggacatcaagtgcttcatgacagatgtgaacagctggctgctgaccttcggcttccagctgcacaacgtcatccctggctaccccaagccagacatggatgccatggagcccagctatgagctgatccacacccagatgaagacccaggagtgggacaacagcaagagcatcctgggcgtgcagtgtgaggtgcagaagcagctgaaggcctttgtgaccctggagagatttgaccagctgtatggcagcaccatcaccagctgccagcaggcccccaagaccaagaagtttgccagcagcggctctgtgtttgggaagggcgtgaagtttgccctgaaggatggccgggtgaccacagacatcatctctgtggccaatgaagatggccggcgggtggccgccatcctgaaccacgcccactacctggagaacctgcacttcaccattgatggagtggacacccactactttgtgaagccaggccccagcgagggggacctggccatcctgggcctgagcggcggccgccgcaccctggagaatggagtgaatgtgacagtgtcccagatcaacacagtgctgaatggaagaacaagacgctacacagacatccagctgcagtacggggccctgtgcctgaacaccaggtatggcaccaccctggatgaggagaaggcccgggtgctggagctggcccggcagagagctgtgcggcaggcctgggcccgggagcagcagaggctgcgggagggggaggagggcctgcgggcctggacagaaggagagaagcagcaggtgctgagcacaggccgggtgcagggctatgatggcttctttgtgatctctgtggagcagtacccagagctgagtgacagcgccaacaacatccacttcatgaggcagagcgagatgggcagaagatag

SEQ ID NO: 39539 - DNA, 8310 bp, Artificial Sequence
  derived and/or modified sequence
atggacgtgaaggagcggaagccctaccggagcctgacccggcggagagacgcagagcggaggtacacaagctcatctgccgacagcgaagagggtaaagctcctcagaagagctattcttcaagcgaaacactcaaagcttacgatcaggacgcccgactggcttatggaagtagggtcaaggacattgttcctcaggaggctgaagaattctgccggactggggccaactttacacttcgggagctaggcttggaggaggtgacgcctccacatggtacgctctataggacagacataggactgccacactgcggctacagcatgggagccggaagcgacgccgacatggaggccgatacagttctgtcacccgagcacccagtgcgcttatgggggaggtcaactaggagcggacggtcaagctgtctgagcagccgagccaattcaaacctcacgctcactgacacagagcacgagaatacggagaccgaccaccctgggggcctgcagaatcacgcgcgactcagaacacccccaccaccactcagccatgctcacactcccaaccaacatcacgcagcttccatcaactcacttaataggggcaacttcacaccacgaagtaatccttccccagctcccactgatcactctctgagcggcgagcctccagccggaggagcccaggaaccggcgcacgctcaggaaaactggttattgaatagcaatatcccactggagactcgaaacctgggaaagcaacccttcctaggtaccctccaggataacctcattgaaatggacatcctgggcgcctctcgccacgacggcgcatatagtgacggccacttcctgttcaagcccggtggtacaagcccacttttctgcacaacttcacccggatatcccctgaccagcagtactgtgtattcacccccgcctcggcccctcccgcggagcacctttgcaagaccagcattcaacctgaaaaaaccatctaagtactgcaactggaagtgcgctgcccttagtgcaatcgtgatctcggctacactggtgatcttacttgcttacttcgttgcgatgcacctcttcggactgaattggcatttgcagcccatggaggggcagatgtatgaaatcaccgaggacacggcttcttcctggccggtccccacagatgtgagcctgtacccaagcggagggacagggctggaaacccctgaccgcaaaggaaagggaacaacagagggcaagccctcctcctttttccctgaggactccttcattgattcaggtgaaattgacgtgggtcgtcgggcaagtcagaaaatccctccaggtactttctggaggtcccaagtctttatcgatcacccggtgcacctcaagttcaacgtgagtctgggcaaagcagcactcgtcgggatctacggtcgtaagggcctgccacccagccatacccagttcgacttcgttgaacttctggacggtcgccggctccttacacaggaagcgagaagtctagaaggaaccccacgacagtcacgcgggacagtccctccgtcctcccacgaaactggcttcatacagtatctagactccggcatttggcatctggccttctacaacgatggtaaagagagtgaggtagtgagctttcttacaaccgccattgagtcggtcgacaattgtccaagcaactgttatggtaatggtgactgtatttctggcacttgccattgttttttgggtttcctgggccccgattgtggacgggcctcctgcccagtcctttgtagcgggaatgggcagtacatgaaaggtcgatgcctatgtcatagcggctggaagggagccgagtgtgatgttccgaccaatcagtgcatcgacgtcgcctgctctaatcatgggacctgtatcacaggaacctgcatctgtaaccctggctataaaggcgaatcatgcgaggaggttgactgcatggatcccacctgcagtggacgaggcgtgtgcgtaaggggagagtgccattgcagcgtggggtggggcggcactaactgtgaaacacctagagctacatgtctggatcagtgctctggccacggcacttttctgcccgacactgggctgtgttcatgtgacccaagttggacggggcacgattgtagcatcgagatctgcgccgcagactgtggcggccacggcgtgtgcgtcggaggcacatgccgatgtgaggacgggtggatgggcgccgcatgcgatcagcgcgcatgtcatcctcgatgcgccgagcacggcacttgcagggatgggaagtgtgagtgtagtcccggttggaacggtgagcactgtacaatcgcccactacctggatagagtggtgaaagagggctgcccaggactttgtaacgggaatggacgctgcaccctggacctcaatgggtggcactgtgtatgccagttaggatggcgaggggctggatgtgacacaagcatggagaccgcctgcggggattcaaaagataacgatggcgatggcctcgtggactgcatggatccagactgctgtttgcaacctctttgtcacattaatcctttgtgcctgggctcccccaacccactggacatcatccaggagacccaagtgccagtgtcgcagcagaatctgcattctttttatgacagaataaagtttctggtggggagagattccacacatatcattcctggtgagaacccatttgacggcgggcatgcctgcgtgattcgagggcaagttatgacgtccgacgggacgcccctggtgggcgttaatataagcttcgttaacaatccacttttcgggtataccatctctagacaggatggcagctttgatctcgtcacaaacggcggcatttcaataattctgcgctttgaaagagcccctttcatcacgcaggaacataccctgtggctcccttgggaccgattcttcgttatggagacaatcatcatgcgccatgaagagaacgaaatcccaagctgcgatctgtcaaatttcgctagacctaaccctgttgtgtcaccctcacctctgacctcttttgcctccagttgcgctgaaaaaggccccatcgttcccgagatccaggccttacaggaggaaatttctatctctggatgtaaaatgcgtctgagctacctgagtagccggaccccaggttataagtcagtactaagaatatccctgacccatcccaccatcccttttaacctgatgaaagtgcacctgatggttgcagtggagggtcgtctgtttagaaagtggtttgctgcggcgccggacttgtcttattatttcatatgggacaagactgacgtctacaaccagaaagtgtttggcctctccgaggcctttgtgagcgtcggctatgagtatgagtcgtgccctgacttaatcctgtgggaaaaacgcacaacagttctgcaaggctacgaaatcgatgcttcaaagctgggtggatggtcactggataagcaccatgctctgaacatacagagtggaattttgcacaagggaaatggggagaaccagttcgtgagccagcagccacctgtgattggttctatcatggggaacgggcgacggaggtccatctcctgcccctcatgcaacggcctcgcagatggaaataagttgctagctccggttgcccttacctgcggctctgacgggtccttgtacgtcggagatttcaactatatcagacggatctttccctcgggcaatgtgacaaacatcctggaactccgcaataaagattttaggcattctcattcccctgctcacaaatactacttagctactgatcccatgagcggagcagtattcctgagcgattcaaactccagaagggtctttaagattaaatccaccgtcgtggtgaaggacctcgtgaaaaacagtgaggtggtggccggcaccggggaccaatgcctgccgtttgacgacaccaggtgtggcgatggcggcaaggccactgaggcaaccctcacaaaccctagaggcatcaccgttgacaaattcggcctgatctacttcgttgatggtaccatgattcgccgtattgaccaaaatggaatcatttctacactgctgggaagtaatgatcttacaagtgcccgacctttgagctgcgactcagttatggacatttcccaggttcatctggaatggcccaccgaccttgctataaacccgatggacaacagcctttacgttctggacaataatgtggtacttcagataagtgagaaccaccaggttagaatcgtcgccggcaggcccatgcactgccaggttccagggattgaccatttcctgttaagcaaagtggcaatccacgctaccttggagagcgccaccgccctcgctgtgagccacaatggggtactttacattgccgaaacagatgaaaaaaaaatcaaccgcattaggcaggtcacaacctcaggcgaaatttcattagtggccggcgctccatcaggatgcgactgcaagaatgacgcaaattgtgactgcttcagcggcgatgatggatatgccaaagacgctaaactgaacactccctcatcactcgctgtctgtgctgacggggaactatatgtcgccgatcttggtaatatcagaatccgatttattagaaagaacaagcctttcctcaacacacagaatatgtacgaattgtcatcccccatcgatcaggagctttatctcttcgatacgactggcaagcatctctacactcagtcactccccaccggcgactacctgtacaactttacatatacaggggacggagatatcaccctcatcacagataacaatggaaatatggtgaatgtcaggagggactcaacaggcatgcctctgtggttggtggtccccgacgggcaggtgtactgggtgacgatggggaccaattctgccctgaagtctgtgactactcagggacacgaactcgccatgatgacatatcatgggaatagcgggctgctcgccactaagtctaacgaaaatggctggaccacattctacgaatatgattccttcggacgcctgactaacgtcacttttcccactggacaggtgtcgagttttcggagcgacacagatagttccgtacacgtccaagtggagaccagtagcaaagatgacgtcactattacaactaatctcagtgccagtggcgccttttacaccttacttcaagatcaggtgcggaattcttattacattggtgccgacggcagccttaggctccttctggctaatggtatggaggttgcactgcaaacagaaccgcatctactggccggtaccgtgaatcccacggtgggaaaacgaaacgtcacactgcctatagacaatggactgaacctggtggagtggcgccaacggaaggagcaagctaggggtcaagttactgttttcgggcgccgtctgcgagtgcacaacaggaatctcctttctcttgactttgacagagtgacacgtactgaaaagatttacgatgatcaccgaaagtttacattaaggattctttacgaccaggctggtcgcccatccctatggagcccttcttccagattaaatggcgtcaacgtgacatattccccgggtgggtatattgctggcattcagcgaggcattatgtcagaacgaatggagtacgatcaggccggaagaattacttctagaatatttgctgacggtaagacttggtcttatacttacctcgagaagtcaatggtgcttcttctgcattcccagagacagtatatatttgagttcgacaagaacgatagactttcatcggtgactatgccgaatgttgccaggcaaaccttagagaccattcgcagtgtcggctactatcggaacatctaccagccccccgaaggtaacgcctcagtgatacaggacttcacagaagacggtcacctcctgcacaccttttatctcggtacagggagaagggtgatctacaagtacggcaaactgagtaagctggcagaaaccctctacgacaccaccaaggttagcttcacctacgacgaaaccgccggcatgctgaaaaccatcaacctgcaaaacgaggggttcacctgtaccatccgctatcggcagataggcccactaattgatcgtcagatttttcgattcaccgaggaaggcatggtgaatgcaaggtttgactacaattatgacaattcatttagagttacttcaatgcaggcagttattaatgagacccccctccctatcgacctctaccgctacgacgacgtttccggaaaaaccgaacagttcggcaagtttggcgtgatctattacgacatcaaccagatcatcacaacagccgtcatgacgcataccaagcattttgatgcgtacggaagaatgaaggaggtgcagtacgagatttttaggagtctcatgtactggatgactgtacagtacgacaatatgggtagagttgtcaagaaggagctcaaagtgggaccttacgcaaatactactcgttattcctatgagtatgacgctgacggtcagctccagactgtgtcaatcaacgacaagcctctttggcgctactcctacgacctgaatgggaatttgcacctgttgtctccgggcaactccgcgcgcttgaccccactccgttatgacatccgcgataggataactaggttaggagatgtccagtataagatggatgaggatggattcctaaggcaacgcggcggcgatatcttcgagtacaatagcgccggcttattgataaaggcttacaacagagccgggtcttggtcagtgcgctatcggtatgacggactcggtaggcgcgtatcatctaaaagtagccattcgcatcacctccagtttttctacgcggatctcactaaccctacaaaggtgacacacctttataatcacagctcctccgaaattacatctctgtactacgatttacaaggacatctatttgccatggaacttagtagtggcgatgagttttacatcgcttgcgacaatattggaacccctttggccgtcttcagcggaacaggccttatgattaagcagatcttatacactgcctatggtgagatttacatggatactaaccctaactttcagataatcatcggataccatggcggcttgtatgatcccctcacaaagttagttcatatggggagacgggactacgacgtgctcgctgggcgttggacttcccctgatcacgagctttggaagcacctgtcatcttcaaacgtaatgccttttaatctctacatgtttaagaacaacaacccgatcagcaactctcaggacataaagtgctttatgactgacgtcaactcttggctgctgacatttggatttcagctccacaatgtcatcccgggctaccccaagccagacatggatgctatggagccgagttacgagctgatacatacccagatgaagactcaggagtgggataacagcaagagcattcttggagttcagtgcgaggttcagaagcaactgaaagccttcgttaccctggaacgattcgatcaattatacggcagcaccataacgtcctgtcagcaggccccaaagacaaaaaaatttgctagtagtggctcggtgtttgggaaaggtgtgaagttcgccctcaaggacggtcgggtgaccacagacattattagcgtcgctaacgaagacggtagacgggtggccgctatcctgaatcatgcacactatctggagaatcttcattttactatagacggagtggacacccactacttcgttaaaccagggccatctgagggagaccttgcaattctgggccttagtggaggtcgtcgcacgctggaaaacggggtgaatgtgacagtgtcccagataaatacagtccttaatggcaggacgcgacgctataccgatattcagctccagtatggcgcactttgtctgaacactaggtatggcacaaccctggacgaagagaaagccagagttcttgaactcgcaaggcagagagctgtgcgccaggcctgggcccgagaacagcagagacttcgcgagggagaagaggggctccgggcatggacggagggcgagaaacaacaagtgttgagtacaggacgagtccaggggtacgacggattctttgtcatcagcgttgaacagtacccggagttgtctgattcagccaacaacatccactttatgcgacaatccgaaatgggcagaagatag

SEQ ID NO: 39540 - DNA, 8310 bp, Artificial Sequence
  derived and/or modified sequence
atggatgtcaaagaaaggaagccttaccggtcactgactaggcgtcgagatgccgagagacgctacacttcttctagcgccgattctgaggaaggcaaagctccgcagaagtcttatagcagcagcgaaacactgaaagcctatgatcaggatgccaggctagcctacgggtctagggtgaaggacatcgtgcctcaggaggcagaagagttttgtaggactggagccaatttcactcttcgggagctggggctcgaagaggtgacacctccacacggcacactctacaggactgacattggcctccctcactgtggatactccatgggcgctgggtcagatgctgacatggaggccgataccgtgctgtctcctgaacaccccgtgaggttatggggccgtagcacacgtagtgggcgatcttcttgcctgtcaagccgcgctaattccaacctgacattaaccgataccgagcacgagaacacggaaactgaccaccccggaggcctgcagaaccacgcacgcctgcgcactccaccaccccctttgtcacacgcacacacaccaaaccagcaccatgctgccagtattaactctctcaatagagggaattttacaccccgaagcaatccctcacctgcccctacggaccacagccttagtggcgagccaccggctggcggtgcccaggagcccgctcatgcacaggagaactggctcctaaattcgaatattccgcttgaaacccgaaacttagggaagcagcctttccttggcacactgcaagacaacctcatcgagatggatattttgggagcaagccggcacgatggggcatatagcgacggtcatttcctcttcaagcctggcggaacctccccacttttctgcacaaccagccccggttaccccctgaccagttcaacggtgtactcacctcctccccgacctcttccgagaagtacattcgccagacctgcctttaacctgaagaaaccttccaaatattgcaactggaagtgcgccgctctgagcgcaattgtcatcagcgcgaccctcgttattttgctggcctattttgtagctatgcacctgttcggactcaactggcatcttcagcctatggaaggccaaatgtacgagatcaccgaggacaccgccagcagttggcccgtgccaaccgatgtgagtctttacccttctggtggaacaggtttggagacgcctgacaggaaaggaaaaggaactacagaggggaaaccatcgtcctttttcccagaggacagcttcatcgactccggcgagatcgatgtggggaggcgtgcatcgcagaagatccctcccggtacgttttggcgctctcaagtgttcatcgaccatcctgtccatctgaaatttaatgtgagtctcggaaaggcggcactggtgggcatatatggacggaagggcctgcccccttcacatacacagttcgacttcgtggagctcttggacggcagaaggctacttacccaggaggcacgctccttggaggggacgcctcgtcagagtcgaggcacggtgccaccctcaagtcacgagaccgggttcattcagtacctggactccgggatctggcacctcgccttctacaatgatggtaaagaatctgaagtggtgagctttctgaccacagcgatcgaatcggtcgataattgccctagtaactgctatggtaatggcgattgcatctctggaacatgccactgttttttaggctttctgggccctgactgtggacgcgcttcctgcccggtgctttgcagcggaaacggccagtacatgaaggggaggtgcctgtgtcactcagggtggaagggagcagaatgtgatgtgcctaccaaccagtgcatcgatgtggcttgcagcaatcacggcacctgtatcacagggacgtgtatatgcaaccccggttacaaaggggagagttgcgaagaggtggattgtatggatccaacgtgcagtggcaggggggtgtgcgtcagaggtgagtgccactgcagcgtaggctggggcggaactaactgtgaaacgcctagggccacctgccttgatcaatgcagtggccatggcacatttctcccagatacaggcctttgttcctgtgatccatcttggacaggccacgattgctcaatcgaaatctgcgctgctgattgcggcggacatggcgtctgcgtgggtggtacctgcagatgcgaagacgggtggatgggggctgcatgcgatcagagggcttgccacccgaggtgcgccgagcacggtacatgtagggacggcaaatgcgagtgctcacccggatggaacggcgagcactgcaccattgcacattacctggatcgggtggtgaaggagggctgtccaggcctatgcaacggaaatggacgctgcacactcgacctgaatggctggcactgcgtgtgccagctcggatggcgaggcgctggctgtgacacatcaatggaaaccgcctgcggggactcaaaggataatgacggagacggcctcgtcgactgcatggaccccgattgttgtctccaacctttgtgccacatcaacccactgtgtctggggtccccaaacccactagatatcatccaggagacgcaggtgcctgtgagtcagcaaaaccttcattcattttacgataggattaaattcctcgtggggagggattcgacccacattatccctggtgagaaccccttcgacggaggccatgcttgtgtcattcggggtcaggtgatgacaagtgacggtacccctctcgtgggggtcaatatatcttttgtcaacaatccactgttcgggtacacgatctcaagacaggacggctctttcgacctcgtgactaacgggggaatttcaataatcctgcggtttgaaagggctccctttatcactcaagaacacaccctttggctaccctgggatcggtttttcgtcatggaaacaatcattatgagacatgaagagaacgaaattccttcctgtgatctgtcaaatttcgcccgacctaaccctgtcgtctcacccagcccactgacatcatttgcatcatcctgcgctgaaaaagggcctatcgtacccgaaatccaggcattacaggaggagatcagtatatcaggctgcaagatgagactaagttacctgagctcccggactccaggatacaagtctgttttaaggatcagtctgacacaccccactattcctttcaatcttatgaaggtgcacctgatggtggcagtggaggggaggctctttaggaagtggtttgcggcagcccctgaccttagctactatttcatctgggacaaaactgatgtctacaatcagaaggtatttggcctctccgaggcgttcgttagcgtgggttacgaatacgagagctgtcctgacttgattttatgggagaagagaaccacagttttacaaggatacgagatcgacgcctctaaactgggtgggtggagccttgataagcaccatgccctcaatatacaatccggcatactacacaaaggcaacggcgaaaatcagttcgtctcacagcaaccgcctgtgatcggatccatcatgggcaacggtcggcgacggtccattagttgtccttcatgcaatggactcgcagatggcaataagttacttgctcctgtcgcattaacttgtgggagtgatgggtccttatatgtgggtgattttaactatatccgcaggatcttcccttcaggtaacgtaactaacatcttggaactgcgcaataaggattttcggcattcgcattcccctgcccacaagtactaccttgccaccgatccgatgagtggtgcagtgttcctgtcagactctaacagtagacgagtgttcaaaatcaaatccaccgtggtggtgaaggatctcgtgaaaaactccgaggtggtggcgggtaccggcgaccagtgtctcccgtttgacgatacacgatgcggcgacggcggaaaggcaacggaggcgacattgacaaatcctcgagggatcacagtggataagtttgggctgatctactttgtagatggcacaatgatcagacggatcgaccaaaatgggatcatctccaccttgctcgggtccaacgaccttacttccgctaggccattgagctgcgatagcgtgatggatatcagtcaggtccacctcgagtggcctaccgatttagctattaatccaatggacaattcactgtacgtgctggacaacaacgtggtcctgcagatttccgaaaaccaccaggtccgcatcgtggccggtcgacccatgcactgccaagttccaggaatcgatcacttcctcttgtctaaggtcgctatacacgctacactggagtctgctacagcactggctgtgagccacaacggcgtactttacatagcagagactgatgaaaaaaagattaaccgaattcgccaggtgaccacatctggagagatttccctggttgccggagccccaagtgggtgcgattgcaaaaatgacgccaactgcgactgcttcagcggagatgacgggtatgccaaggacgccaagctgaacacaccctctagcctggccgtctgtgctgacggcgagttgtacgtggccgatctcggaaacattcgaatccgattcataagaaaaaacaagccattccttaacactcagaacatgtacgagcttagctctccaattgaccaggaattatacctttttgacacaaccggaaaacacctatatactcaatcactgcctacaggggactatctgtacaactttacctacaccggcgacggcgacattacgttgataactgataataacggcaacatggtgaacgtgagacgagactcaactgggatgccactgtggctggtggtgcccgacggccaggtttactgggtcacgatgggcaccaattccgcactgaagtctgtgaccacacagggacatgagctcgcgatgatgacctaccatggaaattccggattgttggccactaaaagtaacgagaatggttggactacattttacgagtatgacagcttcgggagactgacaaacgtgacatttccaacaggtcaagtgtctagcttcagatccgatacggacagttccgttcatgtgcaggtggagacctccagtaaagacgacgtgacgattactactaatctaagtgccagtggagctttctataccctcctgcaagatcaggtcaggaactcctattatataggcgcagatggatcattgcgattgttgctggctaacggaatggaagtggccttgcagacggaaccccatttgcttgccggtaccgtgaatcccactgtcggtaaacgtaatgtcaccctcccgatcgacaacggcctgaatctggtcgaatggaggcagagaaaggaacaggcccgtggccaggtgaccgtctttgggaggcgactgcgggtgcataatcgaaatctgttgtcattggatttcgatagggtgacgcggacagaaaagatctatgacgaccacagaaagttcacactaaggatcctgtatgaccaagctgggaggcccagtctgtggtctccctctagcagacttaacggcgtaaatgtgacatactccccagggggttatatagcaggcatccagcggggaatcatgtctgagaggatggagtacgaccaggcagggaggatcacttcgagaattttcgcagacggcaagacctggtcctatacgtatctggagaagagcatggtgttactgctccatagccagcgtcagtatatctttgaattcgacaagaacgatagactgtcctcggtcacaatgcctaatgtagcccgacagacgctggaaacaatcaggagtgtgggatattatcgaaatatttaccaacctcccgagggtaatgcctctgtaatacaagatttcaccgaggatggccaccttttacacaccttttacctgggcacaggccgacgcgtgatttacaagtatgggaaattgagcaaattagcagaaacactgtacgatacaaccaaggtctcatttacctacgatgaaacagcaggaatgttaaagacgatcaacttgcagaatgagggctttacctgcactatccggtaccgccaaattgggccactaatcgatcgacagattttccggtttacagaggagggcatggtcaatgcacgtttcgactataattacgacaattcctttagagttaccagtatgcaggcagtgattaatgagacacccttgccaatagacctgtatcggtacgacgacgtgtccggcaagactgaacagttcggcaagtttggcgtcatctactacgatatcaaccagatcatcacaactgcggtcatgacccacactaagcacttcgacgcatacggaaggatgaaggaagtgcagtacgaaatttttaggtcccttatgtattggatgacagtccagtacgacaatatgggcagagtagtcaaaaaggaactcaaagttggaccctacgcgaacaccactcggtatagctacgaatacgatgccgacggccagcttcagacagtgtcgattaatgacaagccactctggaggtatagttacgatcttaacggtaacctgcacctcctctctcccggtaattcagcccgactgaccccactgaggtacgatatcagggataggatcacacgcctcggagatgtccaatacaaaatggacgaagatggcttcctgcgccagcggggaggtgatatatttgagtataactctgccggtcttttgattaaagcttataacagagccggtagctggtcagtcagatatagatacgatgggttgggacgtcgagtatcatccaaatcctcccattcccaccacctgcagtttttctatgccgacctcaccaatccgacaaaggtgacccacttatataatcattcttcgtccgaaattaccagcctctattacgacttgcaaggtcacctgttcgccatggaactgtcgtccggggatgagttctatatagcctgcgacaatatcggaacaccccttgctgtcttttccgggactggattgatgattaaacagatcctgtataccgcctatggagagatatatatggatacaaatccaaactttcagattatcatcgggtatcacgggggactctatgaccctctaactaagctggtgcatatgggaagaagggactatgatgtgctggcgggaagatggacttccccagatcacgagctgtggaagcacctctcgagttctaacgtgatgccattcaatctctacatgtttaaaaacaacaaccctattagtaattcgcaggacatcaaatgctttatgactgacgtcaattcctggctcctgacttttggcttccagctccataatgtgatacctgggtacccaaagccagatatggacgcaatggaaccctcatacgaactgatccatacccagatgaaaacacaagagtgggacaactctaagtccatcctgggagtgcaatgtgaggtacagaagcagctgaaggcctttgttaccctggaacgcttcgatcagctgtacgggagcacgatcacttcttgccagcaagcgcctaagacaaaaaaatttgcctctagcggatctgtattcgggaagggtgtgaaatttgccttgaaagacggtagagtgactaccgatatcatctcagttgccaacgaggacggacgaagagtggcagctattctcaaccacgcccactatctggagaatcttcactttacaatagacggtgtcgacacccactacttcgtaaaacccggtcctagtgagggtgacctggccattctcggcttatcaggtggtaggcgaaccctcgagaatggggtgaacgtcaccgttagccaaattaatactgtgcttaatgggagaactagacgctacacagacattcaactgcaatacggcgctctgtgccttaacacccgctatggaacaacactggacgaggagaaagctagggtgcttgagctggctaggcagagggccgtgcgccaggcatgggcaagggagcagcaaagacttcgagaaggagaggaaggtctgagagcatggaccgagggtgagaagcagcaggttctgagcaccggcagagttcagggctacgatggttttttcgtcatctccgtcgagcagtacccagaacttagtgactccgccaataacatccacttcatgcgccagagtgaaatggggagacgctat

SEQ ID NO: 39541 - DNA, 8310 bp, Artificial Sequence
  derived and/or modified sequence
atggacgtgaaggagagaaagccctacagaagcctgaccagaagaagagacgccgagagaagatacaccagcagcagcgccgacagcgaggagggcaaggccccccagaagagctacagcagcagcgagaccctgaaggcctacgaccaggacgccagactggcctacggcagcagagtgaaggacatcgtgccccaggaggccgaggagttctgcagaaccggcgccaacttcaccctgagagagctgggcctggaggaggtgacccccccccacggcaccctgtacagaaccgacatcggcctgccccactgcggctacagcatgggcgccggcagcgacgccgacatggaggccgacaccgtgctgagccccgagcaccccgtgagactgtggggcagaagcaccagaagcggcagaagcagctgcctgagcagcagagccaacagcaacctgaccctgaccgacaccgagcacgagaacaccgagaccgaccaccccggcggcctgcagaaccacgccagactgagaaccccccccccccccctgagccacgcccacacccccaaccagcaccacgccgccagcatcaacagcctgaacagaggcaacttcacccccagaagcaaccccagccccgcccccaccgaccacagcctgagcggcgagccccccgccggcggcgcccaggagcccgcccacgcccaggagaactggctgctgaacagcaacatccccctggagaccagaaacctgggcaagcagcccttcctgggcaccctgcaggacaacctgatcgagatggacatcctgggcgccagcagacacgacggcgcctacagcgacggccacttcctgttcaagcccggcggcaccagccccctgttctgcaccaccagccccggctaccccctgaccagcagcaccgtgtacagccccccccccagacccctgcccagaagcaccttcgccagacccgccttcaacctgaagaagcccagcaagtactgcaactggaagtgcgccgccctgagcgccatcgtgatcagcgccaccctggtgatcctgctggcctacttcgtggccatgcacctgttcggcctgaactggcacctgcagcccatggagggccagatgtacgagatcaccgaggacaccgccagcagctggcccgtgcccaccgacgtgagcctgtaccccagcggcggcaccggcctggagacccccgacagaaagggcaagggcaccaccgagggcaagcccagcagcttcttccccgaggacagcttcatcgacagcggcgagatcgacgtgggcagaagagccagccagaagatcccccccggcaccttctggagaagccaggtgttcatcgaccaccccgtgcacctgaagttcaacgtgagcctgggcaaggccgccctggtgggcatctacggcagaaagggcctgccccccagccacacccagttcgacttcgtggagctgctggacggcagaagactgctgacccaggaggccagaagcctggagggcacccccagacagagcagaggcaccgtgccccccagcagccacgagaccggcttcatccagtacctggacagcggcatctggcacctggccttctacaacgacggcaaggagagcgaggtggtgagcttcctgaccaccgccatcgagagcgtggacaactgccccagcaactgctacggcaacggcgactgcatcagcggcacctgccactgcttcctgggcttcctgggccccgactgcggcagagccagctgccccgtgctgtgcagcggcaacggccagtacatgaagggcagatgcctgtgccacagcggctggaagggcgccgagtgcgacgtgcccaccaaccagtgcatcgacgtggcctgcagcaaccacggcacctgcatcaccggcacctgcatctgcaaccccggctacaagggcgagagctgcgaggaggtggactgcatggaccccacctgcagcggcagaggcgtgtgcgtgagaggcgagtgccactgcagcgtgggctggggcggcaccaactgcgagacccccagagccacctgcctggaccagtgcagcggccacggcaccttcctgcccgacaccggcctgtgcagctgcgaccccagctggaccggccacgactgcagcatcgagatctgcgccgccgactgcggcggccacggcgtgtgcgtgggcggcacctgcagatgcgaggacggctggatgggcgccgcctgcgaccagagagcctgccaccccagatgcgccgagcacggcacctgcagagacggcaagtgcgagtgcagccccggctggaacggcgagcactgcaccatcgcccactacctggacagagtggtgaaggagggctgccccggcctgtgcaacggcaacggcagatgcaccctggacctgaacggctggcactgcgtgtgccagctgggctggagaggcgccggctgcgacaccagcatggagaccgcctgcggcgacagcaaggacaacgacggcgacggcctggtggactgcatggaccccgactgctgcctgcagcccctgtgccacatcaaccccctgtgcctgggcagccccaaccccctggacatcatccaggagacccaggtgcccgtgagccagcagaacctgcacagcttctacgacagaatcaagttcctggtgggcagagacagcacccacatcatccccggcgagaaccccttcgacggcggccacgcctgcgtgatcagaggccaggtgatgaccagcgacggcacccccctggtgggcgtgaacatcagcttcgtgaacaaccccctgttcggctacaccatcagcagacaggacggcagcttcgacctggtgaccaacggcggcatcagcatcatcctgagattcgagagagcccccttcatcacccaggagcacaccctgtggctgccctgggacagattcttcgtgatggagaccatcatcatgagacacgaggagaacgagatccccagctgcgacctgagcaacttcgccagacccaaccccgtggtgagccccagccccctgaccagcttcgccagcagctgcgccgagaagggccccatcgtgcccgagatccaggccctgcaggaggagatcagcatcagcggctgcaagatgagactgagctacctgagcagcagaacccccggctacaagagcgtgctgagaatcagcctgacccaccccaccatccccttcaacctgatgaaggtgcacctgatggtggccgtggagggcagactgttcagaaagtggttcgccgccgcccccgacctgagctactacttcatctgggacaagaccgacgtgtacaaccagaaggtgttcggcctgagcgaggccttcgtgagcgtgggctacgagtacgagagctgccccgacctgatcctgtgggagaagagaaccaccgtgctgcagggctacgagatcgacgccagcaagctgggcggctggagcctggacaagcaccacgccctgaacatccagagcggcatcctgcacaagggcaacggcgagaaccagttcgtgagccagcagccccccgtgatcggcagcatcatgggcaacggcagaagaagaagcatcagctgccccagctgcaacggcctggccgacggcaacaagctgctggcccccgtggccctgacctgcggcagcgacggcagcctgtacgtgggcgacttcaactacatcagaagaatcttccccagcggcaacgtgaccaacatcctggagctgagaaacaaggacttcagacacagccacagccccgcccacaagtactacctggccaccgaccccatgagcggcgccgtgttcctgagcgacagcaacagcagaagagtgttcaagatcaagagcaccgtggtggtgaaggacctggtgaagaacagcgaggtggtggccggcaccggcgaccagtgcctgcccttcgacgacaccagatgcggcgacggcggcaaggccaccgaggccaccctgaccaaccccagaggcatcaccgtggacaagttcggcctgatctacttcgtggacggcaccatgatcagaagaatcgaccagaacggcatcatcagcaccctgctgggcagcaacgacctgaccagcgccagacccctgagctgcgacagcgtgatggacatcagccaggtgcacctggagtggcccaccgacctggccatcaaccccatggacaacagcctgtacgtgctggacaacaacgtggtgctgcagatcagcgagaaccaccaggtgagaatcgtggccggcagacccatgcactgccaggtgcccggcatcgaccacttcctgctgagcaaggtggccatccacgccaccctggagagcgccaccgccctggccgtgagccacaacggcgtgctgtacatcgccgagaccgacgagaagaagatcaacagaatcagacaggtgaccaccagcggcgagatcagcctggtggccggcgcccccagcggctgcgactgcaagaacgacgccaactgcgactgcttcagcggcgacgacggctacgccaaggacgccaagctgaacacccccagcagcctggccgtgtgcgccgacggcgagctgtacgtggccgacctgggcaacatcagaatcagattcatcagaaagaacaagcccttcctgaacacccagaacatgtacgagctgagcagccccatcgaccaggagctgtacctgttcgacaccaccggcaagcacctgtacacccagagcctgcccaccggcgactacctgtacaacttcacctacaccggcgacggcgacatcaccctgatcaccgacaacaacggcaacatggtgaacgtgagaagagacagcaccggcatgcccctgtggctggtggtgcccgacggccaggtgtactgggtgaccatgggcaccaacagcgccctgaagagcgtgaccacccagggccacgagctggccatgatgacctaccacggcaacagcggcctgctggccaccaagagcaacgagaacggctggaccaccttctacgagtacgacagcttcggcagactgaccaacgtgaccttccccaccggccaggtgagcagcttcagaagcgacaccgacagcagcgtgcacgtgcaggtggagaccagcagcaaggacgacgtgaccatcaccaccaacctgagcgccagcggcgccttctacaccctgctgcaggaccaggtgagaaacagctactacatcggcgccgacggcagcctgagactgctgctggccaacggcatggaggtggccctgcagaccgagccccacctgctggccggcaccgtgaaccccaccgtgggcaagagaaacgtgaccctgcccatcgacaacggcctgaacctggtggagtggagacagagaaaggagcaggccagaggccaggtgaccgtgttcggcagaagactgagagtgcacaacagaaacctgctgagcctggacttcgacagagtgaccagaaccgagaagatctacgacgaccacagaaagttcaccctgagaatcctgtacgaccaggccggcagacccagcctgtggagccccagcagcagactgaacggcgtgaacgtgacctacagccccggcggctacatcgccggcatccagagaggcatcatgagcgagagaatggagtacgaccaggccggcagaatcaccagcagaatcttcgccgacggcaagacctggagctacacctacctggagaagagcatggtgctgctgctgcacagccagagacagtacatcttcgagttcgacaagaacgacagactgagcagcgtgaccatgcccaacgtggccagacagaccctggagaccatcagaagcgtgggctactacagaaacatctaccagccccccgagggcaacgccagcgtgatccaggacttcaccgaggacggccacctgctgcacaccttctacctgggcaccggcagaagagtgatctacaagtacggcaagctgagcaagctggccgagaccctgtacgacaccaccaaggtgagcttcacctacgacgagaccgccggcatgctgaagaccatcaacctgcagaacgagggcttcacctgcaccatcagatacagacagatcggccccctgatcgacagacagatcttcagattcaccgaggagggcatggtgaacgccagattcgactacaactacgacaacagcttcagagtgaccagcatgcaggccgtgatcaacgagacccccctgcccatcgacctgtacagatacgacgacgtgagcggcaagaccgagcagttcggcaagttcggcgtgatctactacgacatcaaccagatcatcaccaccgccgtgatgacccacaccaagcacttcgacgcctacggcagaatgaaggaggtgcagtacgagatcttcagaagcctgatgtactggatgaccgtgcagtacgacaacatgggcagagtggtgaagaaggagctgaaggtgggcccctacgccaacaccaccagatacagctacgagtacgacgccgacggccagctgcagaccgtgagcatcaacgacaagcccctgtggagatacagctacgacctgaacggcaacctgcacctgctgagccccggcaacagcgccagactgacccccctgagatacgacatcagagacagaatcaccagactgggcgacgtgcagtacaagatggacgaggacggcttcctgagacagagaggcggcgacatcttcgagtacaacagcgccggcctgctgatcaaggcctacaacagagccggcagctggagcgtgagatacagatacgacggcctgggcagaagagtgagcagcaagagcagccacagccaccacctgcagttcttctacgccgacctgaccaaccccaccaaggtgacccacctgtacaaccacagcagcagcgagatcaccagcctgtactacgacctgcagggccacctgttcgccatggagctgagcagcggcgacgagttctacatcgcctgcgacaacatcggcacccccctggccgtgttcagcggcaccggcctgatgatcaagcagatcctgtacaccgcctacggcgagatctacatggacaccaaccccaacttccagatcatcatcggctaccacggcggcctgtacgaccccctgaccaagctggtgcacatgggcagaagagactacgacgtgctggccggcagatggaccagccccgaccacgagctgtggaagcacctgagcagcagcaacgtgatgcccttcaacctgtacatgttcaagaacaacaaccccatcagcaacagccaggacatcaagtgcttcatgaccgacgtgaacagctggctgctgaccttcggcttccagctgcacaacgtgatccccggctaccccaagcccgacatggacgccatggagcccagctacgagctgatccacacccagatgaagacccaggagtgggacaacagcaagagcatcctgggcgtgcagtgcgaggtgcagaagcagctgaaggccttcgtgaccctggagagattcgaccagctgtacggcagcaccatcaccagctgccagcaggcccccaagaccaagaagttcgccagcagcggcagcgtgttcggcaagggcgtgaagttcgccctgaaggacggcagagtgaccaccgacatcatcagcgtggccaacgaggacggcagaagagtggccgccatcctgaaccacgcccactacctggagaacctgcacttcaccatcgacggcgtggacacccactacttcgtgaagcccggccccagcgagggcgacctggccatcctgggcctgagcggcggcagaagaaccctggagaacggcgtgaacgtgaccgtgagccagatcaacaccgtgctgaacggcagaaccagaagatacaccgacatccagctgcagtacggcgccctgtgcctgaacaccagatacggcaccaccctggacgaggagaaggccagagtgctggagctggccagacagagagccgtgagacaggcctgggccagagagcagcagagactgagagagggcgaggagggcctgagagcctggaccgagggcgagaagcagcaggtgctgagcaccggcagagtgcagggctacgacggcttcttcgtgatcagcgtggagcagtaccccgagctgagcgacagcgccaacaacatccacttcatgagacagagcgagatgggcagaagatag

SEQ ID NO: 39542 - protein, 363 aa, Artificial Sequence
  derived and/or modified sequence
MQRAGGGSAPGGNGGGGGGGPGTAFSIDSLIGPPPPRSGHLLYTGYPMFMPYRPLVLPQALAPAPLPAGLPPLAPLASFAGRLTNTFCAGLGQAVPSMVALTTALPSFAEPPDAFYGPQELAAAAAAAAATAARNNPEPGGRRPEGGLEADELLPAREKVAEPPPPPPPHFSETFPSLPAEGKVYSSDEEKLEASAGDPAGSEQEEEGSGGDSEDDGFLDSSAGGPGALLGPKPKLKGSLGTGAEEGAPVTAGVTAPGGKSRRRRTAFTSEQLLELEKEFHCKKYLSLTERSQIAHALKLSEVQVKIWFQNRRAKWKRIKAGNVSSRSGEPVRNPKIVVPIPVHVNRFAVRSQHQQMEQGARP

SEQ ID NO: 39543 - DNA, 1348 bp, Artificial Sequence
  derived and/or modified sequence
attcgcactagtccagctgctctgaggtgtatatcatcgcgtactgcctgtctctagtcgagaagctggagtgtggtgcgaatgagatgggggtggtgggaagttgaggggatcattgtccacacacttattgcctcccagagttttccgtagtgaaatctgtgctggttaatacctttcttcccatttctttgttttccctaaacctcttcccattccatatcctggacataccatccttctgcctcctgtccctccccatcttctcctctccatggctactcttttttcctgctcttgtctcccaaccccccatttctggcatggttccatgggcctccattggctctcaactctctttctgctctcctcccatcatgcttcttgctcctcacagcagaggaagtgtacagccatagatgaggagaagctgaggcatcagcagagcccagcaggcagcgacaggaggagagggactcaggcgtgacagcggatgacggtttccctggacagttctgcagggggcccaggggctcttctgggacctaaaccgaagctaaagggaagcctggggactggagctgaggagggggcaccggtgacagcaggggtcacagctcctggggggaaaagccgacggcgccgcacagcatttaccagcgagcagcttttggaattggagaaggaatttcattgtaagaaatacctgagcttgacagagcgctctcagatcgcccacgccctcaagctcagtgaggtgcaggtcaagatctggtttcagaatcgacgggccaagtggaagcgcatcaaagctggcaatgtgagcagccgttctggggagcccgtaagaaaccccaagattgttgtccccatacctgtgcatgtcaacaggtttgctgtgcggagccagcaccaacaaatggagcagggggcccggccctgaatgggcacccaagaacttaggaaggcgagggatctgtacctgagcctgctctgagactgtcagggttctgtggaccagaggggctgcaactgtgattctgccttgagaggggctagttgggaattaacctagccctgggtgtgctcttcccagactcatcaagaacctgagatgtgaagcacttgggcctgagcctgttccagagacctcaggactagggcctcaaggttaaagggggctggggttctattgctgagggagctgttgggactgaggtggactcctggggagggggtgggttctaagatgcctaagggcctgaaggttctgtggcaaatgccctggaaccagcttctgatgggtggagggaacaggcgatacctagccaagtagatcgcagctcct

SEQ ID NO: 39544 - DNA, 1092 bp, Artificial Sequence
  derived and/or modified sequence
atgcagagggctggaggtggaagcgcccctgggggtaacggcggcgggggcggaggaggaccggggaccgccttttccatcgactccctgattggtccaccccctcccagatccggccaccttctctataccgggtaccctatgttcatgccgtacagaccgttggttctcccccaggccctagctccggccccgctgcccgccggactccccccattagcgcctctggcttctttcgctggtcgcctaacgaacacattctgtgcaggcctgggccaggctgtgccttctatggtggccctgacaaccgccctcccgtctttcgcggagccgcctgacgccttctatggcccacaagagttagccgccgctgccgctgccgccgccgcaacagccgcacgcaataatccagaacctgggggtcggagaccagagggcgggttggaggctgatgaactattaccagcccgggagaaggtagcagaacctccacccccccctccaccccacttttccgaaactttccccagcctgcccgccgaagggaaggtatactcctccgacgaggagaagttagaggccagtgccggagatcccgccggttctgagcaggaggaagaaggttccggcggggacagtgaggatgacgggttcttggactctagcgccgggggccccggggccttgcttggacccaaacctaagttaaaagggtcactcggcactggggccgaagagggagctcccgttacagctggagtaactgcaccaggcgggaaatccagacggaggaggacagcttttacctccgagcagctgctcgaactagaaaaggaatttcactgtaaaaaatacctctcactgaccgagagaagccaaatcgcacatgctctgaagctgagtgaggtacaggtgaagatctggttccagaatagaagagcaaaatggaaacgtatcaaggccggcaacgtgtcgagccgctccggtgagcctgttcgcaatccaaagatagtggtgcccattcctgtacacgtgaatcgatttgccgttagatcacaacaccagcagatggagcagggtgctcgcccctag

SEQ ID NO: 39545 - DNA, 1092 bp, Artificial Sequence
  derived and/or modified sequence
atgcagcgggccggaggcggtagcgcccctgggggcaacggcgggggcggcggcgggggcccgggcactgccttctccatcgactccctaatcgggccgccgccgccgcgctccggccacttgctgtacaccggctaccccatgttcatgccctaccggccgctcgtgctgccgcaggcgctggcccctgcgccgctgcccgctggcctcccgcccctcgccccgctagcctctttcgccggccgccttaccaacaccttctgcgcggggctgggtcaggctgtgccctcgatggtggcgctgaccaccgcgctgcccagcttcgcggagccgcccgacgctttctacgggccccaggagctcgccgccgccgctgccgccgccgccgccactgccgcccgaaacaaccccgagccaggcggccgacgcccagagggtgggctggaagctgatgagctgctgccggcccgggagaaagtggcagagcccccaccacctccgcctccgcacttctcagagacttttccaagtctgcccgcagaggggaaggtgtacagctcagatgaggagaagctggaggcatcagcaggagacccagcaggcagcgaacaggaggaagagggctcaggcggtgacagcgaggatgacggtttcctggacagttctgcagggggcccaggggctcttctgggacctaaaccgaagctaaagggaagcctggggactggagctgaggagggggcaccggtgacagcaggggtcacagctcctggggggaaaagccgacggcgccgcacagcatttaccagcgagcagcttttggaattggagaaggaatttcattgcaagaaatacctgagcttgacagagcgctctcagatcgcccacgccctcaagctcagtgaggtgcaggtcaagatctggtttcagaatcgacgggccaagtggaagcgcatcaaagctggcaatgtgagcagccgttctggggagcccgtaagaaaccccaagattgttgtccccatacctgtgcatgtcaacaggtttgctgtgcggagccagcaccaacaaatggagcagggggcccggccctga

SEQ ID NO: 39546 - DNA, 1092 bp, Artificial Sequence
  derived and/or modified sequence
atgcagagagctgggggcggcagcgcccctggaggaaatggaggcggcggcggcggcggccctggaacagccttcagcattgacagcctgattggccccccaccacccaggagcggccacctgctgtacacaggctaccccatgttcatgccctaccggcccctggtgctgccccaggccctggccccagcccccctgcctgctggcctgccccccctggcccccctggccagctttgctggccgcctgaccaacaccttctgtgccggcctgggccaggccgtgcccagcatggtggccctgaccacagccctgcccagctttgctgagcccccagatgccttctacggcccccaggagctggccgctgctgctgctgctgctgctgccacagctgccaggaacaaccctgagcccggcggccggcggcctgagggcggcctggaggctgatgagctgctgcctgcccgggagaaggtggccgagcccccacctcctcctccaccccacttcagcgagaccttccccagcctgcctgctgagggcaaggtgtacagcagtgatgaggagaagctggaggccagcgctggggaccctgctggcagcgagcaggaggaggagggcagcggcggggacagtgaagatgatggcttcctggacagcagcgctgggggccctggggccctgctgggccccaagcccaagctgaagggcagcctgggcaccggggctgaggagggcgcccctgtgacagctggggtgacagcccctgggggcaagagcagaagaagaagaacagccttcaccagcgagcagctgctggagctggagaaggagttccactgcaagaagtacctgagcctgacagagaggagccagatcgcccacgccctgaagctgtctgaggtgcaggtgaagatctggttccagaacagaagagccaagtggaagaggatcaaggctggaaatgtgagcagccgcagcggggagcctgtgaggaaccccaagatcgtggtgcccatccctgtgcacgtgaacagatttgctgtgcgcagccagcaccagcagatggagcagggcgcccggccctag

SEQ ID NO: 39547 - DNA, 1092 bp, Artificial Sequence
  derived and/or modified sequence
atgcagcgggccggcggcggcagcgcccccggcggcaacggcggcggcggaggcggcggaccaggtacagccttctcgattgacagcttgattggacctcccccccctcgcagcggacacctgctctacacaggttaccccatgtttatgccctataggcccctggttctcccacaggccctggctcctgctcctctcccagccggcctgccccccctcgctcctctggccagctttgccggaaggctgacgaacactttttgtgccggcctgggccaggctgtcccaagcatggtggcattgactacagccttgccttcctttgccgagcctcccgatgccttttatggcccccaggaactggccgccgctgcagccgccgccgccgccaccgccgctaggaacaatcctgagccgggggggcgccgacccgagggaggattggaggccgatgaactgctgcccgcccgcgaaaaggttgccgaaccgccacctccccctccaccacatttttcagagacatttccttccttgcccgccgagggtaaggtctacagcagcgacgaggaaaaactggaagcttctgctggtgatcccgcggggagtgagcaggaggaggaaggctctggtggagacagtgaagatgatggatttctggattcatccgctgggggcccaggtgcactgttgggcccaaaacccaaactaaagggaagcctaggaacaggtgctgaggaaggagccccggttactgcaggggttaccgctcccggcggcaagtcacgccgaagaaggaccgcttttactagtgagcagcttctggagcttgagaaagaatttcactgcaagaagtacctgagcctgacagaacggtcccagattgcgcacgccttgaaactcagcgaggtgcaggtgaaaatctggtttcagaacaggagggctaagtggaaaagaatcaaggccggcaacgtgagcagtaggtccggagagcctgttaggaatcccaaaattgtggtgcccattcctgttcacgtgaatcgattcgctgtacgtagccagcaccaacagatggagcagggggcgcgaccatag

SEQ ID NO: 39548 - DNA, 1092 bp, Artificial Sequence
  derived and/or modified sequence
atgcaacgagccggaggcggatccgcaccaggtggaaatggtggtggtggcggtggcggtccaggtaccgcttttagtattgacagccttatcggcccacccccaccgagatcaggacatttattgtacacaggctaccctatgtttatgccttaccgcccactggtattgccgcaggctttggcacccgctccactcccagctgggcttccaccactggccccattggcctcattcgcagggcgactgaccaataccttttgcgccggattagggcaagccgtccctagtatggtggccctcaccacggccctaccttcctttgccgagcccccagacgccttttacggcccacaggagctagcggcagcggctgcggcagctgccgctacggcagcccgaaataaccctgagcctggtggtaggcgtccagagggtggacttgaggcagacgagctgctccccgctcgtgagaaggtcgccgagccacccccaccaccccctccgcactttagcgagacgttccccagtctgcccgcagagggaaaggtgtattccagtgacgaggaaaagttggaggcttctgctggagaccccgcagggagcgagcaggaagaggagggcagcggcggtgattcagaagacgacggattcttagacagcagtgctggtgggcctggggcactgctaggtcccaagcccaagctgaaaggctccctgggtactggcgctgaggaaggcgcacctgtgacagctggagtcacagcgccaggcggaaaaagccgcaggcgaagaaccgccttcacaagtgagcaactgctcgaactcgaaaaggagtttcattgcaagaaatacctgtccctgactgagagatcccagatagcccatgctctgaagctgtcggaagtgcaagttaagatttggttccagaatcgcagggcgaaatggaagcgcatcaaggctggcaatgttagctccaggagcggagagccggtgcgcaatcctaagatagtggtccctatccctgtgcatgtaaaccgcttcgccgttcggagccagcatcagcaaatggagcagggcgctagaccatag

SEQ ID NO: 39549 - DNA, 1092 bp, Artificial Sequence
  derived and/or modified sequence
atgcagagagccggcggcggcagcgcccccggcggcaacggcggcggcggcggcggcggccccggcaccgccttcagcatcgacagcctgatcggcccccccccccccagaagcggccacctgctgtacaccggctaccccatgttcatgccctacagacccctggtgctgccccaggccctggcccccgcccccctgcccgccggcctgccccccctggcccccctggccagcttcgccggcagactgaccaacaccttctgcgccggcctgggccaggccgtgcccagcatggtggccctgaccaccgccctgcccagcttcgccgagccccccgacgccttctacggcccccaggagctggccgccgccgccgccgccgccgccgccaccgccgccagaaacaaccccgagcccggcggcagaagacccgagggcggcctggaggccgacgagctgctgcccgccagagagaaggtggccgagccccccccccccccccccccccacttcagcgagaccttccccagcctgcccgccgagggcaaggtgtacagcagcgacgaggagaagctggaggccagcgccggcgaccccgccggcagcgagcaggaggaggagggcagcggcggcgacagcgaggacgacggcttcctggacagcagcgccggcggccccggcgccctgctgggccccaagcccaagctgaagggcagcctgggcaccggcgccgaggagggcgcccccgtgaccgccggcgtgaccgcccccggcggcaagagcagaagaagaagaaccgccttcaccagcgagcagctgctggagctggagaaggagttccactgcaagaagtacctgagcctgaccgagagaagccagatcgcccacgccctgaagctgagcgaggtgcaggtgaagatctggttccagaacagaagagccaagtggaagagaatcaaggccggcaacgtgagcagcagaagcggcgagcccgtgagaaaccccaagatcgtggtgcccatccccgtgcacgtgaacagattcgccgtgagaagccagcaccagcagatggagcagggcgccagaccctag

SEQ ID NO: 39550 - protein, 327 aa, Artificial Sequence
  derived and/or modified sequence
MAWWKAWIEQEGVTVKSSSHFNPDPDAETLYKAMKGIGTNEQAIIDVLTKRSNTQRQQIAKSFKAQFGKDLTETLKSELSGKFERLIVALMYPPYRYEAKELHDAMKGLGTKEGVIIEILASRTKNQLREIMKAYEEDYGSSLEEDIQADTSGYLERILVCLLQGSRDDVSSFVDPALALQDAQDLYAAGENIRGTDEMKFITILCTRSATHLLRVFEEYEKIANKSIEDSIKSETHGSLEEAMLTVVKCTQNLHSYFAERLYYAMKGAGTRDGTLIRNIVSRSEIDLNLIKCHFKKMYGKTLSSMIMEDTSGDYKNALLSLVGSDP

SEQ ID NO: 39551 - protein, 141 aa, Artificial Sequence
  derived and/or modified sequence
MAWWKAWIEQEGVTVKSSSHFNPDPDAETLYKAMKGIGTNEQAIIDVLTKRSNTQRQQIAKSFKAQFGKDLTETLKSELSGKFERLIVALMYPPYRYEAKELHDAMKGLGTKEGVIIEILASRTKNQLREIMKAYEEGQQG

SEQ ID NO: 39552 - DNA, 984 bp, Artificial Sequence
  derived and/or modified sequence
atggcctggtggaaggcctggatcgagcaggagggcgtgaccgtgaagagcagcagccacttcaaccccgaccccgacgccgagaccctgtacaaggccatgaagggcatcggcaccaacgagcaggccatcatcgacgtgctgaccaagagaagcaacacccagagacagcagatcgccaagagcttcaaggcccagttcggcaaggacctgaccgagaccctgaagagcgagctgagcggcaagttcgagagactgatcgtggccctgatgtaccccccctacagatacgaggccaaggagctgcacgacgccatgaagggcctgggcaccaaggagggcgtgatcatcgagatcctggccagcagaaccaagaaccagctgagagagatcatgaaggcctacgaggaggactacggcagcagcctggaggaggacatccaggccgacaccagcggctacctggagagaatcctggtgtgcctgctgcagggcagcagagacgacgtgagcagcttcgtggaccccgccctggccctgcaggacgcccaggacctgtacgccgccggcgagaacatcagaggcaccgacgagatgaagttcatcaccatcctgtgcaccagaagcgccacccacctgctgagagtgttcgaggagtacgagaagatcgccaacaagagcatcgaggacagcatcaagagcgagacccacggcagcctggaggaggccatgctgaccgtggtgaagtgcacccagaacctgcacagctacttcgccgagagactgtactacgccatgaagggcgccggcaccagagacggcaccctgatcagaaacatcgtgagcagaagcgagatcgacctgaacctgatcaagtgccacttcaagaagatgtacggcaagaccctgagcagcatgatcatggaggacaccagcggcgactacaagaacgccctgctgagcctggtgggcagcgacccctag

SEQ ID NO: 39553 - DNA, 984 bp, Artificial Sequence
  derived and/or modified sequence
atggcttggtggaaggcctggatcgagcaggagggggtgactgttaaatcttcctctcatttcaatccagacccagatgccgaaaccctatacaaagccatgaagggcataggcaccaatgagcaggcaatcattgatgttctgactaagcgctccaacacacaacgacagcaaattgctaaaagcttcaaagcccaattcggcaaagatctgactgaaaccctgaaatctgagttatcaggtaagttcgaaaggctcatcgtggccctgatgtatccaccctatagatatgaagccaaggaactgcatgatgctatgaagggcttggggaccaaggagggcgttattatcgagatcctcgcatcgcggactaagaaccagctgcgggagatcatgaaggcctatgaggaggattatggtagttcgttggaggaggatattcaggcagacactagcggctacctggagcgaatcctggtctgtctactccagggatcccgggacgacgtgtcgtctttcgttgacccagcactcgccctgcaggacgctcaggatctctacgctgcgggggaaaacattcggggtactgatgaaatgaagtttatcacaattctgtgtaccagatctgctacccatctactgcgcgtgtttgaggagtacgaaaagattgcgaataaatccattgaggattctatcaagtcagaaacacatggcagcctggaagaagccatgttgaccgtcgttaagtgtacacagaatctccattcctattttgcggagcgcctgtattacgccatgaaaggcgccggaacgagagatggcaccctgatacgaaatattgtgagccgttccgaaatcgatctgaacctgatcaaatgccattttaagaaaatgtatggcaagacgctttccagtatgatcatggaagatacaagcggagattataaaaacgccctgctgtctctcgtaggatcagatccatag

SEQ ID NO: 39554 - DNA, 984 bp, Artificial Sequence
  derived and/or modified sequence
atggcctggtggaaggcctggattgagcaggagggcgtgacagtgaagagcagcagccacttcaacccagaccctgatgctgagaccctgtacaaggccatgaagggcatcggcaccaatgagcaggccatcattgatgtgctgaccaagaggagcaacacccagaggcagcagatcgccaagagcttcaaggcccagtttgggaaggacctgacagagaccctgaagtctgagctgagcggcaagtttgagcggctgattgtggccctgatgtacccaccctaccgctatgaggccaaggagctgcatgatgccatgaagggcctgggcaccaaggagggcgtcatcatcgagatcctggccagcaggaccaagaaccagctgcgggagatcatgaaggcctatgaagaagattatggcagcagcctggaggaggacatccaggccgacaccagcggctacctggagcgcatcctggtgtgcctgctgcagggcagcagagatgatgtgagcagctttgtggaccctgccctggccctgcaggatgcccaggacctgtatgctgctggggagaacatccggggcacagatgagatgaagttcatcaccatcctgtgcaccaggtctgccacccacctgctgcgggtgtttgaggagtatgagaagatcgccaacaagagcattgaagattccatcaagtctgagacccacggcagcctggaggaggccatgctgactgtggtgaagtgcacccagaacctgcacagctactttgctgagcggctgtactatgccatgaagggagctggcaccagagatggcaccctcatccggaacatcgtgagccgctcagaaattgacctgaacctgatcaagtgccacttcaagaagatgtatggcaagaccctgagctccatgatcatggaggacaccagcggggactacaagaatgccctgctgagcctggtgggcagtgacccctag

SEQ ID NO: 39555 - DNA, 984 bp, Artificial Sequence
  derived and/or modified sequence
atggcctggtggaaggcctggatcgagcaggagggcgtgaccgtgaagagcagttcccattttaatcccgatccagacgctgagaccctgtataaggccatgaaaggaatcggcaccaatgagcaagcaattatcgatgtattaactaagcgctctaatactcaacgccaacagatagctaagagcttcaaagcgcagttcggaaaggatttaaccgaaaccctgaagtccgagctgagtgggaaatttgaacggctgatcgttgcattgatgtacccgccatataggtatgaagcaaaggagttgcatgacgctatgaaggggttaggtacaaaggagggggtgattattgaaatcttggcttctcggacaaaaaatcaactgcgggaaattatgaaggcttatgaagaggactacgggagcagtctggaggaggatatacaggctgatacttccggctacctggaacggattctcgtgtgcctattacaaggctctagggacgatgtgtcctcattcgtcgatcccgcactggctctccaggacgcccaggatctgtacgcagcgggagaaaatatcagaggtaccgatgaaatgaagtttatcacaatcctgtgcactcgatctgccacccacttactccgtgtgttcgaagaatatgaaaagattgccaataagtccatcgaagactctataaagagcgaaacccacggatccctggaagaagccatgcttacagtggtgaaatgcacccagaatctgcactcttattttgccgagcgcctctactatgcgatgaaaggcgccgggacccgagatggtactctgattagaaacatagttagccggtctgagattgacttgaacctgatcaagtgccactttaaaaagatgtatggcaaaacgctgtcttccatgattatggaggacaccagcggggactataagaacgcgctgttgtctctcgtgggctccgacccatag

SEQ ID NO: 39556 - DNA, 984 bp, Artificial Sequence
  derived and/or modified sequence
atggcatggtggaaagcttggattgaacaagaaggagtaacagtgaaaagctcttcgcactttaatccggaccccgacgccgaaacgctgtataaagcaatgaaaggaataggaacaaatgagcaggctataatcgacgtactgaccaagcgatctaatacccagagacaacaaatcgccaagagctttaaagctcaattcggaaaggatctgaccgaaacactaaaatcagagctgtctggaaaattcgaacgtctgattgttgccttaatgtatccaccctacaggtacgaagccaaggaactccacgacgccatgaagggccttgggacgaaagaaggcgtgattattgaaatacttgcctctaggactaagaaccaactgagggaaatcatgaaagcatacgaggaggactacgggagtagcctagaggaggacattcaagcggataccagcggctacctcgagcggattttggtgtgcctgctgcagggaagccgagatgatgtctcctcatttgtcgatccagccctggctctccaggatgcccaggacctctatgccgctggggaaaacattagggggactgacgagatgaaattcattacaattttgtgtactagatctgcaacacacctcttacgcgtgttcgaagagtacgagaaaatcgctaataaatccattgaagactccatcaagtccgaaacccatgggtccctggaggaggctatgctgacagtagtcaaatgcacccaaaacctgcattcctactttgccgagcgcttgtactatgctatgaaaggcgcaggcaccagggatggtacacttattcgcaacatagtgtcccgctccgaaatcgacctgaacttgataaaatgtcacttcaagaaaatgtatggaaagacgctgagtagtatgatcatggaggacacttccggtgattacaagaatgccctcttgagcctcgttggatctgacccatag

SEQ ID NO: 39557 - protein, 600 aa, Artificial Sequence
  derived and/or modified sequence
MASNHKSSAARPVSRGGVGLTGRPPSGIRPLSGNIRVATAMPPGTARPGSRGCPIGTGGVLSSQIKVAHRPVTQQGLTGMKTGTKGPQRQILDKSYYLGLLRSKISELTTEVNKLQKGIEMYNQENSVYLSYEKRAETLAVEIKELQGQLADYNMLVDKLNTNTEMEEVMNDYNMLKAQNDRETQSLDVIFTERQAKEKQIRSVEEEIEQEKQATDDIIKNMSFENQVKYLEMKTTNEKLLQELDTLQQQLDSQNMKKESLEAEIAHSQVKQEAVLLHEKLYELESHRDQMIAEDKSIGSPMEEREKLLKQIKDDNQEIASMERQLTDTKEKINQFIEEIRQLDMDLEEHQGEMNQKYKELKKREEHMDTFIETFEETKNQELKRKAQIEANIVALLEHCSRNINRIEQISSITNQELKMMQDDLNFKSTEVQKSQSTAQNLTSDIQRLQLDLQKMELLESKMTEEQHSLKSKIKQMTTDLEIYNDLPALKSSGEEKIKKLHQERMILSTHRNAFKKIMEKQNIEYEALKTQLQENETHSQLTNLERKWQHLEQNNFAMKEFIATKSQESDYQPIKKNVTKQIAEYNKTIVDALHSTSGN

SEQ ID NO: 39558 - protein, 175 aa, Artificial Sequence
  derived and/or modified sequence
MASNHKSSAARPVSRGGVGLTGRPPSGIRPLSGNIRVATAMPPGTARPGSRGCPIGTGGVLSSQIKVAHRPVTQQGLTGMKTGTKGPQRQILDKSYYLGLLRSKISELTTEVNKLQKGIEMYNQENSVYLSYEKRAETLAVEIKELQGQLADYNMLVDKLNTNTEMEEVMNDYNM

SEQ ID NO: 39559 - DNA, 1803 bp, Artificial Sequence
  derived and/or modified sequence
atggccagcaaccacaagagcagcgccgccagacccgtgagcagaggcggcgtgggcctgaccggcagaccccccagcggcatcagacccctgagcggcaacatcagagtggccaccgccatgccccccggcaccgccagacccggcagcagaggctgccccatcggcaccggcggcgtgctgagcagccagatcaaggtggcccacagacccgtgacccagcagggcctgaccggcatgaagaccggcaccaagggcccccagagacagatcctggacaagagctactacctgggcctgctgagaagcaagatcagcgagctgaccaccgaggtgaacaagctgcagaagggcatcgagatgtacaaccaggagaacagcgtgtacctgagctacgagaagagagccgagaccctggccgtggagatcaaggagctgcagggccagctggccgactacaacatgctggtggacaagctgaacaccaacaccgagatggaggaggtgatgaacgactacaacatgctgaaggcccagaacgacagagagacccagagcctggacgtgatcttcaccgagagacaggccaaggagaagcagatcagaagcgtggaggaggagatcgagcaggagaagcaggccaccgacgacatcatcaagaacatgagcttcgagaaccaggtgaagtacctggagatgaagaccaccaacgagaagctgctgcaggagctggacaccctgcagcagcagctggacagccagaacatgaagaaggagagcctggaggccgagatcgcccacagccaggtgaagcaggaggccgtgctgctgcacgagaagctgtacgagctggagagccacagagaccagatgatcgccgaggacaagagcatcggcagccccatggaggagagagagaagctgctgaagcagatcaaggacgacaaccaggagatcgccagcatggagagacagctgaccgacaccaaggagaagatcaaccagttcatcgaggagatcagacagctggacatggacctggaggagcaccagggcgagatgaaccagaagtacaaggagctgaagaagagagaggagcacatggacaccttcatcgagaccttcgaggagaccaagaaccaggagctgaagagaaaggcccagatcgaggccaacatcgtggccctgctggagcactgcagcagaaacatcaacagaatcgagcagatcagcagcatcaccaaccaggagctgaagatgatgcaggacgacctgaacttcaagagcaccgaggtgcagaagagccagagcaccgcccagaacctgaccagcgacatccagagactgcagctggacctgcagaagatggagctgctggagagcaagatgaccgaggagcagcacagcctgaagagcaagatcaagcagatgaccaccgacctggagatctacaacgacctgcccgccctgaagagcagcggcgaggagaagatcaagaagctgcaccaggagagaatgatcctgagcacccacagaaacgccttcaagaagatcatggagaagcagaacatcgagtacgaggccctgaagacccagctgcaggagaacgagacccacagccagctgaccaacctggagagaaagtggcagcacctggagcagaacaacttcgccatgaaggagttcatcgccaccaagagccaggagagcgactaccagcccatcaagaagaacgtgaccaagcagatcgccgagtacaacaagaccatcgtggacgccctgcacagcaccagcggcaactag

SEQ ID NO: 39560 - DNA, 1803 bp, Artificial Sequence
  derived and/or modified sequence
atggccagcaatcataagagttctgcagctagacctgtgtctcggggaggcgtgggacttactggccgccctccaagcggtattcggccattgtccggaaatataagggtggcaaccgccatgccacccggaactgccaggccgggcagtcggggatgccccataggtacggggggcgtgctgtcctcacaaataaaagtagcccaccggccagttactcagcaaggattaactggaatgaagaccggcacaaaaggcccacagaggcagatcttagataagtcatactacctggggctactccggtcgaaaatcagtgaattaactacagaagttaacaagctccaaaaaggcatagaaatgtataaccaggaaaattcggtgtacctgtcctacgagaaacgcgccgaaacccttgccgtcgaaattaaggagctgcaaggccagctggcagattataacatgctagtggacaaacttaatacaaataccgaaatggaggaggtaatgaacgattataatatgttaaaggcccagaatgatagagaaacccagagccttgacgttatctttaccgaacggcaagccaaagaaaaacagattcgaagcgtggaggaggagatagagcaagaaaagcaggccactgatgatatcataaagaatatgtcattcgagaatcaagtcaaatacctggagatgaaaactaccaacgagaaactgcttcaggaattggacacccttcagcagcagttagactcccaaaatatgaagaaagagtcgctggaagctgaaattgcgcactcccaggttaagcaggaagccgttcttctccatgagaagctgtacgaactcgagagccacagggatcagatgatcgccgaagacaagagtattggcagccccatggaagaacgggagaagcttctcaaacagataaaggatgacaaccaggagatcgctagcatggagaggcagttaaccgacactaaagagaagatcaatcagttcatcgaggagatccgtcaactcgatatggacctggaagagcaccaaggtgaaatgaaccagaagtataaagaactgaaaaaaagggaggaacacatggacactttcattgagacattcgaagagacaaagaaccaagagcttaaacgaaaggcccagattgaagccaacatcgtggcgcttctggaacactgttcgagaaacattaataggatcgagcagattagcagcattacgaaccaggagctgaagatgatgcaggacgacctgaacttcaaatctacggaggttcagaagtcgcaatcgaccgcacagaacctcacctctgacattcagaggctccaactggacctgcagaagatggaactgctggagagcaagatgaccgaggaacagcatagcctgaagtcaaaaattaaacagatgacaaccgatctcgagatttacaacgatctgccagccctgaagagcagcggggaggaaaagattaagaagttgcaccaagagaggatgatattgtccacacatcggaatgcttttaagaagatcatggagaagcagaatattgagtacgaagctctcaagacccagctacaagagaacgagactcacagtcagctgaccaatctcgagcggaaatggcaacacctggaacaaaataacttcgcgatgaaagagttcatcgccactaagtctcaggaatctgattaccagcccatcaagaaaaacgtgacaaagcagatcgcagaatacaataagaccattgtggatgccttacactctacaagcggaaactag

SEQ ID NO: 39561 - DNA, 1803 bp, Artificial Sequence
  derived and/or modified sequence
atggcatcgaaccataaaagctccgcggccaggcctgtctctaggggcggagtgggcttgaccggtcgcccaccctctggcatacgtcccttgagtggtaatatcagagtagctacagccatgccccctgggacggctcggcccgggtctagggggtgcccaattggcactggaggggttttaagttcacaaatcaaagtcgctcaccgcccagtgacacagcagggcttgaccggtatgaagacaggcaccaaagggcctcagagacaaattctggacaaatcatactacctcggtctccttagatctaaaatctcagaactgaccacagaggtgaacaagttgcagaaaggaatcgagatgtacaaccaggaaaatagcgtgtatctttcctatgaaaaacgtgctgagacccttgctgtagagataaaagaactgcaaggacagctggccgattacaacatgcttgtggataaactgaacaccaacactgagatggaggaggtgatgaacgactacaacatgctgaaagctcagaatgatagggagactcagtctcttgacgtgatctttaccgagaggcaggcaaaggaaaagcaaatcagatctgtggaggaagaaattgaacaggagaaacaagctactgacgacataattaagaacatgtctttcgaaaaccaagtcaaatatctggaaatgaagacaaccaatgagaagctcctgcaggagctggacacgctacaacagcagctcgacagccagaatatgaagaaggagtcactagaggctgaaattgcacatagccaggttaagcaggaggcagttttgttacatgaaaagctgtacgaactcgagagccatagggaccagatgattgctgaggataaaagtattggctcccccatggaagaacgcgaaaagttgttaaagcagattaaagatgataaccaagaaatcgcctctatggaaaggcagctgaccgacacaaaggaaaagatcaaccagtttatcgaggaaattagacagctggatatggatttggaggagcatcaaggtgagatgaatcagaagtacaaagaactgaagaagcgggaggaacatatggacactttcatcgaaacatttgaagaaacaaaaaatcaggagctgaaacggaaagcccagattgaggccaacatcgtggctctgctcgaacactgctctcgaaacatcaatcggattgaacagatttcttcaatcaccaaccaggaactgaagatgatgcaggatgacctcaattttaagagcacagaggtgcagaaatcacagagcacagcacagaatctgactagtgacatacagcgccttcagctggatctgcagaaaatggaactgcttgagagcaagatgactgaggaacagcatagtctgaaaagcaagataaaacagatgacgaccgatctcgagatctataatgacttgccggccttaaagtcatccggcgaagaaaaaatcaagaagctgcaccaggagagaatgatactgagcacacaccgtaacgccttcaagaaaatcatggagaagcagaatatcgagtatgaggccctgaagacacagctccaagagaatgagacacacagccaacttactaacctggaacgcaaatggcaacacctcgagcagaataattttgccatgaaggaatttattgccaccaaaagtcaagaatccgattaccagcccattaagaaaaatgttaccaaacagatcgcagagtataacaaaacaatcgttgacgctttgcactccacgtcgggcaattag

SEQ ID NO: 39562 - DNA, 1803 bp, Artificial Sequence
  derived and/or modified sequence
atggcaagcaatcacaaaagcagcgccgcgagaccagtgagcagagggggcgtgggccttaccggaagacccccttcaggaattcggcctctttccggaaatattcgtgtcgcaacagctatgcctccaggcactgccaggcccggaagccgcggatgtccaatcggcactggcggagtcttaagcagtcaaattaaggttgcccataggcccgttacccaacaaggacttactggcatgaaaaccggcactaagggccctcaaagacaaatacttgataagagctactaccttggtctgttacggtccaagatttcagagctaaccactgaagtgaataagctgcagaagggtatcgaaatgtacaaccaagagaacagcgtgtacctgtcatacgagaaacgcgcggagaccctggcagttgaaattaaagagctgcaggggcagttggcagactacaacatgctagttgacaaattgaacacaaatacagagatggaggaggtgatgaacgattacaacatgctgaaggcccaaaacgatagggaaacccaatccttagacgtgatctttactgaaaggcaggccaaagaaaagcagatcaggtccgtagaggaggaaatcgagcaggagaagcaggcaacagatgacatcatcaagaacatgagcttcgagaaccaagtgaagtacctagagatgaaaaccactaacgagaaactgctccaggagctggataccttacaacagcagttggacagccagaacatgaaaaaggaaagcctggaagctgagatcgcccactcccaggtgaaacaagaggctgtattactgcacgagaaactgtatgaattagagagtcatcgggaccagatgattgcagaagacaagtccataggaagtcccatggaagaaagggaaaaactactgaagcagattaaggacgataaccaggaaatcgctagtatggagagacagctgaccgataccaaagagaaaattaaccagtttatagaggagattaggcagctggacatggatttggaggagcatcagggggagatgaatcagaagtacaaagagctcaagaagagagaagaacacatggacacttttatagagaccttcgaggagacaaagaatcaagaactgaagaggaaagcccagatcgaggccaatatcgtggccctccttgaacactgctccaggaatattaaccgtatagagcaaatctcgtccattactaatcaggagttaaagatgatgcaggacgacttgaactttaagagcacagaagtccagaagtcccagagcacagctcaaaatctcacaagtgacattcagcgtctgcagctcgacttgcaaaaaatggaactgctcgagtctaaaatgacggaagagcagcactctttgaaatctaagattaagcagatgaccaccgaccttgaaatttacaatgatctgccggcccttaaaagctcaggcgaggaaaagattaagaaactccatcaggagagaatgatcctgtccactcacaggaatgccttcaagaaaatcatggaaaaacagaacattgagtatgaggccctaaaaacacagctgcaagagaatgaaacacattcacagctgaccaatctggaacgaaagtggcagcacctcgaacaaaataacttcgccatgaaagagttcatcgcaactaaatcccaagagagtgattatcaaccgattaagaaaaacgtgaccaagcagatcgcggagtataataaaacaatcgtcgatgcgcttcactcaacaagtggaaattag

SEQ ID NO: 39563 - DNA, 1803 bp, Artificial Sequence
  derived and/or modified sequence
atggccagcaaccacaagagcagcgctgcccggcctgtgtcccggggcggcgtgggcctgaccggccggccccccagcggcatccggcccctgagcggcaacatccgggtggccacagccatgcctcctggaacagcccggcccggcagccggggctgccccatcggcactggaggagtgctgagcagccagatcaaggtggcccacaggcctgtgacccagcagggcctgaccggcatgaagacaggcaccaagggcccccagaggcagatcctggacaagagctactacctgggcctgctgcggagcaagatcagcgagctgaccacagaggtgaacaagctgcagaagggcatcgagatgtacaaccaggagaacagcgtgtacctgtcctatgagaagagagctgagaccctggccgtggagatcaaggagctgcagggccagctggccgactacaacatgctggtggacaagctgaacaccaacacagagatggaggaggtgatgaatgactacaacatgctgaaggcccagaatgaccgggagacccagagcctggatgtgatcttcacagagcggcaggccaaggagaagcagatccgctctgtggaggaggagattgagcaggagaagcaggccacagatgacatcatcaagaacatgagctttgagaaccaggtgaagtacctggagatgaagaccaccaatgagaagctgctgcaggagctggacaccctgcagcagcagctggacagccagaacatgaagaaggagagcctggaggccgagatcgcccacagccaggtgaagcaggaggccgtgctgctgcacgagaagctgtatgagctggagagccaccgggaccagatgattgctgaggacaagagcatcggcagccccatggaggagcgggagaagctgctgaagcagatcaaggatgacaaccaggagatcgcctccatggagcggcagctgacagacaccaaggagaagatcaaccagttcatcgaggagatccggcagctggacatggacctggaggagcaccagggcgagatgaaccagaagtacaaggagctgaagaagcgggaggagcacatggacaccttcatcgagacctttgaggagaccaagaaccaggagctgaagaggaaggcccagatcgaggccaacatcgtggccctgctggagcactgcagcaggaacatcaacagaattgagcagatcagcagcatcaccaaccaggagctgaagatgatgcaggatgacctgaacttcaagagcacagaggtgcagaagagccagagcacagcccagaacctgaccagtgacatccagaggctgcagctggacctgcagaagatggagctgctggagagcaagatgacagaggagcagcacagcctgaagagcaagatcaagcagatgaccacagacctggagatctacaatgacctgcctgccctgaagagcagtggagaggagaagatcaagaagctgcaccaggagaggatgatcctgagcacccacagaaatgccttcaagaagatcatggagaagcagaacatcgagtatgaggccctgaagacccagctgcaggagaatgagacccacagccagctgaccaacctggagaggaagtggcagcacctggagcagaacaactttgccatgaaggagttcatcgccaccaagagccaggagagtgactaccagcccatcaagaagaatgtgaccaagcagattgctgagtacaacaagaccatcgtggatgccctgcacagcaccagcggcaactag

SEQ ID NO: 39564 - DNA, 2160 bp, Artificial Sequence
  derived and/or modified sequence
atcccgcccccgttgccgggatacgccgcggcgcacggcagttagtgggtaggcctgagagccgaggaaaactgagcgtgggcctcagaaagaagttaaggcacccgcgagccgggcaactgccctccttccgcgccggcggagcgattaaagtgaagaaacaatggccagcaatcacaaatcttcagcagctcgccctgtttcaagaggtggagttgggttaacaggaaggcctccttctgggatacgacccctatcaggaaatattcgagtggcaactgcaatgccacctgggacagcaagaccaggttctcgtggttgtcccatagggactggtggagttctgtcttctcaaatcaaagttgcccatcgccctgtaacacaacaaggtttgactggaatgaaaactgggacgaaaggtccccagaggcaaattttagacaaatcttactatcttgggcttcttagaagtaaaataagtgaacttacaactgaagttaataaacttcagaagggaatagaaatgtacaatcaagagaattcagtatatttgtcatatgaaaagagggctgagactttagctgttgagataaaagagcttcaaggacaactagcagactacaacatgttggtagataaacttaataccaacactgaaatggaagaagtaatgaatgattacaatatgcttaaagctcaaaatgatcgagaaacacaaagtttggatgtcatatttactgaaagacaagcgaaagaaaaacaaatcagaagtgtcgaagaagaaattgaacaggaaaaacaagcaacagatgacattatcaaaaatatgtcttttgaaaaccaagtcaagtacctagagatgaaaaccacaaatgagaaactgttacaggaattagatacacttcaacaacaattggattcacagaacatgaaaaaagagagcctggaagcagaaatagctcactcccaggtgaaacaggaggcggtattgctgcatgaaaaactttatgagttggagtcccatcgagatcaaatgattgcagaagacaaaagcataggatctccaatggaagagagagagaaattacttaagcagattaaagatgataatcaggaaatagccagcatggaaagacagttaacagatacaaaagaaaagataaatcagtttattgaagaaattagacaacttgacatggatttagaggaacaccaaggtgaaatgaaccagaaatacaaggagctaaagaaaagggaggaacatatggacacttttattgagacttttgaggaaacaaagaatcaggaactgaaacgaaaggcacagatagaagccaacattgttgcactcttggagcactgcagtcgaaatataaatcgtatagaacagatatcctctatcaccaatcaagagctaaagatgatgcaggatgacctcaattttaaatctactgaagtgcagaaatcacaaagtacagctcagaatttgacttcagacattcaacgtctgcagttggatctgcagaaaatggagcttctagaaagtaagatgactgaagaacagcattctctaaaaagcaaaattaagcaaatgacaactgatctggagatatataatgatttgccagctttaaaatcatcaggtgaagaaaagataaagaaattacatcaggagagaatgatattatcaacccacagaaatgcctttaagaaaataatggagaagcaaaacatagagtatgaggcactaaaaacacaattgcaagaaaatgagacacattctcagcttacaaatttggagagaaagtggcaacaccttgagcaaaataattttgcgatgaaagaattcatagcaaccaagagtcaagagagtgattaccagccaattaagaaaaatgtgaccaagcagattgcagagtacaataaaaccatcgtggatgctttacatagcaccagcggaaactgagtttaagtccactgaaagtctctaaggaagtatcctcttgctgctaaacttggtacaagttgactaccaaaaaaaaaaaaagcttacttttggagtttacctaaaatttctgaatgttataatttttgtggcctcttttaagaatgatattttaaaatagtaaatagttcaataaatggtttgcatattaaaaa

SEQ ID NO: 39565 - DNA, 1803 bp, Artificial Sequence
  derived and/or modified sequence
atggccagcaaccacaagagcagcgccgcccggcccgtgagccggggcggcgtaggtctgacaggcaggcccccgtccggaatccggcccctgtccggaaatatccgggtcgctacagccatgcccccaggtactgctagaccgggctctagaggctgccctataggcaccggtggggttcttagtagccaaattaaagtggcacaccgcccagtaacccaacaaggattaactggtatgaagaccggcactaaaggccctcagcgccagatactggataaatcctattacctgggcttgctccgatccaaaatctccgagttaactacagaagtgaataaactccagaagggcatcgagatgtacaaccaagagaactccgtttacctctcctacgagaaacgggcagaaacactcgctgttgagattaaggaattgcagggacagctagccgactacaacatgctcgtggataaactgaacaccaacactgaaatggaggaggtcatgaacgactacaatatgctcaaggctcagaacgatagggaaactcagagtctggacgtgattttcacagaacgccaagctaaggagaaacagattcgcagcgtagaggaggagatcgaacaggaaaaacaagcaacagacgacatcatcaaaaacatgagttttgagaaccaggttaaatacctggaaatgaaaacaactaacgagaaactcctgcaagaactggataccttgcagcaacagttggactctcagaacatgaagaaagaatctctggaggccgaaattgctcattcacaggtcaaacaggaggccgtcctcctgcacgaaaagttatatgagcttgagtcccatcgcgatcagatgatcgccgaagacaagtcaattggctcacctatggaggaaagggagaaattgctgaagcagattaaggacgacaaccaggaaattgctagcatggagagacagctcacagatacaaaagaaaaaattaatcagtttatcgaggaaatcaggcagcttgatatggatctggaggagcatcagggggagatgaaccagaagtataaagaactcaaaaagcgtgaggaacatatggacacattcattgagacctttgaggagacaaaaaaccaggaactaaagcgtaaggcccagattgaggctaacatcgtggcactgctggagcattgttctagaaacatcaacaggatcgaacagatctcgagtatcacaaaccaggaactgaagatgatgcaagacgacctgaacttcaagtccaccgaggtacaaaagagccaaagcaccgcccaaaacctgacatccgatatacagcgccttcagctggacctccagaaaatggagttacttgaaagcaagatgaccgaagagcagcattcgctgaaatccaagattaagcaaatgacgaccgacctcgaaatctacaacgatctgccggctctgaagagttccggcgaggaaaaaatcaagaagctgcaccaggagcgaatgatactgtccacacaccgcaacgcctttaaaaagataatggaaaagcagaacatcgaatatgaggctctgaaaacccagttacaggagaacgaaacacactcccagctcaccaaccttgagaggaagtggcagcacctcgagcagaataattttgccatgaaggagtttattgcaacgaagagccaagagagcgattaccagccaatcaagaaaaatgtgacaaaacagatcgcagagtacaataaaaccattgtggatgccctccactctacaagcgggaactag

SEQ ID NO: 39566 - DNA, 1803 bp, Artificial Sequence
  derived and/or modified sequence
atggccagcaaccacaagagcagcgccgcccggcccgtgagccggggcggcgtgggactcacgggccgcccaccatctggtatcaggcctctgagtggcaacatacgcgtggccacagctatgccccccgggaccgctcgaccaggctcacgtggctgtcctatcggcaccggtggcgttctaagtagccagattaaggtcgcccacagacctgtgacccagcaaggcctcacgggaatgaaaacggggaccaagggcccccaacgtcagatattagataagtcctattacctggggctcctgcgatcgaaaatttcagaactgacgaccgaagtcaacaagctgcagaagggaatcgagatgtacaaccaggagaattcagtttacctgtcgtacgagaaacgagccgagaccctggcggtggagatcaaagagctgcagggccaactcgcagattacaatatgctggtggacaagctgaacactaacacggagatggaggaggtgatgaatgactacaacatgctgaaagcccagaatgaccgcgagacacagagtctggatgtgatcttcaccgaaaggcaggccaaagaaaagcaaatccgttcagtagaagaagagatcgaacaggagaaacaagcaacagacgatatcataaaaaatatgagcttcgagaatcaggtcaagtacctggagatgaaaactactaatgaaaagcttctccaggaattagacaccttgcaacagcagctcgactctcagaacatgaagaaagaatctcttgaagctgagatcgcacactcgcaggtgaagcaggaagcagtgctactacacgaaaagctctacgagctcgaaagccatcgggatcagatgatcgcagaggataagtccattgggtcccctatggaggaacgggagaagcttttgaagcaaataaaggatgataatcaggaaatcgcatccatggagaggcagctcactgacaccaaagagaagatcaatcagtttatagaggagattagacagttggacatggaccttgaggaacaccaaggcgaaatgaaccagaagtacaaagagctgaagaagcgagaggagcatatggatacattcatcgagactttcgaggagaccaaaaatcaggaactcaagaggaaggctcagattgaggctaatatcgtcgccctgctcgagcattgtagccgtaatattaacaggattgagcagatatcttcaattaccaaccaagagttgaagatgatgcaagatgacctgaactttaagtccaccgaggtccagaagagccagagcaccgcccagaacttgacaagcgatattcaaaggttgcagcttgaccttcagaagatggaacttctcgagtccaaaatgactgaagagcagcattcattgaagtcaaagattaagcaaatgaccaccgacctggagatttataacgatctcccagccttaaagagcagcggagaggaaaagattaagaaactgcaccaggaacgaatgatcctatctacccataggaacgcctttaaaaagatcatggaaaagcagaacatcgagtatgaggccctgaagactcaattacaagagaacgaaacccattctcagctcaccaacctggaaaggaagtggcaacatcttgagcagaataattttgccatgaaggagttcattgccaccaaaagccaagaaagcgattaccagccaatcaaaaaaaacgtgaccaagcagatcgccgaatacaacaaaacaatcgtcgacgccctccattctacgtcaggcaactag

SEQ ID NO: 39567 - DNA, 1803 bp, Artificial Sequence
  derived and/or modified sequence
atggccagcaaccacaagagcagcgccgcccggcccgtgagccgggggggcgtcggcctgacagggagacccccaagtggtatccggccgttgtccggcaatatacgagtagcaaccgctatgcccccaggaaccgccaggcctgggagcagaggctgcccaatcggtacgggcggggtcctgagctcccaaattaaagtagcccatcggcctgtgacacagcagggactgaccgggatgaagacagggaccaagggacctcagaggcagatcttggacaaaagttactatctcggactgttaaggagcaaaatctcagagctaacgactgaggtcaacaagctgcagaaagggatcgagatgtataaccaggagaatagcgtgtacctgagctatgaaaaacgcgcagagaccctggcagttgagattaaggagctccaggggcaactagctgactacaacatgttggtggacaaactgaatacaaacactgaaatggaagaggtcatgaacgattacaatatgctgaaagcccaaaacgacagagaaacacagtctctggacgtgatctttaccgaacggcaagcaaaggaaaagcagatccgcagcgtggaggaagaaatcgagcaggaaaagcaggccactgacgatattatcaagaacatgagcttcgaaaatcaagtcaagtatcttgaaatgaagacgacgaacgagaaactactgcaggaattggacacactgcagcaacagctggactcacagaacatgaagaaagagtctttggaagccgaaatcgcccatagccaggtgaagcaggaggcagtgctgttacacgaaaagctctacgaactcgagtcacacagagaccagatgatagctgaggacaaatccattggcagccccatggaggagcgggagaagctgctgaaacagatcaaggacgacaaccaggaaatcgccagcatggaaagacagctgaccgacaccaaagaaaagattaatcagttcattgaggaaatccgacagttggacatggatctggaggaacatcaaggagagatgaaccagaaatacaaggagcttaagaagcgagaggagcacatggatacgttcattgaaacattcgaggagacaaagaaccaggaactgaagcgtaaggcacagattgaggcgaatatcgtggctctgctagaacattgctcccgtaatattaatcggatcgaacaaataagctccattacaaaccaggagttaaaaatgatgcaagatgatctgaattttaaatccactgaggtccagaaatcacagagcactgcccagaatttaacaagtgacatccagcgtctgcagctggatcttcaaaagatggagctgttggagtcaaaaatgacagaggagcagcacagtctgaaatctaagattaaacaaatgacaactgacttagagatttacaatgatctgcctgctctcaagagtagtggggaagaaaagatcaagaagttacaccaggagcgcatgattctatctacccacaggaacgctttcaaaaaaatcatggaaaaacagaacatcgagtacgaggctctgaagacacagctgcaggagaacgagacgcacagccaattgaccaatctggaaaggaagtggcagcacctggagcagaataattttgcgatgaaagaattcattgctactaaaagccaggagtccgactaccagcctatcaagaaaaacgtaaccaaacagatcgctgagtacaacaagactatagtcgacgctttacactccacaagcggcaactag

SEQ ID NO: 39568 - DNA, 1803 bp, Artificial Sequence
  derived and/or modified sequence
atggcctccaatcacaagtccagtgcggctagacccgtgtcacgtggtggagtgggactgacaggtagacctccaagtggcattagacccctctctggcaatatccgggttgctaccgcaatgcctcccggaactgcgcgtcctggtagcagaggctgtcccatcggtactggaggcgtgctctccagtcaaatcaaagttgcccatcggccagtgactcaacagggccttaccggcatgaagaccgggactaagggcccacagagacaaattcttgataaatcctactatctaggcctgctgaggtcgaagatcagtgagctgaccacagaggtcaacaagcttcaaaagggaatcgagatgtataaccaggaaaatagcgtgtaccttagctacgagaaacgcgctgaaaccctagcggtcgagattaaagaactgcagggccaattggctgattacaatatgttggtagataaacttaatacgaacaccgagatggaagaagtaatgaatgattataacatgctgaaggctcagaatgacagggaaacccagtccctggatgtgatcttcacagaacgacaagccaaagagaaacaaataagatcagtggaggaggaaatagagcaagagaagcaggccacagacgacataattaagaatatgtcctttgagaatcaagtcaagtacctcgaaatgaaaaccacgaatgagaaacttctccaggaactcgatactcttcagcagcaattggattcacaaaatatgaagaaggagtccctggaggctgagatagcccattctcaagtcaaacaggaggccgtgttactgcatgagaagctgtatgagctagagtcccatagggaccagatgatagctgaggacaaatcaataggcagtcctatggaggagcgcgaaaagttgctaaagcagataaaagacgacaaccaggaaatcgcaagcatggagcgtcagcttactgatacgaaggagaagataaaccagtttatcgaggaaataagacagctggacatggaccttgaggagcaccaaggggagatgaatcagaagtacaaggagttaaagaaacgcgaagaacacatggacacttttattgagaccttcgaagaaacaaaaaaccaggagctcaagagaaaagcccagatcgaggccaacatagttgcccttttagaacattgctcacgtaacattaatcggattgagcaaatatcatcaatcaccaaccaggaattgaagatgatgcaggatgatcttaacttcaagtctacagaggtgcagaagagtcagtcaaccgcacagaacctgaccagtgatatccaacgactgcaattggacctgcagaagatggagctcctggagagcaaaatgactgaagaacagcatagcttgaaatctaagatcaaacagatgacaactgacttggagatctacaatgacctgcccgctcttaagtcttccggcgaagaaaagattaaaaagcttcatcaggagaggatgatcctgtcaactcacaggaacgcgttcaagaagattatggaaaagcagaatattgagtatgaagctttaaagactcagttgcaagagaacgagacccactcccagctcactaatctcgagcgcaagtggcagcacctggagcagaataatttcgcgatgaaggagttcatcgcaaccaagagtcaggaaagcgattaccagcctattaaaaagaacgttacaaaacagattgccgagtataacaagacaatcgtggatgctctgcattctacctcgggtaattag

SEQ ID NO: 39569 - DNA, 1803 bp, Artificial Sequence
  derived and/or modified sequence
atggcatctaatcacaaatcctctgcagcccgtcctgtatctcgtggtggagtcggactgaccgggcgaccaccctccggtatccgacccctctccgggaatatcagagtggctacggctatgcctccaggcacggcacgcccagggagccgcggatgcccgataggcactgggggagtgctatccagccagatcaaggtggctcataggccagtgacccaacaggggctgaccggaatgaaaacaggcaccaagggccctcaaagacagattcttgacaagtcttactatctcgggcttctgcgttccaagatttctgaactcaccactgaggtgaataagttacaaaagggcatcgagatgtataaccaagagaactccgtctacctgtcttacgagaaacgggcagagacactcgcagtagaaatcaaggagttgcaaggccagctggccgattataatatgctggtagacaagcttaatactaataccgaaatggaggaagtgatgaatgactataatatgctcaaggcccaaaatgaccgcgagacccagtccctggacgttatcttcacagaacgccaagccaaggaaaaacagatcagatcagtagaggaagagatcgagcaggaaaaacaggcaacggatgacattattaaaaatatgtcatttgaaaatcaggtgaagtacctcgaaatgaagaccacaaatgagaagctcctgcaagagttagatacgctgcagcagcagctggattcacagaatatgaagaaagagagtctagaggccgagatcgctcactcgcaggtcaaacaggaagctgtacttctgcacgagaaactctacgaactggagtctcacagagaccaaatgattgctgaggataagtccatcggctcacccatggaggaaagggagaagctgttgaagcagataaaggatgacaatcaagagatcgcctccatggaacgacagttgactgacaccaaagagaaaataaatcagttcatcgaggagataagacagttagacatggaccttgaagaacaccagggcgagatgaatcagaaatacaaggagttgaaaaagcgcgaagaacatatggataccttcattgagacttttgaagagaccaagaatcaagaactgaaaagaaaagctcagattgaggccaacattgtcgctttactggagcactgttccagaaatatcaacagaattgagcagatctcaagtataaccaaccaagaactgaagatgatgcaagacgatctgaatttcaagtccacagaagtgcaaaaatcccagtccactgcacagaacctcactagcgatatacaaagacttcagcttgatctgcaaaaaatggagctgctggaaagcaaaatgacagaggaacagcacagcctgaagtcgaaaataaaacaaatgacaacggatctggagatatataatgatctgccggcactgaagagttctggagaggaaaaaatcaaaaaactacaccaggaaagaatgatcctttctacgcacagaaatgctttcaaaaaaataatggagaagcaaaacatcgagtatgaggcgctaaagacccagcttcaagagaatgagacacattcacaattgacaaacctcgaaaggaagtggcagcacctagagcagaataatttcgccatgaaggaattcattgcgacgaaatctcaggagagcgactatcaacccattaaaaagaacgtgacaaaacagatcgcagaatataataagacaatcgtggacgctttacacagcacatcggggaattag

SEQ ID NO: 39570 - DNA, 1803 bp, Artificial Sequence
  derived and/or modified sequence
atggcctctaaccacaagtccagtgccgctagaccagtcagccgcggtggagtcggccttacaggcaggcctccgtctggcataaggcccctgtccggcaatataagagtagcaaccgccatgcctcctgggactgccagaccaggctctagaggatgcccgatagggaccggcggagtgttatcatctcagataaaggtcgcccataggccagtcacccaacaaggcctaaccgggatgaagacggggacgaagggcccacagcggcagatcttagacaagagttattatttaggcctgctgaggagcaaaattagcgaacttactaccgaagtgaataagctacagaagggcatcgagatgtacaaccaggagaatagcgtctacttaagctacgagaaaagagccgaaactcttgccgttgagatcaaagaactgcagggacagcttgctgattataatatgctcgttgacaaactcaacaccaacaccgaaatggaagaggtgatgaacgattataacatgttgaaggcccagaatgatcgggagacccaaagcctcgacgtcatcttcaccgaacgtcaagcaaaagaaaagcagatcagatctgtggaggaggagattgagcaggagaagcaggccaccgatgatattatcaagaacatgtctttcgaaaaccaggtcaaatatttggagatgaaaactaccaatgagaaactgcttcaggagctcgacaccttgcagcaacaactggattcgcaaaatatgaagaaggagtcgctggaggctgagatcgcccatagccaggttaagcaagaggccgtccttcttcacgaaaagctgtatgaactagagagccaccgagaccaaatgattgcggaagataagtccattggtagccccatggaagagcgcgagaagctgttaaagcagattaaggatgataaccaagaaatcgcttctatggaacggcagctgaccgatacaaaggagaaaatcaatcagttcatcgaagaaataagacagctggatatggacttagaggaacatcagggcgaaatgaaccagaagtataaggagctgaagaaaagagaagaacatatggacacattcatcgagacatttgaggagaccaagaaccaagagctgaagcgcaaagcccaaatagaggccaatatcgttgccttgctcgagcattgctctaggaatatcaaccgtattgagcagatcagtagcattaccaatcaggagcttaagatgatgcaagatgacctgaatttcaagagcaccgaggtgcagaagagtcagagtactgcgcagaacttgacaagcgatattcagcggctgcagctggatttgcagaaaatggagcttttagaaagcaaaatgacggaagagcagcacagcctcaagagcaaaattaaacagatgaccactgacctggagatctataacgaccttccggctcttaagagttcaggcgaggagaagataaagaagcttcatcaggaacggatgatccttagtacccatcgcaatgctttcaagaagatcatggagaaacagaatatcgaatatgaggcactgaagacccagctgcaggagaacgagactcacagccagctgacgaacctcgaacgaaagtggcagcacctagagcagaacaactttgcgatgaaggagttcatcgccacaaagtcacaggagtcagactatcagccaattaagaagaacgtgaccaaacaaatcgcggagtacaataaaacaatcgtagatgcgcttcacagtacctctggcaattag

SEQ ID NO: 39571 - DNA, 2119 bp, Artificial Sequence
  derived and/or modified sequence
tcgtcatggccagtgtctgtctggcgcccggtgcccaggcactgtgcgagaccagtccgcaggggcgactcggagagcgccgggccgcggcgggagaagagcctgcagcgattaaagtgaagaaacaatggccagcaatcacaaatcttcagcagctcgccctgtttcaagaggtggagttgggttaacaggaaggcctccttctgggatacgacccctatcaggaaatattcgagtggcaactgcaatgccacctgggacagcaagaccaggttctcgtggttgtcccatagggactggtggagttctgtcttctcaaatcaaagttgcccatcgccctgtaacacaacaaggtttgactggaatgaaaactgggacgaaaggtccccagaggcaaattttagacaaatcttactatcttgggcttcttagaagtaaaataagtgaacttacaactgaagttaataaacttcagaagggaatagaaatgtacaatcaagagaattcagtatatttgtcatatgaaaagagggctgagactttagctgttgagataaaagagcttcaaggacaactagcagactacaacatgttggtagataaacttaataccaacactgaaatggaagaagtaatgaatgattacaatatgcttaaagctcaaaatgatcgagaaacacaaagtttggatgtcatatttactgaaagacaagcgaaagaaaaacaaatcagaagtgtcgaagaagaaattgaacaggaaaaacaagcaacagatgacattatcaaaaatatgtcttttgaaaaccaagtcaagtacctagagatgaaaaccacaaatgagaaactgttacaggaattagatacacttcaacaacaattggattcacagaacatgaaaaaagagagcctggaagcagaaatagctcactcccaggtgaaacaggaggcggtattgctgcatgaaaaactttatgagttggagtcccatcgagatcaaatgattgcagaagacaaaagcataggatctccaatggaagagagagagaaattacttaagcagattaaagatgataatcaggaaatagccagcatggaaagacagttaacagatacaaaagaaaagataaatcagtttattgaagaaattagacaacttgacatggatttagaggaacaccaaggtgaaatgaaccagaaatacaaggagctaaagaaaagggaggaacatatggacacttttattgagacttttgaggaaacaaagaatcaggaactgaaacgaaaggcacagatagaagccaacattgttgcactcttggagcactgcagtcgaaatataaatcgtatagaacagatatcctctatcaccaatcaagagctaaagatgatgcaggatgacctcaattttaaatctactgaagtgcagaaatcacaaagtacagctcagaatttgacttcagacattcaacgtctgcagttggatctgcagaaaatggagcttctagaaagtaagatgactgaagaacagcattctctaaaaagcaaaattaagcaaatgacaactgatctggagatatataatgatttgccagctttaaaatcatcaggtgaagaaaagataaagaaattacatcaggagagaatgatattatcaacccacagaaatgcctttaagaaaataatggagaagcaaaacatagagtatgaggcactaaaaacacaattgcaagaaaatgagacacattctcagcttacaaatttggagagaaagtggcaacaccttgagcaaaataattttgcgatgaaagaattcatagcaaccaagagtcaagagagtgattaccagccaattaagaaaaatgtgaccaagcagattgcagagtacaataaaaccatcgtggatgctttacatagcaccagcggaaactgagtttaagtccactgaaagtctctaaggaagtatcctcttgctgctaaacttggtacaagttgactaccaaaaaaaaaaaaagcttacttttggagtttacctaaaatttctgaatgttataatttttgtggcctcttttaagaatgatattttaaaatagtaaatagttcaataaatggtttgcatatt

SEQ ID NO: 39572 - DNA, 2163 bp, Artificial Sequence
  derived and/or modified sequence
gacgccgatgcggagctgagctggctttcctccagggctctggactccctgctgagcaagagagaaagaggcccgcccttccaccaggacgcctgaccctggggtccttcccaaacccgggtctcttccgactccgggcccaacagtttgtgcgattaaagtgaagaaacaatggccagcaatcacaaatcttcagcagctcgccctgtttcaagaggtggagttgggttaacaggaaggcctccttctgggatacgacccctatcaggaaatattcgagtggcaactgcaatgccacctgggacagcaagaccaggttctcgtggttgtcccatagggactggtggagttctgtcttctcaaatcaaagttgcccatcgccctgtaacacaacaaggtttgactggaatgaaaactgggacgaaaggtccccagaggcaaattttagacaaatcttactatcttgggcttcttagaagtaaaataagtgaacttacaactgaagttaataaacttcagaagggaatagaaatgtacaatcaagagaattcagtatatttgtcatatgaaaagagggctgagactttagctgttgagataaaagagcttcaaggacaactagcagactacaacatgttggtagataaacttaataccaacactgaaatggaagaagtaatgaatgattacaatatgcttaaagctcaaaatgatcgagaaacacaaagtttggatgtcatatttactgaaagacaagcgaaagaaaaacaaatcagaagtgtcgaagaagaaattgaacaggaaaaacaagcaacagatgacattatcaaaaatatgtcttttgaaaaccaagtcaagtacctagagatgaaaaccacaaatgagaaactgttacaggaattagatacacttcaacaacaattggattcacagaacatgaaaaaagagagcctggaagcagaaatagctcactcccaggtgaaacaggaggcggtattgctgcatgaaaaactttatgagttggagtcccatcgagatcaaatgattgcagaagacaaaagcataggatctccaatggaagagagagagaaattacttaagcagattaaagatgataatcaggaaatagccagcatggaaagacagttaacagatacaaaagaaaagataaatcagtttattgaagaaattagacaacttgacatggatttagaggaacaccaaggtgaaatgaaccagaaatacaaggagctaaagaaaagggaggaacatatggacacttttattgagacttttgaggaaacaaagaatcaggaactgaaacgaaaggcacagatagaagccaacattgttgcactcttggagcactgcagtcgaaatataaatcgtatagaacagatatcctctatcaccaatcaagagctaaagatgatgcaggatgacctcaattttaaatctactgaagtgcagaaatcacaaagtacagctcagaatttgacttcagacattcaacgtctgcagttggatctgcagaaaatggagcttctagaaagtaagatgactgaagaacagcattctctaaaaagcaaaattaagcaaatgacaactgatctggagatatataatgatttgccagctttaaaatcatcaggtgaagaaaagataaagaaattacatcaggagagaatgatattatcaacccacagaaatgcctttaagaaaataatggagaagcaaaacatagagtatgaggcactaaaaacacaattgcaagaaaatgagacacattctcagcttacaaatttggagagaaagtggcaacaccttgagcaaaataattttgcgatgaaagaattcatagcaaccaagagtcaagagagtgattaccagccaattaagaaaaatgtgaccaagcagattgcagagtacaataaaaccatcgtggatgctttacatagcaccagcggaaactgagtttaagtccactgaaagtctctaaggaagtatcctcttgctgctaaacttggtacaagttgactaccaaaaaaaaaaaaagcttacttttggagtttacctaaaatttctgaatgttataatttttgtggcctcttttaagaatgatattttaaaatagtaaatagttcaataaatggtttgcatatt

SEQ ID NO: 39573 - protein, 372 aa, Artificial Sequence
  derived and/or modified sequence
MASNHKSSAARPVSRGGVGLTGRPPSGIRPLSGNIRVATAMPPGTARPGSRGCPIGTGGVLSSQIKVAHRPVTQQGLTGMKTGTKGPQRQILDKSYYLGLLRSKISELTTEVNKLQKGIEMYNQENSVYLSYEKRAETLAVEIKELQGQLADYNMLVDKLNTNTEMEEVMNDYNMLKAQNDRETQSLDVIFTERQAKEKQIRSVEEEIEQEKQATDDIIKNMSFENQVKYLEMKTTNEKLLQELDTLQQQLDSQNMKKESLEAEIAHSQVKQEAVLLHEKLYELESHRDQMIAEDKSIGSPMEEREKLLKQIKDDNQEIASMERQLTDTKEKINQFIEEIRQLDMDLEEHQDPTNYGWKILEKNTGSFKKQV

SEQ ID NO: 39574 - protein, 127 aa, Artificial Sequence
  derived and/or modified sequence
MASNHKSSAARPVSRGGVGLTGRPPSGIRPLSGNIRVATAMPPGTARPGSRGCPIGTGGVLSSQIKVAHRPVTQQGLTGMKTGTKGPQRQILDKSYYLGLLRSKISELTTEVNKLQKGIEMYNQENS

SEQ ID NO: 39575 - DNA, 1119 bp, Artificial Sequence
  derived and/or modified sequence
atggccagcaaccacaagagcagcgccgccagacccgtgagcagaggcggcgtgggcctgaccggcagaccccccagcggcatcagacccctgagcggcaacatcagagtggccaccgccatgccccccggcaccgccagacccggcagcagaggctgccccatcggcaccggcggcgtgctgagcagccagatcaaggtggcccacagacccgtgacccagcagggcctgaccggcatgaagaccggcaccaagggcccccagagacagatcctggacaagagctactacctgggcctgctgagaagcaagatcagcgagctgaccaccgaggtgaacaagctgcagaagggcatcgagatgtacaaccaggagaacagcgtgtacctgagctacgagaagagagccgagaccctggccgtggagatcaaggagctgcagggccagctggccgactacaacatgctggtggacaagctgaacaccaacaccgagatggaggaggtgatgaacgactacaacatgctgaaggcccagaacgacagagagacccagagcctggacgtgatcttcaccgagagacaggccaaggagaagcagatcagaagcgtggaggaggagatcgagcaggagaagcaggccaccgacgacatcatcaagaacatgagcttcgagaaccaggtgaagtacctggagatgaagaccaccaacgagaagctgctgcaggagctggacaccctgcagcagcagctggacagccagaacatgaagaaggagagcctggaggccgagatcgcccacagccaggtgaagcaggaggccgtgctgctgcacgagaagctgtacgagctggagagccacagagaccagatgatcgccgaggacaagagcatcggcagccccatggaggagagagagaagctgctgaagcagatcaaggacgacaaccaggagatcgccagcatggagagacagctgaccgacaccaaggagaagatcaaccagttcatcgaggagatcagacagctggacatggacctggaggagcaccaggaccccaccaactacggctggaagatcctggagaagaacaccggcagcttcaagaagcaggtgtag

SEQ ID NO: 39576 - DNA, 384 bp, Artificial Sequence
  derived and/or modified sequence
atggccagcaaccacaagagcagcgccgccagacccgtgagcagaggcggcgtgggcctgaccggcagaccccccagcggcatcagacccctgagcggcaacatcagagtggccaccgccatgccccccggcaccgccagacccggcagcagaggctgccccatcggcaccggcggcgtgctgagcagccagatcaaggtggcccacagacccgtgacccagcagggcctgaccggcatgaagaccggcaccaagggcccccagagacagatcctggacaagagctactacctgggcctgctgagaagcaagatcagcgagctgaccaccgaggtgaacaagctgcagaagggcatcgagatgtacaaccaggagaacagctag

SEQ ID NO: 39577 - DNA, 528 bp, Artificial Sequence
  derived and/or modified sequence
atggccagcaaccacaagagcagcgccgccagacccgtgagcagaggcggcgtgggcctgaccggcagaccccccagcggcatcagacccctgagcggcaacatcagagtggccaccgccatgccccccggcaccgccagacccggcagcagaggctgccccatcggcaccggcggcgtgctgagcagccagatcaaggtggcccacagacccgtgacccagcagggcctgaccggcatgaagaccggcaccaagggcccccagagacagatcctggacaagagctactacctgggcctgctgagaagcaagatcagcgagctgaccaccgaggtgaacaagctgcagaagggcatcgagatgtacaaccaggagaacagcgtgtacctgagctacgagaagagagccgagaccctggccgtggagatcaaggagctgcagggccagctggccgactacaacatgctggtggacaagctgaacaccaacaccgagatggaggaggtgatgaacgactacaacatgtag

SEQ ID NO: 39578 - DNA, 1119 bp, Artificial Sequence
  derived and/or modified sequence
atggccagcaatcataaatcaagcgcagcgcgtcccgtgagtagaggaggcgttgggctgacaggaagacccccaagcgggataagaccactgtccggaaatatccgcgtggctactgcaatgccacccggaactgctagaccgggctcaaggggatgtcccatcggaacaggtggggtgctgtcttcacagatcaaagtcgcgcatagacccgttacacaacaaggtctgacaggcatgaagaccggaacaaaggggccacagcgtcagatcctcgacaaatcatactaccttggcctgctgagatccaagatttcagagctcactactgaagtcaacaagcttcagaaaggtatcgaaatgtacaaccaggagaactccgtctacctctcctatgagaagcgggctgagaccttagccgtggagatcaaggagctccagggacaactcgccgactataacatgctggtggataagctgaatactaacaccgagatggaagaagtgatgaatgactacaacatgctgaaagcccagaacgatagagagacccagagcctggacgtgatcttcaccgaaaggcaagccaaggaaaaacagatcaggtcagtcgaagaagagatcgagcaggaaaagcaagcaaccgacgatattatcaagaacatgtccttcgagaaccaggtgaagtacctggagatgaaaacgaccaacgagaaacttctgcaggagttggacactctccagcagcagctcgactcccagaacatgaagaaggagtctttagaagccgaaatcgcccacagccaagtgaaacaagaggccgtgctgcttcatgagaaactgtacgagctcgagagtcaccgcgatcaaatgatcgctgaggacaagtctatcgggtccccaatggaagaaagagaaaaactgctgaagcagattaaggacgacaaccaggagattgcatctatggaacggcaactgacagatacaaaggaaaagattaaccagttcatagaggaaatccgacagctcgacatggatctcgaagaacaccaggaccccactaactacggatggaagattctggagaagaacaccgggtcctttaagaagcaggtgtag

SEQ ID NO: 39579 - DNA, 384 bp, Artificial Sequence
  derived and/or modified sequence
atggcctctaatcataaaagttccgcggcacgaccagtctcacgcgggggggtggggctcacaggacggcctccatctgggattcggcccctatccggcaacatcagggtggccacagctatgccacctgggactgctcggcctggctcacgtggctgcccaatcggaacgggaggggtgttgtcctcccagataaaagtcgcccacaggccagttactcaacagggattgactggaatgaagaccggcactaagggcccgcagaggcaaattctggacaagtcctactacctagggctactgcgttccaaaattagcgagctgaccactgaagtgaataagcttcagaaaggcattgagatgtacaaccaagagaattcttag

SEQ ID NO: 39580 - DNA, 528 bp, Artificial Sequence
  derived and/or modified sequence
atggcctcaaaccataaaagttcggctgcacgccccgtgagtcgtggtggtgtggggctgactggccggccccccagcggtataagacccctaagcggcaacatacgggttgcaactgccatgccccctggtaccgctcgaccaggttcgaggggctgcccaataggtaccggaggagtgttaagctcccagattaaagtcgcacatcggcctgtgactcagcagggcctcacgggaatgaaaactggaaccaaaggacctcagcggcagattctcgacaaatcttactatcttggacttctgaggtccaagattagcgaacttacaactgaagttaacaagctgcagaagggtatagagatgtacaatcaggagaactccgtgtatctgtcatatgagaaacgcgcagaaacactggccgtggagatcaaggagctgcagggccagcttgcagactacaacatgttggttgataagctgaacacgaataccgaaatggaagaggtaatgaacgactacaacatgtag

SEQ ID NO: 39581 - DNA, 1119 bp, Artificial Sequence
  derived and/or modified sequence
atggccagcaaccacaagagcagcgctgcccggcctgtgtcccggggcggcgtgggcctgaccggccggccccccagcggcatccggcccctgagcggcaacatccgggtggccacagccatgcctcctggaacagcccggcccggcagccggggctgccccatcggcactggaggagtgctgagcagccagatcaaggtggcccacaggcctgtgacccagcagggcctgaccggcatgaagacaggcaccaagggcccccagaggcagatcctggacaagagctactacctgggcctgctgcggagcaagatcagcgagctgaccacagaggtgaacaagctgcagaagggcatcgagatgtacaaccaggagaacagcgtgtacctgtcctatgagaagagagctgagaccctggccgtggagatcaaggagctgcagggccagctggccgactacaacatgctggtggacaagctgaacaccaacacagagatggaggaggtgatgaatgactacaacatgctgaaggcccagaatgaccgggagacccagagcctggatgtgatcttcacagagcggcaggccaaggagaagcagatccgctctgtggaggaggagattgagcaggagaagcaggccacagatgacatcatcaagaacatgagctttgagaaccaggtgaagtacctggagatgaagaccaccaatgagaagctgctgcaggagctggacaccctgcagcagcagctggacagccagaacatgaagaaggagagcctggaggccgagatcgcccacagccaggtgaagcaggaggccgtgctgctgcacgagaagctgtatgagctggagagccaccgggaccagatgattgctgaggacaagagcatcggcagccccatggaggagcgggagaagctgctgaagcagatcaaggatgacaaccaggagatcgcctccatggagcggcagctgacagacaccaaggagaagatcaaccagttcatcgaggagatccggcagctggacatggacctggaggagcaccaggaccccaccaactacggctggaagatcctggagaagaacacaggcagcttcaagaagcaggtgtag

SEQ ID NO: 39582 - DNA, 384 bp, Artificial Sequence
  derived and/or modified sequence
atggccagcaaccacaagagcagcgctgcccggcctgtgtcccggggcggcgtgggcctgaccggccggccccccagcggcatccggcccctgagcggcaacatccgggtggccacagccatgcctcctggaacagcccggcccggcagccggggctgccccatcggcactggaggagtgctgagcagccagatcaaggtggcccacaggcctgtgacccagcagggcctgaccggcatgaagacaggcaccaagggcccccagaggcagatcctggacaagagctactacctgggcctgctgcggagcaagatcagcgagctgaccacagaggtgaacaagctgcagaagggcatcgagatgtacaaccaggagaacagctag

SEQ ID NO: 39583 - DNA, 528 bp, Artificial Sequence
  derived and/or modified sequence
atggccagcaaccacaagagcagcgctgcccggcctgtgtcccggggcggcgtgggcctgaccggccggccccccagcggcatccggcccctgagcggcaacatccgggtggccacagccatgcctcctggaacagcccggcccggcagccggggctgccccatcggcactggaggagtgctgagcagccagatcaaggtggcccacaggcctgtgacccagcagggcctgaccggcatgaagacaggcaccaagggcccccagaggcagatcctggacaagagctactacctgggcctgctgcggagcaagatcagcgagctgaccacagaggtgaacaagctgcagaagggcatcgagatgtacaaccaggagaacagcgtgtacctgtcctatgagaagagagctgagaccctggccgtggagatcaaggagctgcagggccagctggccgactacaacatgctggtggacaagctgaacaccaacacagagatggaggaggtgatgaatgactacaacatgtag

SEQ ID NO: 39584 - DNA, 1119 bp, Artificial Sequence
  derived and/or modified sequence
atggccagcaaccacaagagcagcgccgcccggcccgtgagccggggtggagtgggtctgaccggacggccaccaagtggaatccgtccactgtcagggaacatcagggttgccaccgcaatgccccctggtacagcgcgccccggatcgagagggtgtcccatcggcaccggtggagtgctgagctcgcagattaaggtggcgcacaggccagtgactcagcagggcttgactggcatgaaaacgggcacaaagggaccacagagacagattcttgacaaaagctattatctgggcctactgcgatctaagatctccgagctgacaacagaagtgaacaaactccagaaaggcattgaaatgtacaaccaggagaactccgtgtacctgtcgtatgagaagagagcagaaactctagccgtcgaaattaaggagctgcaggggcagctggctgactataacatgttagttgataagttaaacacgaatacggagatggaggaggtaatgaatgactacaacatgctaaaagctcaaaacgatcgcgagacccaatctctggatgtcatcttcacggaaaggcaggccaaggaaaaacagatccgcagcgttgaggaagaaatcgaacaggagaaacaggccaccgatgatataatcaaaaacatgagtttcgagaaccaggtcaagtatctggagatgaagacaacgaacgaaaagctgctgcaagaactggataccctgcagcaacagctcgacagccagaatatgaaaaaagaaagtctggaagcagagatcgcccacagtcaggtgaagcaggaggcagtgcttctgcatgagaagctttacgagctcgagtcacacagggaccaaatgatcgcggaagacaagagcatcggctcaccaatggaagaaagagaaaagttactcaagcaaataaaggatgacaaccaggagatcgcctctatggaacgccagcttacagatactaaggagaagattaatcagttcatcgaggagattcgacagctggatatggatctcgaggaacaccaagaccctacaaactacggatggaaaatcctcgagaagaacacggggagtttcaaaaagcaggtttag

SEQ ID NO: 39585 - DNA, 384 bp, Artificial Sequence
  derived and/or modified sequence
atggccagcaaccacaagagcagcgccgcccggcccgtgagccggggtggggtggggctgactggacgccccccaagtggcataagacccctctcaggtaacatcagagtggccaccgctatgcctcccgggaccgcccgcccagggagccgggggtgcccaattggcactgggggggtcttgtcttcccagatcaaagttgcccatcggcccgtgacacaacagggcctgacaggcatgaaaactggaactaagggaccccagcggcagatcctggataagtcctattacctggggctgctccggagtaagatcagtgagcttactactgaggtgaacaagttgcaaaaaggcattgagatgtacaatcaggagaactcatag

SEQ ID NO: 39586 - DNA, 528 bp, Artificial Sequence
  derived and/or modified sequence
atggccagcaaccacaagagcagcgccgcccggcccgtgagccgggggggcgttggcctgaccggccggcccccatcaggtattcggcctctgagcggcaatattagggtagcaactgccatgcccccagggaccgcacggccgggctctcggggttgcccaatcggcacaggaggcgttctgagtagtcaaatcaaagttgcacatagacctgtgacacagcaaggtttgactggcatgaagacaggcacaaaagggccccagaggcagatcctggataagtcttactatctcggtttgttgcggtcaaagatttccgaactcactacggaggtgaacaagctgcagaaaggaatagagatgtacaaccaggaaaatagcgtatatctatcgtacgagaaaagggcagaaaccctggccgtggagattaaggaactgcagggacagctcgctgattacaatatgctcgttgacaagctcaacactaataccgagatggaagaagtgatgaatgactataatatgtag

SEQ ID NO: 39587 - DNA, 1119 bp, Artificial Sequence
  derived and/or modified sequence
atggcatctaaccataagtcttctgcagcacgccctgtgtcgagaggaggcgtggggctcaccgggcgtcctccatcagggatcaggcctctttccggaaatattcgggttgccactgcaatgccaccaggcactgcacggccaggatcgagaggctgtcctataggcactggcggtgttctgtcctcccaaatcaaagtggcccacaggcccgtgacacagcagggcctgaccgggatgaaaactggaactaaaggtcctcaaagacagatccttgacaagtcgtattacctgggcctgctgcgctctaagatcagtgagctcacaacggaagtgaacaaactgcagaagggtatcgagatgtacaatcaggaaaactccgtctatctctcatatgagaagagggcagaaacattagctgtagagattaaagagctacaaggtcagctcgccgactacaacatgctggtggataagttgaacaccaacaccgagatggaggaggttatgaatgactacaatatgctgaaggcccaaaatgatcgggagactcagagtctggatgtcatctttacagaacgacaagcaaaagagaagcaaattcgaagcgtggaggaggagatcgagcaagaaaaacaagcgaccgatgatattatcaaaaacatgtcattcgaaaatcaggtgaagtacctggaaatgaaaaccaccaacgaaaaactacttcaggagcttgacaccctgcagcagcagctggacagtcagaatatgaagaaagaaagccttgaagccgaaattgcccacagccaggttaagcaagaggcagttctcctccacgagaagctgtacgagctggaatctcatagggatcaaatgatcgcagaggataagtccattggcagccccatggaggagagagaaaaactgctgaagcagatcaaagatgataatcaggaaatagcaagtatggagagacagcttactgacaccaaggagaagattaaccagttcattgaggagatccggcaactggacatggatttagaggaacaccaagatcccactaactacgggtggaagatactggagaagaacacaggatcatttaaaaagcaggtatag

SEQ ID NO: 39588 - DNA, 1462 bp, Artificial Sequence
  derived and/or modified sequence
gcgagccgggcaactgccctccttccgcgccggcggagcgattaaagtgaagaaacaatggccagcaatcacaaatcttcagcagctcgccctgtttcaagaggtggagttgggttaacaggaaggcctccttctgggatacgacccctatcaggaaatattcgagtggcaactgcaatgccacctgggacagcaagaccaggttctcgtggttgtcccatagggactggtggagttctgtcttctcaaatcaaagttgcccatcgccctgtaacacaacaaggtttgactggaatgaaaactgggacgaaaggtccccagaggcaaattttagacaaatcttactatcttgggcttcttagaagtaaaataagtgaacttacaactgaagttaataaacttcagaagggaatagaaatgtacaatcaagagaattcagtatatttgtcatatgaaaagagggctgagactttagctgttgagataaaagagcttcaaggacaactagcagactacaacatgttggtagataaacttaataccaacactgaaatggaagaagtaatgaatgattacaatatgcttaaagctcaaaatgatcgagaaacacaaagtttggatgtcatatttactgaaagacaagcgaaagaaaaacaaatcagaagtgtcgaagaagaaattgaacaggaaaaacaagcaacagatgacattatcaaaaatatgtcttttgaaaaccaagtcaagtacctagagatgaaaaccacaaatgagaaactgttacaggaattagatacacttcaacaacaattggattcacagaacatgaaaaaagagagcctggaagcagaaatagctcactcccaggtgaaacaggaggcggtattgctgcatgaaaaactttatgagttggagtcccatcgagatcaaatgattgcagaagacaaaagcataggatctccaatggaagagagagagaaattacttaagcagattaaagatgataatcaggaaatagccagcatggaaagacagttaacagatacaaaagaaaagataaatcagtttattgaagaaattagacaacttgacatggatttagaggaacaccaagatcctaccaactatggatggaaaatacttgaaaaaaatacaggaagtttcaaaaagcaagtttgaacctgccatgtgctaagcactatgctgaatccatttgaactgaagaataccctgctatagcctcccattgtttcacagatcttcagtctctctctagcacccactgtttgagcagtgttcatctggcattttattcattggctacttgtgttcactctttgcttctgtgaaaaaaaaaagactcctaaaaatcaattatatggtgaaagaaatcccttacagactaagagagagcgtaaagtgctgtctctcaacaagaaaataaaattcttagatcttttgaaaa

SEQ ID NO: 39589 - DNA, 384 bp, Artificial Sequence
  derived and/or modified sequence
atggcaagtaaccataaatcatcggccgcacgcccagtgagccgcggtggtgttggtctgaccgggagacccccatcagggatccgtcctctcagcggcaacattagggtggccactgccatgccacccggaactgcgagacctggatcacgcggttgccccatcggaaccggtggcgtgctctcgtctcaaatcaaagttgcccataggccagtgacccagcagggtttgactggaatgaaaacggggacaaaaggtcctcaaaggcagattctcgacaagtcatactaccttgggcttctcagaagtaagatcagcgaattaactactgaagtgaacaaattgcaaaagggcattgagatgtataatcaggagaattcatag

SEQ ID NO: 39590 - DNA, 528 bp, Artificial Sequence
  derived and/or modified sequence
atggcatcgaatcacaagagcagtgctgctcggccagtgtcaagagggggtgtcggccttactggacgtccgccatctggcattagacccttgtcagggaatattcgcgttgccacagcaatgccaccgggaacagcgaggccgggaagccgaggatgtccaatcggcacagggggagtactcagtagtcagatcaaggtggcccaccgccctgtcacccagcagggcctcacaggaatgaagaccggaaccaagggacctcagcgtcagatactggacaagtcatattatctggggctgcttcgctctaagataagtgagctcactacggaggtgaataagctccagaaaggaatcgaaatgtacaatcaggagaattctgtgtatctgtcatatgaaaagcgcgctgagacactggcagtcgaaattaaagagttgcagggccagctcgccgactataacatgctagtggacaagctcaacaccaacaccgaaatggaggaagttatgaacgactataacatgtag

SEQ ID NO: 39591 - DNA, 563 bp, Artificial Sequence
  derived and/or modified sequence
gtcccaaccgccgacgccgatgcggagctgagctggctttcctccagggctctggactccctgctgagcaagagagaaagaggcccgcccttccaccaggacgcctgaccctggggtccttcccaaacccgggtctcttccgactccgggcccaacagtttgtgcgattaaagtgaagaaacaatggccagcaatcacaaatcttcagcagctcgccctgtttcaagaggtggagttgggttaacaggaaggcctccttctgggatacgacccctatcaggaaatattcgagtggcaactgcaatgccacctgggacagcaagaccaggttctcgtggttgtcccatagggactggtggagttctgtcttctcaaatcaaagttgcccatcgccctgtaacacaacaaggtttgactggaatgaaaactgggacgaaaggtccccagaggcaaattttagacaaatcttactatcttgggcttcttagaagtaaaataagtgaacttacaactgaagttaataaacttcagaagggaatagaaatgtacaatcaagagaattc

SEQ ID NO: 39592 - DNA, 652 bp, Artificial Sequence
  derived and/or modified sequence
tcgtcatggccagtgtctgtctggcgcccggtgcccaggcactgtgcgagaccagtccgcaggggcgactcggagagcgccgggccgcggcgggagaagagcctgcagcgattaaagtgaagaaacaatggccagcaatcacaaatcttcagcagctcgccctgtttcaagaggtggagttgggttaacaggaaggcctccttctgggatacgacccctatcaggaaatattcgagtggcaactgcaatgccacctgggacagcaagaccaggttctcgtggttgtcccatagggactggtggagttctgtcttctcaaatcaaagttgcccatcgccctgtaacacaacaaggtttgactggaatgaaaactgggacgaaaggtccccagaggcaaattttagacaaatcttactatcttgggcttcttagaagtaaaataagtgaacttacaactgaagttaataaacttcagaagggaatagaaatgtacaatcaagagaattcagtatatttgtcatatgaaaagagggctgagactttagctgttgagataaaagagcttcaaggacaactagcagactacaacatgttggtagataaacttaataccaacactgaaatggaagaagtaatgaatgattacaatatg

SEQ ID NO: 39593 - DNA, 1503 bp, Artificial Sequence
  derived and/or modified sequence
atggacagcagcagcttcatccagttcgacgtgcccgagtacagcagcaccgtgctgagccagctgaacgagctgagactgcagggcaagctgtgcgacatcatcgtgcacatccagggccagcccttcagagcccacaaggccgtgctggccgccagcagcccctacttcagagaccacagcgccctgagcaccatgagcggcctgagcatcagcgtgatcaagaaccccaacgtgttcgagcagctgctgagcttctgctacaccggcagaatgagcctgcagctgaaggacgtggtgagcttcctgaccgccgccagcttcctgcagatgcagtgcgtgatcgacaagtgcacccagatcctggagagcatccacagcaagatcagcgtgggcgacgtggacagcgtgaccgtgggcgccgaggagaaccccgagagcagaaacggcgtgaaggacagcagcttcttcgccaaccccgtggagatcagccccccctactgcagccagggcagacagcccaccgccagcagcgacctgagaatggagaccacccccagcaaggccctgagaagcagactgcaggaggagggccacagcgacagaggcagcagcggcagcgtgagcgagtacgagatccagatcgagggcgaccacgagcagggcgacctgctggtgagagagagccagatcaccgaggtgaaggtgaagatggagaagagcgacagacccagctgcagcgacagcagcagcctgggcgacgacggctaccacaccgagatggtggacggcgagcaggtggtggccgtgaacgtgggcagctacggcagcgtgctgcagcacgcctacagctacagccaggccgccagccagcccaccaacgtgagcgaggccttcggcagcctgagcaacagcagccccagcagaagcatgctgagctgcttcagaggcggcagagccagacagaagagagccctgagcgtgcacctgcacagcgacctgcagggcctggtgcagggcagcgacagcgaggccatgatgaacaaccccggctacgagagcagccccagagagagaagcgccagaggccactggtacccctacaacgagagactgatctgcatctactgcggcaagagcttcaaccagaagggcagcctggacagacacatgagactgcacatgggcatcacccccttcgtgtgcaagttctgcggcaagaagtacaccagaaaggaccagctggagtaccacatcagaggccacaccgacgacaagcccttcagatgcgagatctgcggcaagtgcttccccttccagggcaccctgaaccagcacctgagaaagaaccaccccggcgtggccgaggtgagaagcagaatcgagagccccgagagaaccgacgtgtacgtggagcagaagctggagaacgacgccagcgccagcgagatgggcctggacagcagaatggagatccacaccgtgagcgacgcccccgactag

SEQ ID NO: 39594 - DNA, 1503 bp, Artificial Sequence
  derived and/or modified sequence
atggattcatccagttttattcagtttgatgtgcccgaatactccagtacagtgctgtcccagctaaatgaactgcggcttcaggggaagttgtgcgacatcatcgttcacatacagggccagcctttccgggcacacaaggccgtgctcgcggcctcctcaccctatttcagggatcatagtgcactctccacgatgagcggactgagcatcagcgtgatcaagaatcctaatgtttttgagcagctcttaagcttttgctacaccggacgaatgtccctgcagcttaaggatgtcgtgagcttccttactgctgcctcctttctgcaaatgcagtgcgttattgataaatgtactcagattctggaatcaattcattccaagattagcgtaggggacgtcgactccgttacggttggcgctgaagaaaatccggagagcaggaatggggttaaggatagtagtttttttgcaaatccagtagaaatctcgccaccatactgttctcagggcagacagcccaccgcttcctccgacctgcgcatggaaaccactccaagcaaggcactccgctcccggctgcaggaagagggccattccgaccgcggctcgagtggcagcgtttcggaatacgagatccagatcgaaggagaccatgaacagggagaccttctcgtcagggagtcacagataaccgaggtcaaggttaagatggagaaatctgaccgaccaagttgttccgattcatcttctctgggagatgacggctaccacacggagatggtggatggcgagcaggtggtcgccgtcaacgtgggatcctacgggtcagttttacagcatgcctactcatactcccaagccgcctctcagcccactaacgtctccgaggccttcggaagcttgtccaacagttcccctagccgctccatgttgagttgttttcgggggggcagggccaggcaaaagcgcgccctgtctgtgcacctgcactctgacttacaggggctggtgcaagggtccgattccgaggccatgatgaacaatcccggatatgagtccagcccccgggaaagaagcgctcgcggacactggtacccttataacgaacgcctgatttgcatctattgtggtaaaagcttcaatcagaaaggcagcctggatcgccacatgagactccatatgggcattaccccgttcgtctgcaaattctgcggaaaaaaatacacacgcaaagatcagctcgagtatcatatacgtgggcacactgatgacaaaccctttcggtgtgaaatctgcggcaaatgcttcccattccagggtaccctcaaccagcatctccgcaagaatcatccgggagtcgccgaagtaagatctagaatcgagagtcctgagaggaccgacgtttatgtcgaacaaaaactggagaatgacgcaagcgccagtgagatgggattggactcaagaatggagatacacacagtgagcgatgctcctgactag

SEQ ID NO: 39595 - DNA, 1503 bp, Artificial Sequence
  derived and/or modified sequence
atggacagcagcagcttcatccagtttgatgtgcctgagtacagcagcacagtgctgagccagctgaatgagctgcggctgcagggcaagctgtgtgacatcatcgtgcacatccagggccagcccttccgggcccacaaggctgtgctggccgccagcagcccctacttccgggaccacagcgccctgagcaccatgagcggcctgagcatcagcgtcatcaagaaccccaacgtgtttgagcagctgctgtccttctgctacacaggccgcatgagcctgcagctgaaggatgtggtgtccttcctgacagctgccagcttcctgcagatgcagtgtgtgattgacaagtgcacccagatcctggagagcatccacagcaagatctctgtgggagatgtggacagcgtgacagtgggcgcagaagaaaatcctgagagcagaaatggagtgaaggacagcagcttctttgccaaccctgtggagatcagccccccctactgcagccagggccggcagcccacagccagcagtgacctgaggatggagaccacccccagcaaggccctgcggagccggctgcaggaggagggccacagcgaccggggcagcagcggctctgtgtctgaatatgagatccagattgaaggagaccacgagcagggcgacctgctggtgcgggagagccagatcacagaggtgaaggtgaagatggagaagagtgaccggcccagctgcagcgacagcagcagcctgggagatgatggctaccacacagagatggtggatggagagcaggtggtggccgtgaatgtgggcagctatggctctgtgctgcagcacgcctacagctacagccaggccgccagccagcccaccaacgtgtctgaggccttcggcagcctgagcaacagcagccccagccgctccatgctgagctgcttccggggcggccgggcccggcagaagagggccctgtctgtgcacctgcacagcgacctgcagggcctggtgcagggcagtgacagcgaggccatgatgaacaaccctggctatgagagcagcccccgggagaggtctgcccggggccactggtacccctacaatgaaagactcatctgcatctactgcggcaagagcttcaaccagaagggcagcctggacagacacatgaggctgcacatgggcatcaccccatttgtgtgcaagttctgtgggaagaagtacaccaggaaggaccagctggagtaccacatccggggccacacagatgacaagcccttccgctgtgagatctgtgggaagtgcttccccttccagggcaccctgaaccagcacctgaggaagaaccaccctggggtggccgaggtgcgcagcagaattgagagccctgagaggacagatgtgtatgtggagcagaagctggagaatgatgccagcgccagcgagatgggcctggacagcaggatggagatccacacagtgtctgatgccccagactag

SEQ ID NO: 39596 - DNA, 1503 bp, Artificial Sequence
  derived and/or modified sequence
atggacagcagcagcttcatccagttcgacgtgcccgagtacagctctactgtgctgtctcagctcaatgaactgcgcctccaggggaaactctgcgacataatcgtgcacattcagggacagcctttccgcgcccataaagccgtcctcgcagctagtagtccctacttccgggaccactcggctctgagcaccatgtcgggactcagcatctctgttatcaagaatcccaatgtgttcgagcagctgctgtcattttgctacactggacgaatgagcctccagctgaaagatgtggtgtcttttttaaccgccgcctccttcctccagatgcagtgtgtgatcgataagtgcactcagatactggagagtatccatagcaaaatcagcgtcggggacgtggacagtgtcaccgtcggtgccgaggaaaaccccgaatccaggaacggtgtcaaagactcttccttcttcgcaaaccctgtggagatctcgcccccgtattgttcccaggggcgacagcctactgccagcagtgacctacgcatggaaaccacaccatcaaaagctttgcgctccagactccaggaggaagggcactcagacaggggctccagtgggagcgtcagcgaatatgagattcagattgagggtgatcatgagcagggagatctactggtacgcgaatctcagatcaccgaggtgaaggtgaagatggaaaagtccgacagaccttcttgtagtgattcttcaagcctcggtgacgacggctatcatactgaaatggtggatggcgaacaggtggtggccgtgaatgtgggctcttatggaagcgtgctgcagcacgcatattcgtacagtcaggctgcctcacagcccacgaatgtgtcagaggcctttggctcactttccaactcctctccatctcgcagcatgctgtcatgtttccggggaggccgcgcacgacaaaaaagggctctgagtgtgcatctgcactctgaccttcagggactagtgcaggggtcagactcagaagcaatgatgaataatcctggatacgaatctagtcctagggagcgctctgcccgcggccattggtacccgtataatgagcggctgatttgtatatactgcggcaaatcatttaaccagaaaggctccttagacaggcatatgcgattacacatgggaattactcccttcgtgtgtaagttttgcgggaagaaatacaccagaaaggaccagttagaataccatattcgtgggcatacagatgacaaacctttcaggtgcgaaatatgtggaaagtgcttcccattccaaggcactttgaatcagcacctgaggaagaatcaccccggggtggccgaggtgaggtcacggatcgagagtcctgagcgaaccgacgtgtatgtggagcagaaactcgaaaacgatgcaagtgcctctgaaatgggtcttgactctcgtatggaaatccatacagtgtcagacgctcctgactag

SEQ ID NO: 39597 - DNA, 1503 bp, Artificial Sequence
  derived and/or modified sequence
atggactcttcctcatttatccagttcgatgtgcccgaatactctagcaccgttttgagtcaacttaatgagctccggcttcaagggaagttatgtgatattattgtccacattcaaggtcagccattcagggcgcacaaggcggtgctggctgccagctcaccctattttcgcgaccacagcgcgctgtcgactatgtctgggctttcgattagcgtcataaagaatccaaatgtgttcgaacagctgctgagtttttgctatacagggaggatgtctctgcaactgaaggatgttgtaagcttcctcaccgccgcttctttcctgcagatgcagtgcgtgatcgacaagtgcacccaaattctggagagtatccactctaaaatctcagtaggagacgtggatagcgtgaccgtcggtgccgaagagaatcctgagtcccgtaacggcgtcaaagacagttctttttttgccaacccagtcgaaatctctccaccatactgcagccagggacgacagcccaccgcctcctcagatcttcggatggagacaacacctagcaaggccttgcggagcaggctgcaggaagaaggacactccgatcgcggtagtagtggctctgtgtcagaatacgagatccagatcgagggcgaccatgagcagggcgatcttctggtgcgagaatcccagattaccgaagttaaggtcaaaatggagaaaagtgatcgtccatcatgctccgacagttctagcctgggagatgatggttatcacaccgagatggtagatggagaacaagttgtggcagtcaacgtgggcagctatggttctgttctgcagcacgcatacagctatagtcaggccgcatctcaaccgaccaacgtctctgaagcatttgggagcctgtctaacagttcccctagtcggagcatgctgagttgttttagaggtggtcgtgcccgacagaaacgcgcactgtctgtacacctccattctgatttgcaaggactggttcagggcagtgacagcgaggctatgatgaataatccgggatacgagtcctcacccagagagcgctctgcacggggacattggtacccttacaacgaaaggctgatttgcatatattgcgggaaatcgttcaaccagaaaggatccctcgaccggcacatgagactccacatgggtattaccccattcgtgtgcaaattttgcggcaagaaatacaccaggaaagatcagctagaataccacatcagaggccacactgacgataagccatttcgctgcgagatatgtgggaagtgcttcccatttcagggaaccctgaatcagcatctacggaaaaaccatcctggcgtggccgaggtcagatcaaggattgagtcacccgaacgcaccgatgtgtacgtggaacagaagcttgagaatgatgcttccgcatctgaaatgggtctggacagtaggatggaaatacatactgtctctgatgcaccggactag

SEQ ID NO: 39598 - protein, 575 aa, Artificial Sequence
  derived and/or modified sequence
MSSDEEKYSLPVVQNDSSRGSSVSSNLQEEYEELLHYAIVTPNIEPCASQSSHPKGELVPDVRISTIHDILHSQGNNSEVRETAIEVGKGCDFHISSHSKTDESSPVLSPRKPSHPVMDFFSSHLLADSSSPATNSSHTDAHEILVSDFLVSDENLQKMENVLDLWSSGLKTNIISELSKWRLNFIDWHRMEMRKEKEKHAAHLKQLCNQINELKELQKTFEISIGRKDEVISSLSHAIGKQKEKIELMRTFFHWRIGHVRARQDVYEGKLADQYYQRTLLKKVWKVWRSVVQKQWKDVVERACQARAEEVCIQISNDYEAKVAMLSGALENAKAEIQRMQHEKEHFEDSMKKAFMRGVCALNLEAMTIFQNRNDAGIDSTNNKKEEYGPGVQGKEHSAHLDPSAPPMPLPVTSPLLPSPPAAVGGASATAVPSAASMTSTRAASASSVHVPVSALGAGSAATAASEEMYVPRVVTSAQQKAGRTITARITGRCDFASKNRISSSLAIMGVSPPMSSVVVEKHHPVTVQTIPQATAAKYPRTIHPESSTSASRSLGTRSAHTQSLTSVHSIKVVD

SEQ ID NO: 39599 - DNA, 1728 bp, Artificial Sequence
  derived and/or modified sequence
atgagcagcgacgaggagaagtacagcctgcccgtggtgcagaacgacagcagcagaggcagcagcgtgagcagcaacctgcaggaggagtacgaggagctgctgcactacgccatcgtgacccccaacatcgagccctgcgccagccagagcagccaccccaagggcgagctggtgcccgacgtgagaatcagcaccatccacgacatcctgcacagccagggcaacaacagcgaggtgagagagaccgccatcgaggtgggcaagggctgcgacttccacatcagcagccacagcaagaccgacgagagcagccccgtgctgagccccagaaagcccagccaccccgtgatggacttcttcagcagccacctgctggccgacagcagcagccccgccaccaacagcagccacaccgacgcccacgagatcctggtgagcgacttcctggtgagcgacgagaacctgcagaagatggagaacgtgctggacctgtggagcagcggcctgaagaccaacatcatcagcgagctgagcaagtggagactgaacttcatcgactggcacagaatggagatgagaaaggagaaggagaagcacgccgcccacctgaagcagctgtgcaaccagatcaacgagctgaaggagctgcagaagaccttcgagatcagcatcggcagaaaggacgaggtgatcagcagcctgagccacgccatcggcaagcagaaggagaagatcgagctgatgagaaccttcttccactggagaatcggccacgtgagagccagacaggacgtgtacgagggcaagctggccgaccagtactaccagagaaccctgctgaagaaggtgtggaaggtgtggagaagcgtggtgcagaagcagtggaaggacgtggtggagagagcctgccaggccagagccgaggaggtgtgcatccagatcagcaacgactacgaggccaaggtggccatgctgagcggcgccctggagaacgccaaggccgagatccagagaatgcagcacgagaaggagcacttcgaggacagcatgaagaaggccttcatgagaggcgtgtgcgccctgaacctggaggccatgaccatcttccagaacagaaacgacgccggcatcgacagcaccaacaacaagaaggaggagtacggccccggcgtgcagggcaaggagcacagcgcccacctggaccccagcgccccccccatgcccctgcccgtgaccagccccctgctgcccagcccccccgccgccgtgggcggcgccagcgccaccgccgtgcccagcgccgccagcatgaccagcaccagagccgccagcgccagcagcgtgcacgtgcccgtgagcgccctgggcgccggcagcgccgccaccgccgccagcgaggagatgtacgtgcccagagtggtgaccagcgcccagcagaaggccggcagaaccatcaccgccagaatcaccggcagatgcgacttcgccagcaagaacagaatcagcagcagcctggccatcatgggcgtgagcccccccatgagcagcgtggtggtggagaagcaccaccccgtgaccgtgcagaccatcccccaggccaccgccgccaagtaccccagaaccatccaccccgagagcagcaccagcgccagcagaagcctgggcaccagaagcgcccacacccagagcctgaccagcgtgcacagcatcaaggtggtggactag

SEQ ID NO: 39600 - DNA, 1728 bp, Artificial Sequence
  derived and/or modified sequence
atgtcaagtgatgaggaaaagtactccctaccggtagtccagaacgattcatctagaggtagtagcgtgtcatccaacctccaagaggagtacgaggaactgctccactacgctatcgtgactcctaacattgagccctgcgccagccagagctcacaccccaagggagaactggtccccgacgtccggatcagcacaatccatgatattctacattctcaggggaacaacagtgaggttcgagagacagcaatcgaggtgggcaagggatgcgatttccacatatcttcccattcaaagacggacgagtccagcccggttctctctcctagaaaaccatctcacccggtgatggactttttcagcagccacctcctggccgatagctcctctccggcgaccaactcgtctcatactgatgcccacgaaatcttggtgtcggactttttggtttctgatgaaaatctgcagaaaatggagaacgtgctcgacctatggtcatccgggttgaagaccaatataattagtgaattatccaaatggaggctgaacttcatcgactggcacagaatggagatgaggaaagagaaggaaaagcacgcagcccacttgaagcagttgtgtaatcagatcaacgaacttaaggagctgcagaagactttcgagattagcataggtcgtaaagacgaagttattagctccctttctcacgcaatcggcaaacagaaggagaagatagaactgatgcggactttctttcactggaggattgggcacgtgcgagcccgtcaggatgtgtacgagggcaagctggccgatcagtattatcagcggacgctcctcaaaaaagtgtggaaggtatggcgcagcgtggtgcagaaacagtggaaggacgtggtggaacgcgcatgtcaggcacgagcagaagaagtgtgtatccagatctctaacgactacgaagccaaggtggctatgctgtcaggggccttagaaaacgccaaggccgaaatccagaggatgcagcacgaaaaagaacactttgaggactccatgaaaaaggccttcatgcgaggcgtttgtgcactgaacctggaagccatgacaatcttccaaaataggaatgatgctggcatcgactcaaccaataacaagaaggaggagtacgggccaggggtgcaaggaaaagagcactcggcccaccttgatccatcagccccaccaatgccactgcctgtcacctcaccactcttgcctagccctcctgccgccgttggaggggccagcgcaaccgcggttccgagtgcagcatccatgaccagcactagagcggcttctgcctcttccgtacacgttcccgtgtcagcccttggtgccggaagtgcggccactgcggccagcgaagagatgtacgtgcctcgggtggtgacttccgctcagcagaaggcgggtcgcaccattaccgcccgcattaccgggcggtgtgacttcgccagcaagaaccgaatttcctcatctcttgctataatgggtgtgtccccgccaatgtctagtgtagtagtagaaaagcatcatcctgtcactgtgcagaccatccctcaggcaaccgcggctaagtacccccgcactatccaccccgaatcttctaccagtgctagcagaagtctgggcactcgaagcgcacatacccagtccttgacgagcgtacactctatcaaggtggtcgactag

SEQ ID NO: 39601 - DNA, 1728 bp, Artificial Sequence
  derived and/or modified sequence
atgagcagtgatgaggagaagtacagcctgcctgtggtgcagaatgacagcagccggggcagctctgtgagcagcaacctgcaggaggagtatgaggagctgctgcactacgccatcgtgacccccaacatcgagccctgtgccagccagagcagccaccccaagggggagctggtgcctgatgtgcgcatcagcaccatccatgacatcctgcacagccagggcaacaacagcgaggtgcgggagacagccatcgaggtgggcaagggctgtgacttccacatcagcagccacagcaagacagatgagagcagccctgtgctgagccccaggaagcccagccaccctgtgatggacttcttcagcagccacctgctggccgacagcagcagccctgccaccaacagcagccacacagatgcccacgagatcctggtgtctgacttcctggtgtctgatgagaacctgcagaagatggagaatgtgctggacctgtggagcagcggcctgaagaccaacatcatcagcgagctgagcaagtggaggctgaacttcatcgactggcacaggatggagatgaggaaggagaaggagaagcatgctgcccacctgaagcagctgtgcaaccagatcaatgagctgaaggagctgcagaagacctttgagatcagcattggaaggaaggatgaagtcatcagcagcctgagccacgccatcggcaagcagaaggagaagattgagctgatgaggaccttcttccactggagaattggacatgtgcgggcccggcaggatgtgtatgagggcaagctggccgaccagtactaccagaggaccctgctgaagaaggtgtggaaggtgtggaggtctgtggtgcagaagcagtggaaggatgtggtggagcgggcctgccaggcccgggcagaggaggtgtgcatccagatcagcaatgactatgaggccaaggtggccatgctgagcggggccctggagaatgccaaggccgagatccagaggatgcagcacgagaaggagcactttgaggacagcatgaagaaggccttcatgaggggcgtgtgtgccctgaacctggaggccatgaccatcttccagaacagaaatgatgctggcatcgacagcaccaacaacaagaaggaggagtatggccctggggtgcagggcaaggagcacagcgcccacctggaccccagcgccccacccatgcccctgcctgtgaccagccccctgctgcccagccccccagctgctgtgggcggggccagcgccacagctgtgcccagcgctgcctccatgaccagcaccagggctgccagcgccagctctgtgcacgtgcctgtgtctgccctgggcgccggcagcgctgccacagctgccagcgaggagatgtatgtgccccgggtggtgaccagcgcccagcagaaggccggccgcaccatcacagcccgcatcaccggccgctgtgactttgccagcaagaaccgcatcagcagcagcctggccatcatgggcgtgtccccacccatgagctctgtggtggtggagaagcaccaccctgtgacagtgcagaccatcccccaggccacagctgccaagtaccccaggaccatccaccctgagagcagcaccagcgccagccgcagcctgggcaccaggtctgcccacacccagagcctgacctctgtgcacagcatcaaggtggtggactag

SEQ ID NO: 39602 - DNA, 1728 bp, Artificial Sequence
  derived and/or modified sequence
atgagcagcgacgaggagaagtacagcctgcccgtggtgcagaacgattcgtcccgagggtcgtcagtgtcctcaaacttgcaggaggagtatgaagagttgttgcattatgcaatcgtcaccccgaacatcgaaccatgtgccagccagtcaagtcaccccaaaggagaactggtgccagacgtgcgaatctcgacaattcatgacattcttcatagccagggtaataatagcgaggttcgcgagaccgcaatcgaggtaggcaaggggtgcgacttccacatttccagccactccaaaacagacgagtcctccccggtactttctccgcgtaagccctcacatcccgtgatggacttcttcagctcccacctattggccgattcctcctcccctgctaccaatagttcacacacagacgcgcatgaaattctggtgagcgactttctcgtttcagatgagaatctgcagaagatggagaacgtgcttgacctgtggtcctccggtcttaaaacgaatatcatttcagagctgagcaagtggagattgaatttcatcgactggcataggatggaaatgaggaaggaaaaagaaaagcacgccgcccatcttaagcagctgtgtaaccagattaatgaactgaaggaacttcagaaaacattcgagatcagcatcggcagaaaagacgaggttatctcttcattatctcatgctattggtaaacagaaagagaagattgagctgatgcgaaccttcttccactggcgcatcgggcacgtccgggcccgccaagatgtttatgaggggaagctggccgaccaatactatcagcggaccctgctgaagaaggtgtggaaagtttggagaagcgtggtccagaagcagtggaaggacgttgtcgagcgggcgtgccaagcgcgtgctgaagaagtgtgcatccagatcagcaacgactacgaggcgaaagtggcaatgctgagcggagctctggaaaatgccaaggctgagatacagcgcatgcagcacgagaaggagcatttcgaagactccatgaaaaaggcattcatgagaggggtgtgcgccttaaacctggaagctatgactatattccaaaacaggaatgatgccggaattgatagcactaataacaagaaggaggaatacgggccaggagttcaaggcaaggaacattctgctcatcttgatccatccgccccccccatgcctctgcccgtgacatcccccctgctccctagccctccagccgctgtagggggcgcctctgccacagccgtacctagtgccgcaagtatgacgagcaccagagcagcctctgcgtcttccgtgcacgtgccagtaagcgccctgggagcgggctcagcggccacagccgctagtgaagagatgtatgtccctcgagtggtgacatccgcccagcagaaggccggaagaacaataactgcaagaatcacagggagatgtgacttcgcttcaaagaacaggataagctcctccctcgccatcatgggagtgtcaccccccatgagctcagtggttgtagaaaaacatcaccccgtcaccgtacagactattccccaggccacagcagccaaatacccgaggacaatacatcccgaatcaagcacctctgcctctcggtccctcggaacccgatcagcgcatacccagtcgctcaccagtgttcactcaatcaaggttgtagactag

SEQ ID NO: 39603 - DNA, 1728 bp, Artificial Sequence
  derived and/or modified sequence
atgagcagtgatgaggagaagtattcgctacccgtggtccaaaacgattcaagtcgcggatccagcgtgagctcaaatctgcaggaagaatacgaggaactgcttcactatgcgatcgtaacacctaatatagaaccatgcgcttctcagagttcacatccaaaaggtgagcttgtgcccgatgtgcgtatttccactattcacgatattttacacagccaaggaaataacagtgaagtccgtgagactgccatcgaagtaggcaagggatgcgatttccacatttcttctcactccaaaaccgatgaatcatctcctgtgttatcccccaggaaaccgtcccacccagtgatggattttttctctagtcatctgttagccgactctagcagccccgctaccaactcaagccacacagatgcccacgagatcttagtttctgattttctcgtcagcgacgaaaaccttcaaaagatggagaatgtcctggatttatggtctagcggcctcaagaccaacatcatctcagaactaagtaagtggcggcttaactttatcgattggcaccggatggagatgcgcaaggagaaagagaaacacgcagcccatctgaaacagctgtgcaaccagattaacgaactgaaagagctacagaaaacatttgagatcagtataggtcggaaagatgaggttatctctagtttgtcccacgccattggaaagcagaaagaaaaaatagagctaatgaggaccttcttccactggaggatcggccatgtcagagcaagacaggacgtgtacgagggcaagctagcagaccagtattaccagcggacacttctgaaaaaggtgtggaaagtctggaggtccgtcgtgcagaaacagtggaaggatgtggtagagcgcgcatgccaggcacgggcagaagaagtgtgcatccaaatctccaacgactatgaagcaaaagttgccatgctgtcaggggctctagaaaacgcgaaagcggaaattcagcgcatgcagcacgaaaaggagcattttgaggactccatgaagaaggcattcatgagaggggtatgcgctctcaacctcgaagccatgaccatatttcagaacaggaatgacgctggtattgatagtactaataacaagaaagaggagtacggaccaggtgtacaggggaaagaacacagtgctcacttggacccaagcgcacccccaatgcctctcccagtaacttcgcctctgctgcctagccctcccgctgcagtgggaggggcttccgccaccgctgtgccctctgccgcaagtatgacctccaccagggccgcatccgcctcctccgtccacgtgccggtttctgctcttggtgccggtagcgccgctaccgcggcatccgaagaaatgtacgtgccaagagtggtaaccagcgctcagcagaaggctggtaggaccatcaccgcacgcattacagggaggtgcgatttcgcttctaagaaccggataagctcctcccttgctatcatgggcgtgtcaccccctatgtcaagtgtggtcgtcgaaaagcaccaccctgttacagttcagaccatccctcaagcgacagccgcaaagtaccccaggaccattcatccagagtcgagcacatcggcttcaagatccctggggaccagatcagctcacacccagagtctgacttctgttcactccatcaaggtagtcgattag

SEQ ID NO: 39604 - DNA, 2229 bp, Artificial Sequence
  derived and/or modified sequence
tgaaacaaaggaccaatgcccagggcggtccttaattcctccctgcagtttgaaactgtcaggttgccgtctaggtagcggttgtgcttgctgaggctgcacttgctgacactgcagctgcgacgcggctaagaggcgcagagcgaggagtcgggatttggtcgcgagcggcgacgagcatttgtgcagaatgtcatcagatgaggagaaatactcacttccagttgtgcaaaatgactccagtcgaggcagttctgtctcttcgaatcttcaggaagaatatgaagaactgcttcattatgctatagtgactccaaatattgaaccctgtgcttcacagtcatctcatcctaagggagaattggtgccagatgtcagaatttctacaattcatgatattcttcatagtcaaggaaataactctgaagtaagagaaactgcaatagaagttggaaaaggatgtgatttccatatttcaagtcattcaaagacagatgagtcatcaccagtgttatcgccaaggaagccttctcacccagtcatggattttttcagttcacatcttttagctgactcttcctcaccagcaacaaattctagtcatacagatgcccatgaaatacttgtgagcgattttcttgtttctgatgaaaaccttcagaagatggaaaatgtgcttgatctttggagttcaggtcttaagacaaacatcatatctgaactaagtaaatggagacttaattttattgactggcaccgaatggaaatgagaaaagagaaagaaaaacatgcagcacatttaaaacaactgtgtaatcagatcaatgaattgaaggagctgcaaaaaacctttgaaatctccattgggagaaaagatgaggtgatttctagcttgtctcatgccataggcaagcaaaaggaaaagatagagttgatgagaacattcttccactggcgaatcggccatgtcagagccagacaggatgtttatgaaggtaaactagctgaccagtactaccagagaactttactgaagaaagtctggaaagtctggcgttccgtagtgcaaaagcagtggaaagatgtggtagaaagagcttgtcaagcaagagctgaagaagtttgtatccagatttccaatgattatgaagccaaagttgctatgttatctggagctttggaaaatgcaaaagctgagattcaaagaatgcaacatgaaaaagagcactttgaagattccatgaaaaaagctttcatgaggggtgtatgtgcattaaatcttgaagccatgactatatttcaaaacagaaatgatgcagggatagactccacaaataataaaaaggaagagtatggtcctggtgttcaaggaaaagaacattctgctcatttggatccttcagctcctccgatgcccttaccagttacatcaccactgctgccatccccaccagccgccgtcggaggagccagcgcgactgccgttccctcagctgcttcgatgacttctaccagggctgcttccgcatcttctgttcacgttcctgtttctgctcttggtgcaggatctgcagctactgctgcatcagaagaaatgtatgtgccaagagttgtaacctctgcacaacagaaagcaggaagaactattacagcccggatcacaggaagatgtgattttgcttcaaaaaatagaattagcagcagtttagctataatgggagtttctcctcccatgagctcagttgttgtggaaaaacatcatccagtcacagtgcaaaccattcctcaagcaactgcagcaaaatatccccggaccattcatcctgaaagtagtacctcagcttccagatcacttggaaccagatcagctcacacccagtctctcacaagtgttcattccataaaagtggttgactaaagtgaatatgtccatagtggggtcttttaatccctctggtcttaccaagggttagaagtcttttggttttaacttttccatattgttagaacatcatggagacatcatgttcatctgttcaaaattacaagaggctttttcaagctctaccatgctttgtaactatatgtagaaattattttaatgttattttttatttaagcaattaagtaaaacttttttaaattaaaaaagaaactggactttatttctttaatatgtttagcctgttgctgattacagcatcaaaatatataaatttattttcacta

SEQ ID NO: 39605 - protein, 451 aa, Artificial Sequence
  derived and/or modified sequence
MATPLVAGPAALRFAAAASWQVVRGRCVEHFPRVLEFLRSLRAVAPGLVRYRHHERLCMGLKAKVVVELILQGRPWAQVLKALNHHFPESGPIVRDPKATKQDLRKILEAQETFYQQVKQLSEAPVDLASKLQELEQEYGEPFLAAMEKLLFEYLCQLEKALPTPQAQQLQDVLSWMQPGVSITSSLAWRQYGVDMGWLLPECSVTDSVNLAEPMEQNPPQQQRLALHNPLPKAKPGTHLPQGPSSRTHPEPLAGRHFNLAPLGRRRVQSQWASTRGGHKERPTVMLFPFRNLGSPTQVISKPESKEEHAIYTADLAMGTRAASTGKSKSPCQTLGGRALKENPVDLPATEQKENCLDCYMDPLRLSLLPPRARKPVCPPSLCSSVITIGDLVLDSDEEENGQGEGKESLENYQKTKFDTLIPTLCEYLPPSGHGAIPVSSCDCRDSSRPL

SEQ ID NO: 39606 - DNA, 1356 bp, Artificial Sequence
  derived and/or modified sequence
atggccacccccctggtggccggccccgccgccctgagattcgccgccgccgccagctggcaggtggtgagaggcagatgcgtggagcacttccccagagtgctggagttcctgagaagcctgagagccgtggcccccggcctggtgagatacagacaccacgagagactgtgcatgggcctgaaggccaaggtggtggtggagctgatcctgcagggcagaccctgggcccaggtgctgaaggccctgaaccaccacttccccgagagcggccccatcgtgagagaccccaaggccaccaagcaggacctgagaaagatcctggaggcccaggagaccttctaccagcaggtgaagcagctgagcgaggcccccgtggacctggccagcaagctgcaggagctggagcaggagtacggcgagcccttcctggccgccatggagaagctgctgttcgagtacctgtgccagctggagaaggccctgcccaccccccaggcccagcagctgcaggacgtgctgagctggatgcagcccggcgtgagcatcaccagcagcctggcctggagacagtacggcgtggacatgggctggctgctgcccgagtgcagcgtgaccgacagcgtgaacctggccgagcccatggagcagaaccccccccagcagcagagactggccctgcacaaccccctgcccaaggccaagcccggcacccacctgccccagggccccagcagcagaacccaccccgagcccctggccggcagacacttcaacctggcccccctgggcagaagaagagtgcagagccagtgggccagcaccagaggcggccacaaggagagacccaccgtgatgctgttccccttcagaaacctgggcagccccacccaggtgatcagcaagcccgagagcaaggaggagcacgccatctacaccgccgacctggccatgggcaccagagccgccagcaccggcaagagcaagagcccctgccagaccctgggcggcagagccctgaaggagaaccccgtggacctgcccgccaccgagcagaaggagaactgcctggactgctacatggaccccctgagactgagcctgctgccccccagagccagaaagcccgtgtgcccccccagcctgtgcagcagcgtgatcaccatcggcgacctggtgctggacagcgacgaggaggagaacggccagggcgagggcaaggagagcctggagaactaccagaagaccaagttcgacaccctgatccccaccctgtgcgagtacctgccccccagcggccacggcgccatccccgtgagcagctgcgactgcagagacagcagcagacccctgtag

SEQ ID NO: 39607 - DNA, 1356 bp, Artificial Sequence
  derived and/or modified sequence
atggcaacccctctggttgccggacccgccgccctgcggtttgcggccgcagcttcttggcaggtggtgaggggccggtgcgtggaacactttcctcgcgttctcgaattcctgcggtcgctgagggctgtggcgcctggcttggtgaggtatagacatcatgaacggttgtgcatggggctcaaggcaaaggtggtagtggagctcattctgcagggaagaccctgggcacaggtcttaaaggcgcttaaccaccattttccggagagcggacctattgtgcgtgaccctaaagccactaagcaggaccttcgcaagatcctggaagctcaagagacattctaccagcaggttaaacagctgtctgaggcacctgtggacctggcaagcaagctgcaggaactcgaacaagagtacggagagccgtttctggccgccatggagaagctgctcttcgagtacctctgtcaactggagaaggctctccccacacctcaagctcaacaactccaggacgtattatcctggatgcagcccggtgtgtctattaccagtagcctggcgtggcggcagtacggagtcgatatgggatggctgctgccggaatgctcagtcaccgactcagtcaaccttgctgagcctatggagcagaaccccccccagcaacaacgcctggccttacacaatcccttacccaaggccaaaccaggcacccacttgccccagggcccgagttcccgtacccatccagagcctcttgctggccgacattttaacctggcacccttggggaggcgcagagttcaatcccaatgggcttccactcgcgggggccacaaggagcgcccaacagtgatgcttttccccttcagaaacctaggctcccccactcaagtgattagcaagcccgaaagcaaggaggaacacgccatatacacagcggatcttgctatggggacaagggctgcttcaaccgggaaatctaagagtccttgtcaaactctgggtgggcgcgctctcaaggagaatccagtagaccttccagcaacagaacagaaagagaactgtctggactgctatatggaccctttgcgactgtctcttttgccacccagggctcggaagcctgtgtgtcctccgtcactgtgcagctccgtgataaccattggcgacctggttcttgattcagacgaggaggaaaatggacagggagaggggaaagaaagcctagaaaactaccagaaaacaaagtttgacacattgattcctacactttgtgagtacctgccgccatccggtcacggagctatccccgtgagctcttgtgattgtagagactccagccgcccgctgtag

SEQ ID NO: 39608 - DNA, 1356 bp, Artificial Sequence
  derived and/or modified sequence
atggccacccccctggtggccggccctgctgccctgcgctttgctgctgctgcctcctggcaggtggtgcggggccgctgtgtggagcacttcccccgggtgctggagttcctgcggagcctgcgggctgtggcccctggcctggtgcgctaccgccaccacgagcggctgtgcatgggcctgaaggccaaggtggtggtggagctgatcctgcagggccggccctgggcccaggtgctgaaggccctgaaccaccacttccctgagagcggccccatcgtgcgggaccccaaggccaccaagcaggacctgaggaagatcctggaggcccaggagaccttctaccagcaggtgaagcagctgtctgaggcccctgtggacctggccagcaagctgcaggagctggagcaggagtatggagagcccttcctggccgccatggagaagctgctgtttgagtacctgtgccagctggagaaggccctgcccaccccccaggcccagcagctgcaggatgtgctgtcctggatgcagcccggggtgtccatcaccagcagcctggcctggaggcagtatggagtggacatgggctggctgctgcctgagtgcagcgtgacagacagcgtgaacctggccgagcccatggagcagaaccccccccagcagcagaggctggccctgcacaaccccctgcccaaggccaagccaggcacccacctgccccagggccccagcagcaggacccaccctgagcccctggccggccgccacttcaacctggcccccctgggcagaagaagagtgcagagccagtgggccagcacccggggcggccacaaggagcggcccaccgtgatgctgttccccttcaggaacctgggcagccccacccaggtgatcagcaagccagagagcaaggaggagcacgccatctacacagctgacctggccatgggcacccgggccgccagcacaggcaagagcaagagcccctgccagaccctgggcggccgggccctgaaggagaaccctgtggacctgcctgccacagagcagaaggagaactgcctggactgctacatggaccccctgcggctgagcctgctgcccccccgggccaggaagcctgtgtgcccccccagcctgtgcagcagcgtcatcaccatcggggacctggtgctggacagtgatgaggaggagaatggccagggcgagggcaaggagagcctggagaactaccagaagaccaagtttgacaccctcatccccaccctgtgtgagtacctgccccccagcggccacggggccatccctgtgagcagctgtgactgccgggacagcagccggcccctgtag

SEQ ID NO: 39609 - DNA, 1356 bp, Artificial Sequence
  derived and/or modified sequence
atggccacccccctggtggccggccccgccgccctgcggttcgccgcggcggccagctggcaggttgtaagggggaggtgtgtagagcattttccccgcgttctggagtttttgcggagtctgagagccgtggctccaggcctggttcgttataggcatcacgagagattatgcatgggcttaaaagccaaagtggtggtggaactgattctccaggggaggccctgggctcaagttcttaaggccctgaatcaccactttccagaatccggcccaatagtgcgggatccaaaagcgacgaaacaggacctgaggaagatcctggaggcccaggagaccttttaccagcaagtgaagcaactgtctgaggcacccgtggatctggcgtctaagctgcaagagctggagcaagagtacggggaacctttcctggctgctatggaaaagcttcttttcgagtatttatgccagctagagaaggctctgcctaccccgcaggcccagcagctccaggacgtgttgtcatggatgcagcccggcgtctctattaccagttccctagcatggcgccagtatggagtggacatgggctggttgctgccggaatgctctgtgacagattcggttaatctggccgagcctatggaacagaatccgccacagcaacagcggctcgccctgcacaacccgctacctaaagcaaaacccggaacccacctcccccaaggcccatctagtcgtactcacccagagcctctagcaggtagacacttcaacctggctccgctcggaagacgcagggttcaaagccagtgggcgtcaacacgaggggggcacaaggagcggcctaccgtaatgctgttccctttccggaatctgggttcccctacccaggtgatatccaagccagaatccaaagaggaacacgctatctatacagcagatctcgcgatgggaacacgtgcagcctctacaggaaagtcaaagtccccatgccagaccctcggtggccgggccctgaaggagaacccggtggatctgcctgcaacggagcaaaaggaaaattgtctggactgttacatggaccccctcagactctcactgcttcctcccagggcaagaaaacctgtgtgcccaccgtcactgtgcagcagtgtcataactatcggagatctggtgttagattcagatgaggaagagaatgggcagggggaagggaaagaaagccttgagaattaccagaagaccaaatttgatacgctcatccctaccctctgcgagtatctgccacccagcggtcacggcgccattcccgtgagtagttgcgactgtcgcgattctagtagaccactgtag

SEQ ID NO: 39610 - DNA, 1356 bp, Artificial Sequence
  derived and/or modified sequence
atggcaactcctttggtggcgggtcccgctgcgctacggtttgctgccgctgccagctggcaagttgtgcgcggaagatgtgtggaacatttccccagggtcttagaattcctcagatcactgcgcgcagtcgcgcctggtcttgtgaggtataggcaccatgagcgcctgtgtatgggccttaaagcaaaagtggtcgtggagctcattctgcagggacgcccatgggcccaggtgttgaaggcgttgaaccaccactttcccgaatctgggccaatcgtgagggaccctaaagctacaaagcaggatctgcgcaagatcctggaggcacaggagacattttaccaacaagtcaagcagctctcagaggctcccgtggatctggcttctaagttgcaggaactcgagcaagagtacggtgagcccttcctggcagcaatggaaaaacttttgtttgaatacctgtgtcagctggagaaagcgctccccactccgcaggcacagcagctgcaggacgtccttagttggatgcagccaggtgtgagtatcacttcctccctagcctggcgacagtacggggtagacatggggtggctgttaccggaatgttcggttacagatagtgtgaatctggctgaacctatggagcagaatccaccgcagcagcagcgcctggccctgcataacccgttaccgaaggctaaaccaggcacccacttacctcaggggccaagttccagaactcatccagagcctctggcaggcaggcacttcaatcttgctcccctgggaagacgcagggtacagtcacagtgggccagcacaaggggcggtcacaaggagaggccaaccgtgatgctgtttccgttccggaacctgggtagtccgacccaggtcatctccaagcccgagtctaaggaggaacatgcgatttacactgctgatctggcgatggggacccgcgctgcctcaaccggtaagagcaagtccccctgccagactttgggaggcagggcgctgaaggagaatcctgtcgacttgccagcaaccgagcaaaaggaaaactgtcttgactgctatatggatccccttagactgtccctgctgcccccacgggctcggaaaccagtgtgtccacccagtctttgcagctctgtaatcactattggagatctcgtactggattctgatgaagaggagaatggccaaggtgaagggaaagagtccctggagaattaccagaaaaccaagttcgatactctgatacctactctgtgcgagtacctccctcctagcggccacggagctattcccgtcagtagttgtgattgccgcgactcatcccgcccactgtag

SEQ ID NO: 39611 - DNA, 1852 bp, Artificial Sequence
  derived and/or modified sequence
ctcttaccgcccttttccggggcaagggaagctagtagcggagccggaagtgaggcaccctcgggctcgagacagcggcgacgtttaaagctgagcgacccagtgccactggagacggtcagcttctccactcaggctcctccagcccgagccagaagaccccctcccccagaattctgggggccgatggaagggagccgagtcagatcgcgaggtacccagagccgacagaccggagcgacagggagttgccagaagccccgcccctaggagtgatcggaaagcctcacccatccgggtgaggaacccggagggaccgcctccgggcggagcccgccgaccatggctacgcccctggtggcgggtcccgcagctctacgcttcgccgccgcggctagctggcaggttgtgcgcggacgctgcgtggaacattttccgcgagtactggagtttctgcgatctctgcgcgctgttgcccctggcttggttcgctaccggcaccacgaacgcctttgtatgggcctaaaggccaaggtggtggtggagctgatcctgcagggccggccttgggcccaagtcctgaaagccctgaatcaccactttccagaatctggacctatagtgcgggatcccaaggctacaaagcaggatctgaggaagattttggaggcacaggaaactttttaccagcaggtgaagcagctgtcagaggctcctgtggatttggcctcgaagctgcaggaacttgaacaagagtatggggaaccctttctggctgccatggaaaagctgctttttgagtacttgtgtcagctggagaaagcactgcctacaccgcaggcacagcagcttcaggatgtgctgagttggatgcagcctggagtctctatcacctcttctcttgcctggagacaatatggtgtggacatggggtggctgcttccagagtgctctgttactgactcagtgaacctggctgagcccatggaacagaatcctcctcagcaacaaagactagcactccacaatcccctgccaaaagccaagcctggcacacatcttcctcagggaccatcttcaaggacgcacccagaacctctagctggccgacacttcaatctggcccctctaggccgacgaagagttcagtcccaatgggcctccactaggggaggccataaggagcgccccacagtcatgctgtttccctttaggaatctcggctcaccaacccaggtcatatctaagcctgagagcaaggaagaacatgcgatatacacagcagacctagccatgggcacaagagcagcctccactgggaagtctaagagtccatgccagaccctggggggaagggctctgaaggagaacccagttgacttgcctgccacagagcaaaaggagaattgcttggattgctacatggaccccctgagactatcattattacctcctagggccaggaagccagtgtgtcctccgtctctgtgcagctccgtcattaccataggggacttggttttagactctgatgaggaagaaaatggccagggggaaggaaaggaatctctggaaaactatcagaagacaaagtttgacaccttgatacccactctctgtgaatacctacccccttctggccacggtgccatacctgtttcttcctgtgactgtagagacagttctagacctttgtgatagaactaaaatgctctctgtactctagtctcctgcctcctcagctctgcaagtagtttagtaggaatgaagtggaagtccaggcttggattgcctaactacactgctaaaaatatttgtaatccttaataattaaactttggatttgttaaaa

SEQ ID NO: 39612 - DNA, 2168 bp, Artificial Sequence
  derived and/or modified sequence
cttttccggggcaagggaagctagtagcggagccggaagtgaggcaccctcgggctcgagacagcggcgacgtttaaagctgagcgacccagtgccactggagacggtcagcttctccactcaggctcctccagcccgagccagaagaccccctcccccagaattctgggggccgatggaagggagccgagtcagatcgcgaggtacccagagccgacagaccggagcgacagggagttgccagaagccccgcccctaggagtgatcggaaagcctcacccatccgggtgaggaacccggagggaccgcctccgggcggagcccgccgaccatggctacgcccctggtggcgggtcccgcagctctacgcttcgccgccgcggctagctggcaggttgtgcgcggacgctgcgtggaacattttccgcgagtactggagtttctgcgatctctgcgcgctgttgcccctggcttggttcgctaccggcaccacgaacgcctttgtatgggcctaaaggccaaggtggtggtggagctgatcctgcagggccggccttgggcccaagtcctgaaagccctgaatcaccactttccagaatctggacctatagtgcgggatcccaaggctacaaagcaggatctgaggaagattttggaggcacaggaaactttttaccagcaggtgaagcagctgtcagaggctcctgtggatttggcctcgaagctgcaggaacttgaacaagagtatggggaaccctttctggctgccatggaaaagctgctttttgagtacttgtgtcagctggagaaagcactgcctacaccgcaggcacagcagcttcaggatgtgctgagttggatgcagcctggagtctctatcacctcttctcttgcctggagacaatatggtgtggacatggggtggctgcttccagagtgctctgttactgactcagtgaacctggctgagcccatggaacagaatcctcctcagcaacaaagactagcactccacaatcccctgccaaaagccaagcctggcacacatcttcctcagggaccatcttcaaggacgcacccagaacctctagctggccgacacttcaatctggcccctctaggccgacgaagagttcagtcccaatgggcctccactaggggaggccataaggagcgccccacagtcatgctgtttccctttaggaatctcggctcaccaacccaggtcatatctaagcctgagagcaaggaagaacatgcgatatacacagcagacctagccatgggcacaagagcagcctccactgggaagtctaagagtccatgccagaccctggggggaagggctctgaaggagaacccagttgacttgcctgccacagagcaaaaggagtgagtggaacagagttgcttcttactaggagcacattctttgcctgccttcccttcatcctatcctctttgcttgctctcacctcaggaattgcttggattgctacatggaccccctgagactatcattattacctcctagggccaggaagccaggtaggtagtctgagtcaggattggatcaacagcctcctctcttggggactctcaagagcctgtgttcatctagaagtagtagtttgattctggtttccctcctacagtgtgtcctccgtctctgtgcagctccgtcattaccataggggacttggttttagactctgatgaggaagaaaatggccagggggaaggaaaggtgagtgggaaggagcagaaagctgggaaaggggatgggtagaacaagactgagaaatccacatgcttcagaattcagagggttcagggaatggtttcggatagtaggctctccctgctcccttctctacaggaatctctggaaaactatcagaagacaaagtttgacaccttgatacccactctctgtgaatacctacccccttctggccacggtgccatacctgtttcttcctgtgactgtagagacagttctagacctttgtgatagaactaaaatgctctctgtactctagtctcctgcctcctcagctctgcaagtagtttagtaggaatgaagtggaagtccaggcttggattgcctaactacactgctaaaaatatttgtaatccttaataattaaactttggatttgttaaaa

SEQ ID NO: 39613 - protein, 111 aa, Artificial Sequence
  derived and/or modified sequence
MSDAAVDTSSEITTKDLKEKKEVVEEAENGRDAPANGNAENEENGEQEADNEVDEEEEEGGEEEEEEEEGDGEEEDGDEDEEAESATGKRAAEDDEDDDVDTKKQKTDEDD

SEQ ID NO: 39614 - protein, 466 aa, Artificial Sequence
  derived and/or modified sequence
MPGDSSPGTLPLWDASLSPPLGPDPGGFSRASHAGDKSRPPAPELGSPGAVRPRVGSCAPGPMELRVSNTSCENGSLLHLYCSSQEVLCQIVNDLSPEVPSNATFHSWQERIRQNYGFYIGLGLAFLSSFLIGSSVILKKKGLLRLVATGATRAVDGGFGYLKDAMWWAGFLTMAAGEVANFGAYAFAPATVVTPLGALSVLISAILSSYFLRESLNLLGKLGCVICVAGSTVMVIHAPEEEKVTTIMEMASKMKDTGFIVFAVLLLVSCLILIFVIAPRYGQRNILIYIIICSVIGAFSVAAVKGLGITIKNFFQGLPVVRHPLPYILSLILALSLSTQVNFLNRALDIFNTSLVFPIYYVFFTTVVVTSSIILFKEWYSMSAVDIAGTLSGFVTIILGVFMLHAFKDLDISCASLPHMHKNPPPSPAPEPTVIRLEDKNVLVDNIELASTSSPEEKPKVFIIHS

SEQ ID NO: 39615 - DNA, 1401 bp, Artificial Sequence
  derived and/or modified sequence
atgccaggcgactcttcccctggcaccttaccactgtgggacgcaagccttagtcctcccttgggccctgatccgggagggttctcccgcgcttctcacgcgggagataagtcacggcccccagcgccagagctggggagtccaggcgccgtccgaccacgcgtcggctcctgcgcacctgggccaatggaactgcgcgttagcaacaccagttgcgaaaacggtagcctgcttcacctttactgcagctctcaggaggtcctgtgccagattgtgaatgacctgtcccccgaagtgccttctaatgcaacttttcattcctggcaggagcggattcggcagaactatggcttttatattggcctcggcctggcctttttaagcagcttccttattggctcatccgtgatcctgaagaagaagggcctcctaaggcttgttgctacaggggccacccgcgccgttgacggcggattcgggtacctgaaggatgccatgtggtgggctgggttcctcacaatggccgccggggaggtggccaatttcggagcatacgcatttgcacccgctacagtcgtgacccccctaggagccttgagcgtcctcatctctgcaattctgagcagttatttcctccgtgaatctctcaatctgctggggaagctgggctgcgtcatctgcgtggcaggcagcacagtgatggtgatccacgccccggaagaagagaaggtgacaacgatcatggaaatggcctccaagatgaaggatacagggttcatcgtcttcgccgtgctcctcctcgtgtcctgcctaatactgatctttgtaattgcccctcgttacggccagagaaacattctgatatacattattatttgcagcgtcatcggagcctttagcgttgccgctgttaagggtcttggcatcacaatcaaaaatttctttcagggcctgcctgttgtgaggcacccccttccgtatattctgtctcttatactcgccctatccttatcgacccaagtaaactttctgaatcgcgctttagacatttttaacacctctctggtgttccccatttactacgtcttcttcactactgtcgtcgtgaccagttctattatcttgttcaaagaatggtatagcatgagcgccgttgacatagcagggacgctgtctggttttgtcacaattatattgggcgttttcatgctccatgcctttaaggatctggatatcagctgtgcaagcctacctcacatgcataaaaatcccccgccaagcccagctccagagcccacagtgatacggcttgaagataagaacgtgctggtggataacattgagctggccagcaccagcagtccagaggaaaagccaaaagtctttatcattcacagctag

SEQ ID NO: 39616 - DNA, 1401 bp, Artificial Sequence
  derived and/or modified sequence
atgcctggggacagcagccctggcaccctgcccctgtgggatgccagcctgagcccccccctgggccctgaccccggcggcttcagccgggccagccacgccggggacaagagccggcccccagcccctgagctgggcagccctggagctgtgcggccccgggtgggcagctgtgcccctggccccatggagctgcgggtgagcaacaccagctgtgaaaatggcagcctgctgcacctgtactgcagcagccaggaggtgctgtgccagatcgtgaatgacctgagccctgaggtgcccagcaatgccaccttccacagctggcaggagcgcatccggcagaactacggcttctacatcggcctgggcctggccttcctgagcagcttcctgattggcagcagcgtcatcctgaagaagaagggcctgctgcggctggtggccactggagccaccagggctgtggatggcggcttcggctacctgaaggatgccatgtggtgggccggcttcctgaccatggccgccggggaggtggccaactttggagcctatgcctttgccccagccaccgtggtgacccccctgggcgccctgtctgtgctgatcagcgccatcctgagcagctacttcctgcgggagagcctgaacctgctgggcaagctgggctgcgtcatctgtgtggccggcagcacagtgatggtgattcatgcccctgaggaggagaaggtgaccaccatcatggagatggccagcaagatgaaggacaccggcttcatcgtgtttgctgtgctgctgctggtgtcctgcctgatcctgatctttgtgattgcccccaggtatggccagaggaacatcctgatctacatcatcatctgcagcgtcatcggggccttctctgtggccgctgtgaagggcctgggcatcaccatcaagaacttcttccagggcctgcctgtggtgcgccaccccctgccctacatcctgagcctcatcctggccctgagcctgagcacccaggtgaacttcctgaacagagccctggacatcttcaacaccagcctggtgttccccatctactacgtgttcttcaccaccgtggtggtgaccagcagcatcatcctcttcaaggagtggtacagcatgtctgctgtggacattgctggcaccctgagcggctttgtgaccatcatcctgggcgtcttcatgctgcacgccttcaaggacctggacatcagctgtgccagcctgccccacatgcacaagaaccccccacccagccctgcccctgagcccaccgtcatccggctggaggacaagaatgtgctggtggacaacatcgagctggccagcaccagcagccctgaggagaagcccaaggtgttcatcatccacagctag

SEQ ID NO: 39617 - DNA, 1401 bp, Artificial Sequence
  derived and/or modified sequence
atgcccggcgacagcagccccggcaccctgcccctgtgggacgccagtctgagccctcctctaggacccgaccccggagggttctcaagggcgtcccacgccggggataaaagcaggccccccgccccagagctgggctcacctggcgcggtccgcccaagagttggaagctgtgctcccgggcccatggagctaagagtcagtaacacctcctgtgaaaatgggtctctgctgcatttgtattgttccagtcaagaggtgctttgccaaatcgtcaatgatctgagcccagaggtgccgtccaatgctactttccatagctggcaagagcgaattagacagaattatggcttctatatcggacttgggctggctttcctgtcctcctttctaattggcagcagcgttatcctcaaaaaaaaaggtctgttgagattagtggccactggagcgactagggctgtcgacggaggttttggatacctcaaggacgccatgtggtgggctggattcctcacgatggcagccggcgaagttgcaaactttggtgcgtatgctttcgctcccgccacggtcgtcacccccctcggcgcattgagcgtgcttatcagcgcaattctgtccagttacttcctgcgtgaatcgcttaacctcttaggcaaactcgggtgcgtaatttgtgtggctggcagcacggtcatggtgatacacgccccagaagaggaaaaagtgaccaccattatggaaatggcatcaaaaatgaaagacaccggcttcattgtgtttgctgtcctattgctggtgtcctgcctcatcctgatctttgtcatcgcccctagatacgggcagcgtaatatacttatatatataataatatgtagcgtgatcggggccttcagtgtcgcggcagtgaagggcttagggataactatcaagaatttttttcagggcctccccgtggttagacatcccctgccatacatcctgagcctcatactcgccctttcactgagcactcaagttaacttccttaaccgggcattagacatttttaacaccagcttagtctttccaatctactacgtcttctttactaccgtggtagtgaccagttccattatcctcttcaaagaatggtactcgatgtccgccgtggacatcgccggtacactctccgggtttgtaacaatcattctcggcgtgttcatgctgcatgccttcaaggacctggatatctcctgcgcatctctgcctcacatgcacaagaaccccccaccctcaccggcacctgagcctactgtgattcgccttgaggacaagaatgtgcttgtggataacattgagctggcttccactagtagtcctgaggaaaagcctaaagtttttattatccacagctag

SEQ ID NO: 39618 - DNA, 3274 bp, Artificial Sequence
  derived and/or modified sequence
agcacggggcggtgactccagagctgggagcctggcagcgtcctcaccccaggaaggcatgcgcccctctgcgggcggccccagccctgggccccctgcccccggaattgcccaagatgccgggtgactcctccccggggactctcccactctgggacgcgtcactctccccacccctgggtccggaccccggcggcttctcgcgcgcgagccacgcgggggacaagtcgcggccacctgctccggagctggggagcccgggcgccgtccgcccgcgcgtcggttcgtgtgccccgggccccatggagctgcgggtcagcaacaccagctgcgagaacggttccctgctccacctctactgctcctcccaagaagtcctgtgccagattgtcaatgacctcagccctgaggtgcccagcaatgccacctttcacagctggcaggaaagaatcaggcagaactatggcttctacatcggcctgggcctggcattcctgtctagcttcctcatcggcagcagcgtcatcctcaagaagaaaggcctcttgcgactcgtggccacgggagccactcgagctgtggatggaggcttcggctacctgaaagatgcaatgtggtgggctggatttctcaccatggctgctggagaagttgccaactttggagcctacgcatttgcacctgcaacagtcgtcacgcctctgggagcgctgagtgtcctcataagtgccatcctctcctcatatttcctgagggagagtctgaacctgctggggaagctgggctgtgtgatctgtgtggccggaagcacagtgatggtgatacatgctcctgaggaagagaaggtcactaccatcatggagatggcttccaagatgaaagacacagggttcatcgtgtttgctgtgcttctgctggtgtcatgcctcatcctcatctttgtcattgccccacgttacgggcaaaggaatatcctcatctacatcatcatctgctctgtgatcggggccttctctgtggctgctgtcaaggggctgggcatcaccatcaagaacttcttccaggggctgccagttgtccggcacccgctcccctacatcctgtccctcatcctggcactgtccctcagcactcaggtcaacttcctcaacagagcactggacattttcaacacttccctggtgttccccatctactacgtgttcttcaccacggtggtcgttacctcgtccatcatcctcttcaaggagtggtacagcatgtctgctgtggacattgcaggcaccctctcgggctttgtcaccatcatcttgggcgtgttcatgctgcatgctttcaaagacctggacatcagctgcgccagcttgccccacatgcacaaaaacccacccccttctcccgccccggaacccactgttattagactggaagacaagaacgtccttgtggacaatatagaacttgccagcacctcatcaccagaagagaaacccaaagtatttataatccattcctgaagcttggaatatgtgagtgagaggatgagtccgatggtacagcctgccctcccaatttcaaaaccacctggttattttccagtgcaactgttaccaatgggctctcttttcttgagaagttcatttatacctcatcactgtttccaggagaaaaatctttacccaaatagcaatggtggcagaacttcctggaaacagattcagtgaccaaatacccaagtttacatcagtgcctgcaggttccctggaccttccttctcattcattctttcggtgccatctctatgccgttgggaagaagatggagtctgacccactgaatgtagcacagtccaaggacttctctaagatattggtcattggaagttccttcacaccaattctcctcctgagacggaatctccgttgttgttgttgttgttgttttctagcccaaggatgacatagagctggctcccagaggcccacagagcaattggccatgcctccctatccagagctgacagggacacaaccagtgtaaaatatcctgttgcctttgtcacttcctctttggaggcagaagcaagacctcagctgaccttcttactgtgaaagccacttgatgtctcagggaaaaatttcaaccagctcattccccgagcactccagcctggcagtcagcacctcggcatccacccagtccatcccaccatcaccccttccccctctacttacatcctaaggagtcggtcactgagacataaaggcagtaatcgcagaactggaaacaaaacaataatagagccacagccaaactctggtggccaaacccagtgttgcattttgtcttactctgaaagaagaacagcaaattcactgcttcaaagtggcctggctgccaagctagaatttggcagaacgcactttactattcctcaaggagtcaaccaacctatgatctggggaggtgggaagaggatgaggagcaaagttgggatttggcagaaggcagtcccaggctctctggatactaggggctaacttttgtgttgactctggtgctcatctgggaacttaggagaaacgagctcaggggtaatttctgggttgcagccttaaaggcttggacagctgtgaatctcaatggccaactggaggtgcagacttggcatggggtgcattctagctgttgaccagattgctaccgagtcccctcctccactgatgagctgcccacactgggaagcagcatgccctgactgttccaacaccacctgctatggggagtacctttggtcccctcacatttggccagaggcatacaaaaaaccagagcagctggagagggagataattactattccttcccttcctatctcctttctagccacaagagtgtgggggttggagaagaaccattagaaagggaaattagtgggctggtgtatctggaaagagggaagacttgatcctcagccccgaggttggtgcagggcctcccctgtgtgactctacctgcactctgtgtttatatcctgtgccctaagtgggccaagcccaggtaaattcctgctggccttggaactccaaggtttggctgaccagcagactggctccctgactcttcagcctcaaatccccagtttttgatgaatgtggatttctgtctgtaattaaaagcaatgcaacaagttggctcttgagaatggcagtaaactgagggccctaagagtgtggtctgcagggtcaagaataaagattacagattatattta

SEQ ID NO: 39619 - DNA, 1401 bp, Artificial Sequence
  derived and/or modified sequence
atgccaggcgacagctctcccggtacacttccgctatgggacgcttccctgagtcccccactgggcccagatcccggaggattttcacgggcaagtcatgccggtgataaaagtcgaccccctgccccagagttgggctctcccggtgccgtccggccaagagttggttcgtgcgcacccggtccaatggagttaagagtttccaacacatcatgtgaaaatggttcactgctgcacctatattgctctagtcaggaggtgctgtgccagattgtgaatgatctcagtcccgaagtgccttccaacgccacttttcattcctggcaggaaaggatacgacagaattacggtttttacattggactaggactggcatttttgtcttcttttcttatcgggagctccgtaatcctgaaaaagaaggggctactgcgcttagttgccactggcgcaacgcgggctgtggacggtggcttcgggtatctgaaagacgcgatgtggtgggcgggattcctaacaatggccgctggtgaggttgccaattttggtgcgtacgccttcgctcccgctactgttgtcacgcccctgggagcattgagcgtcctaatcagtgccattctgtccagttatttcttgcgagaatccctgaatcttctggggaaactgggatgtgtcatttgcgtggcgggatcaactgtgatggtaatacatgccccagaggaggagaaagtcaccactattatggagatggccagcaagatgaaggacacgggcttcattgtgttcgcagttctgttgctcgtcagctgtctgatccttatcttcgtgatcgcccctaggtacgggcagcgcaacatccttatttacatcattatctgttccgtgatcggcgcattctccgtggccgctgttaagggcctcgggattaccataaagaatttttttcagggccttcctgtagtgcgacaccccttgccgtatattctgtctcttattttggcgctgtctttgagtactcaggtgaattttttaaatcgggctctcgacattttcaatacatccctagtgtttcccatttactatgtttttttcaccacagtggttgtgacaagctctatcattctgttcaaagaatggtattccatgagcgccgtggacatcgcaggcacactctccggcttcgtcacaattattctgggggtctttatgctgcatgcctttaaagatctggacatctcatgcgcctcactgccccacatgcataagaaccctcccccaagccctgctcccgaaccgactgtgatccgtctggaggacaagaatgtcttagtggataacatcgagctcgcctccacctcaagtcctgaagagaagcctaaggtttttattattcactcctag

SEQ ID NO: 39620 - DNA, 1401 bp, Artificial Sequence
  derived and/or modified sequence
atgcccggcgacagcagccccggcaccctgcccctgtgggacgccagcctgagcccccccctgggccccgaccccggcggcttcagcagagccagccacgccggcgacaagagcagaccccccgcccccgagctgggcagccccggcgccgtgagacccagagtgggcagctgcgcccccggccccatggagctgagagtgagcaacaccagctgcgagaacggcagcctgctgcacctgtactgcagcagccaggaggtgctgtgccagatcgtgaacgacctgagccccgaggtgcccagcaacgccaccttccacagctggcaggagagaatcagacagaactacggcttctacatcggcctgggcctggccttcctgagcagcttcctgatcggcagcagcgtgatcctgaagaagaagggcctgctgagactggtggccaccggcgccaccagagccgtggacggcggcttcggctacctgaaggacgccatgtggtgggccggcttcctgaccatggccgccggcgaggtggccaacttcggcgcctacgccttcgcccccgccaccgtggtgacccccctgggcgccctgagcgtgctgatcagcgccatcctgagcagctacttcctgagagagagcctgaacctgctgggcaagctgggctgcgtgatctgcgtggccggcagcaccgtgatggtgatccacgcccccgaggaggagaaggtgaccaccatcatggagatggccagcaagatgaaggacaccggcttcatcgtgttcgccgtgctgctgctggtgagctgcctgatcctgatcttcgtgatcgcccccagatacggccagagaaacatcctgatctacatcatcatctgcagcgtgatcggcgccttcagcgtggccgccgtgaagggcctgggcatcaccatcaagaacttcttccagggcctgcccgtggtgagacaccccctgccctacatcctgagcctgatcctggccctgagcctgagcacccaggtgaacttcctgaacagagccctggacatcttcaacaccagcctggtgttccccatctactacgtgttcttcaccaccgtggtggtgaccagcagcatcatcctgttcaaggagtggtacagcatgagcgccgtggacatcgccggcaccctgagcggcttcgtgaccatcatcctgggcgtgttcatgctgcacgccttcaaggacctggacatcagctgcgccagcctgccccacatgcacaagaaccccccccccagccccgcccccgagcccaccgtgatcagactggaggacaagaacgtgctggtggacaacatcgagctggccagcaccagcagccccgaggagaagcccaaggtgttcatcatccacagctag

SEQ ID NO: 39621 - protein, 882 aa, Artificial Sequence
  derived and/or modified sequence
MLLGASWLCASKAAAAAAQSEGDEDRPGERRRRRAAATAAGAGEDMDESSLLDLLECSVCLERLDTTAKVLPCQHTFCRRCLESIVCSRHELRCPECRILVGCGVDELPANILLVRLLDGIRQRPRAGTSPGGSPPARPIPGQSAAPTLAGGGGGAAGSTPGSPVFLSAAAGSTAGSLRELATSRTAPAAKNPCLLPYGKALYSYEGKEPGDLKFNKGDIIVLRRKVDEQWYHGELHGTQGFLPASYIQCIQPLPHAPPQGKALYDFEMKDKDQDKDCLTFTKDEILTVLRRVDENWAEGMLGDKIGIFPLLYVELNDSAKQLIEMDKPCPAAASSCNASLPSDSGAVASVAPSPTLSSSGAVSAFQRRVDGKKNTKKRHSFTALSVTHRSSQAASHRHSMEISAPVLISSSDPRAAARIGDLAHLSCAAPTQDVSSSAGSTPTAVPRAASVSGEQGTPPKVQLPLNVYLALYAYKPQKSDELELHKGEMYRVLEKCQDGWFKGASLRTGVSGVFPGNYVTPVSRVPAGGAGPPRNNVVGGSPLAKGITTTMHPGSGSLSSLATATRPALPITTPQAHAQHPTASPPTGSCLRHSAQPTASQARSTISTAAHSAAQAQDRPTATVSPLRTQNSPSRLPATSLRPHSVVSPQHSHQPPVQMCPRPAIPLTSAASAITPPNVSAANLNGEAGGGPIGVLSTSSPTNTGCKLDEKKSEKKEKKSGLLKLLAGASTKKKSRSPPSVSPTHDPQVAVDALLQGAVGPEVSSLSIHGRAGSCPIESEMQGAMGMEPLHRKAGSLDLNFTSPSRQAPLSMAAIRPEPKLLPRERYRVVVSYPPQSEAEIELKEGDIVFVHKKREDGWYKGTLQRNGRTGLFPGSFVESF

SEQ ID NO: 39622 - protein, 56 aa, Artificial Sequence
  derived and/or modified sequence
  misc_feature (1)..(1): Xaa can be any naturally occurring amino acid
XYRVVVSYPPQSEAEIELKEGDIVFVHKKREDGWYKGTLQRNGRTGLFPGSFVESF

SEQ ID NO: 39623 - DNA, 2649 bp, Artificial Sequence
  derived and/or modified sequence
atgctgctgggcgccagctggctgtgcgccagcaaggccgccgccgccgccgcccagagcgagggcgacgaggacagacccggcgagagaagaagaagaagagccgccgccaccgccgccggcgccggcgaggacatggacgagagcagcctgctggacctgctggagtgcagcgtgtgcctggagagactggacaccaccgccaaggtgctgccctgccagcacaccttctgcagaagatgcctggagagcatcgtgtgcagcagacacgagctgagatgccccgagtgcagaatcctggtgggctgcggcgtggacgagctgcccgccaacatcctgctggtgagactgctggacggcatcagacagagacccagagccggcaccagccccggcggcagcccccccgccagacccatccccggccagagcgccgcccccaccctggccggcggcggcggcggcgccgccggcagcacccccggcagccccgtgttcctgagcgccgccgccggcagcaccgccggcagcctgagagagctggccaccagcagaaccgcccccgccgccaagaacccctgcctgctgccctacggcaaggccctgtacagctacgagggcaaggagcccggcgacctgaagttcaacaagggcgacatcatcgtgctgagaagaaaggtggacgagcagtggtaccacggcgagctgcacggcacccagggcttcctgcccgccagctacatccagtgcatccagcccctgccccacgcccccccccagggcaaggccctgtacgacttcgagatgaaggacaaggaccaggacaaggactgcctgaccttcaccaaggacgagatcctgaccgtgctgagaagagtggacgagaactgggccgagggcatgctgggcgacaagatcggcatcttccccctgctgtacgtggagctgaacgacagcgccaagcagctgatcgagatggacaagccctgccccgccgccgccagcagctgcaacgccagcctgcccagcgacagcggcgccgtggccagcgtggcccccagccccaccctgagcagcagcggcgccgtgagcgccttccagagaagagtggacggcaagaagaacaccaagaagagacacagcttcaccgccctgagcgtgacccacagaagcagccaggccgccagccacagacacagcatggagatcagcgcccccgtgctgatcagcagcagcgaccccagagccgccgccagaatcggcgacctggcccacctgagctgcgccgcccccacccaggacgtgagcagcagcgccggcagcacccccaccgccgtgcccagagccgccagcgtgagcggcgagcagggcaccccccccaaggtgcagctgcccctgaacgtgtacctggccctgtacgcctacaagccccagaagagcgacgagctggagctgcacaagggcgagatgtacagagtgctggagaagtgccaggacggctggttcaagggcgccagcctgagaaccggcgtgagcggcgtgttccccggcaactacgtgacccccgtgagcagagtgcccgccggcggcgccggcccccccagaaacaacgtggtgggcggcagccccctggccaagggcatcaccaccaccatgcaccccggcagcggcagcctgagcagcctggccaccgccaccagacccgccctgcccatcaccaccccccaggcccacgcccagcaccccaccgccagcccccccaccggcagctgcctgagacacagcgcccagcccaccgccagccaggccagaagcaccatcagcaccgccgcccacagcgccgcccaggcccaggacagacccaccgccaccgtgagccccctgagaacccagaacagccccagcagactgcccgccaccagcctgagaccccacagcgtggtgagcccccagcacagccaccagccccccgtgcagatgtgccccagacccgccatccccctgaccagcgccgccagcgccatcaccccccccaacgtgagcgccgccaacctgaacggcgaggccggcggcggccccatcggcgtgctgagcaccagcagccccaccaacaccggctgcaagctggacgagaagaagagcgagaagaaggagaagaagagcggcctgctgaagctgctggccggcgccagcaccaagaagaagagcagaagcccccccagcgtgagccccacccacgacccccaggtggccgtggacgccctgctgcagggcgccgtgggccccgaggtgagcagcctgagcatccacggcagagccggcagctgccccatcgagagcgagatgcagggcgccatgggcatggagcccctgcacagaaaggccggcagcctggacctgaacttcaccagccccagcagacaggcccccctgagcatggccgccatcagacccgagcccaagctgctgcccagagagagatacagagtggtggtgagctaccccccccagagcgaggccgagatcgagctgaaggagggcgacatcgtgttcgtgcacaagaagagagaggacggctggtacaagggcaccctgcagagaaacggcagaaccggcctgttccccggcagcttcgtggagagcttctag

SEQ ID NO: 39624 - DNA, 2649 bp, Artificial Sequence
  derived and/or modified sequence
atgctcctgggcgccagctggctgtgcgcatccaaggcggctgcagcagctgcccagtccgagggagatgaagatcgacctggcgagcggcgacggcggagggcggccgcaacggccgccggtgctggagaggatatggacgaatcgtctctactggacttgttggagtgctccgtctgcctcgaacgcctggataccacagctaaggttctgccttgccagcatacattttgtagacggtgcttagaaagcatcgtctgctctcgccatgagttgcggtgccccgagtgcaggatattggttggatgcggggttgacgagttgcccgctaacatcctgctcgtaagattactcgacggaatccggcaaagaccccgtgctggaacttccccaggcggctcaccacccgctaggcccatccccggacagagtgcagcccccaccttggcaggcggcggaggaggcgccgcaggtagtaccccagggtctcccgtctttctcagcgctgctgctggtagtaccgctggctctttgagggagttggccacttctcggacggcacccgcggccaaaaacccgtgcttactgccgtatggaaaggccctatattcttatgagggaaaggaacccggcgatctgaagtttaataaaggtgacatcatagtgttacgaagaaaggttgatgagcaatggtatcatggcgagctgcacgggactcaggggtttttaccagcatcttatattcagtgtatccagcccctgccgcatgccccacctcagggcaaggccctttatgacttcgaaatgaaggataaggaccaagacaaagattgtttgacattcaccaaggatgaaattctaacagtgctcagaagggttgacgagaattgggccgagggaatgctcggtgacaaaatcggcatttttcctctgctgtatgtcgaattaaacgactcagccaaacagttaatcgaaatggacaagccctgtccagcagcagccagcagctgtaatgccagcctgccttcagactcaggagccgtggcaagtgtggccccttcacctaccctaagctcttccggcgcagtgagcgccttccaacgcagggtggatgggaagaaaaacaccaagaagagacactcttttacagcattgtcggtgacccacaggagttctcaggccgccagtcataggcacagtatggagatttccgcgccagtcctgatatcaagcagcgatccgagagcagctgctcgaatcggggacttagcgcatctcagctgtgctgcccctacacaggacgtgagcagctctgcgggcagcacccctaccgcagtcccccgagccgcatctgtgagcggagagcagggtacaccacccaaggtgcagcttccgctgaacgtctatttggccttgtacgcatacaaaccccagaagagtgacgaactggagctgcataaaggtgaaatgtacagagtgctagagaagtgtcaagacggttggttcaagggagcttccctgcgtacgggggtctcaggcgtgttccctggcaattacgtaactccagtttctcgagtgcccgcagggggggccgggccaccacgaaacaacgtggtcggcggaagcccactggcaaaggggatcacgactactatgcatccgggttccggttcactgtccagtttagctacggctactcggccagccctaccaataaccaccccccaggcccatgctcaacacccaacagcttctcctccgacaggttcttgtctgcggcattcagcacagcctactgcgtcacaagcccgatcaacaatctccaccgcggcccattctgctgctcaagctcaggaccgtcctaccgccaccgtgtcgcctctgaggactcagaacagccctagcaggctccctgccacatctctgcgcccacattccgtggtttcgccacagcactctcaccaaccacccgtgcagatgtgtccaagaccagcaatcccattgaccagtgcggcgtccgctatcactcctcccaacgtctctgctgccaacctcaatggcgaggctggggggggtcccataggcgtgttgtcgacaagtagtcctacgaacaccggatgcaagctagatgagaagaaatcggaaaaaaaggagaagaagagtggcctcttgaaactcctggccggagcctccacaaaaaaaaagtcaagatctcccccttctgtcagtccaacccacgacccacaagtggctgttgacgctctcctgcagggggcagtggggccagaggtctcctctctctccatacatgggcgggctggatcatgccctattgagagcgagatgcagggagctatgggcatggagcctctgcatagaaaggctggctcactggatctgaactttactagtccaagccgacaggcccctctatccatggcagccatcagacccgagcctaagttgctgcctcgtgagcggtacagagtcgttgttagctaccctcctcaatcagaagccgagattgagctgaaggaaggggatatcgtgtttgtgcacaaaaagagggaagatgggtggtacaaggggaccctgcagcgtaatggcaggacaggcttattccccggctcttttgtggagtccttctag

SEQ ID NO: 39625 - DNA, 2649 bp, Artificial Sequence
  derived and/or modified sequence
atgctgctgggcgcctcctggctgtgtgccagcaaggctgctgctgctgctgcccagagtgaaggagatgaggacaggcctggagagaggagaagaagaagagctgctgccacagctgctggggccggggaggacatggatgagagcagcctgctggacctgctggagtgcagcgtgtgcctggagcggctggacaccacagccaaggtgctgccctgccagcacaccttctgccgccgctgcctggagagcatcgtgtgcagcagacatgagctgcgctgcccagagtgccgcatcctggtgggctgcggcgtggatgagctgcctgccaacatcctgctggtgcggctgctggatggcatccggcagaggcccagggctggcaccagccctgggggcagccccccagcccggcccatccctggccagagcgctgcccccaccctggccggcggcggcggcggcgctgctggcagcaccccaggcagccctgtgttcctgtctgctgctgctggcagcacagctggcagcctgcgggagctggccaccagcaggacagccccagctgccaagaacccctgcctgctgccctacggcaaggccctgtacagctatgagggcaaggagcccggggacctgaagttcaacaagggggacatcatcgtgctgcggaggaaggtggatgagcagtggtaccatggagagctgcacggcacccagggcttcctgcctgccagctacatccagtgcatccagcccctgccccacgccccaccccagggcaaggccctgtatgactttgagatgaaggacaaggaccaggacaaggactgcctgaccttcaccaaggatgagatcctgactgtgctgcggcgggtggatgagaactgggccgagggcatgctgggggacaagattggcatcttccccctgctgtatgtggagctgaatgattctgccaagcagctgattgagatggacaagccctgcccagctgctgccagcagctgcaatgccagcctgcccagcgacagcggggctgtggcctctgtggcccccagccccaccctgagcagcagcggggctgtgtctgccttccagaggagagtggatggcaagaagaacaccaagaagaggcacagcttcaccgccctgtctgtgacccacaggagcagccaggccgccagccaccgccacagcatggagatcagcgcccctgtgctgatcagcagcagtgaccccagggctgctgcccgcatcggggacctggcccacctgagctgtgccgcccccacccaggatgtgagcagcagcgctggcagcacccccacagctgtgcccagggctgcctctgtgtctggagagcagggcaccccacccaaggtgcagctgcccctgaatgtgtacctggccctgtatgcctacaagccccagaagagtgatgagctggagctgcacaagggggagatgtacagagtgctggagaagtgccaggacggctggttcaagggggccagcctgaggactggagtgtctggagtcttccctggcaactacgtgacccctgtgtcccgggtgcctgctgggggcgccggccccccaagaaataatgtggtgggcggcagccccctggccaagggcatcaccaccaccatgcaccctggcagcggcagcctgagcagcctggccacagccaccaggcctgccctgcccatcaccaccccccaggcccacgcccagcaccccacagccagcccccccaccggcagctgcctgcggcacagcgcccagcccacagccagccaggcccggagcaccatcagcacagctgcccacagcgctgcccaggcccaggaccggcccacagccaccgtgagccccctgcggacccagaacagccccagccggctgcctgccaccagcctgcggccccacagcgtggtgagcccccagcacagccaccagccccctgtgcagatgtgccccaggcctgccatccccctgaccagcgctgccagcgccatcaccccaccaaatgtgtctgctgccaacctgaatggagaggccggcggcggccccatcggcgtgctgagcaccagcagccccaccaacacaggctgcaagctggatgagaagaagtctgagaagaaggagaagaagagcggcctgctgaagctgctggccggggccagcaccaagaagaagagccgcagccccccatctgtgagccccacccatgacccccaggtggccgtggatgccctgctgcagggcgctgtgggccctgaggtgagcagcctgagcatccacggccgggccggcagctgccccatcgagagcgagatgcagggcgccatgggcatggagcccctgcacaggaaggccggcagcctggacctgaacttcaccagccccagccggcaggcccccctgtccatggccgccatccggcctgagcccaagctgctgccccgggagcgctacagagtggtggtgtcctacccaccccagagcgaggccgagattgagctgaaggagggggacatcgtgtttgtgcacaagaagagagaagatggctggtacaagggcaccctgcagagaaatggccgcacaggcctcttccctggcagctttgtggagagcttctag

SEQ ID NO: 39626 - DNA, 2649 bp, Artificial Sequence
  derived and/or modified sequence
atgctgctgggcgccagctggctgtgcgccagcaaggccgccgccgctgccgcccaaagcgagggcgacgaggatcgccctggagagaggcgcaggaggcgcgctgccgcaaccgctgcaggggccggggaagatatggatgagtcaagtctcctggacctgctcgagtgctccgtgtgtctcgaacgactggatacgacagccaaggtgctgccctgtcagcacacattctgtaggaggtgtttagagagtattgtttgcagtcgacacgaactcaggtgtcctgaatgccggatactggttggctgcggtgtggatgagttgccagcgaacatccttctagttcgccttctcgatggcattaggcaacgacccagggctggaacctcaccaggggggagcccaccagcccgcccaatcccaggtcagagtgcagccccaactctggctgggggggggggaggggcagctgggtcaacgcctggtagtcccgtattcctgagcgcggccgccggttcaacggcaggctccctgcgagagttagcgacctcacgtacggcgcctgccgctaagaatccttgtttactgccatacgggaaggctttgtactcttatgaggggaaggaacccggtgacctaaaatttaacaaaggagacatcatcgtgctgcgccgcaaggttgatgaacagtggtaccacggcgagctccatggcacccaaggatttctgccagccagttatattcagtgtatccagcccttgccgcatgccccccctcagggtaaagccctctatgacttcgagatgaaggataaggatcaggataaggattgcttgaccttcaccaaggacgaaatccttaccgtgctaagacgcgttgacgagaattgggcagaaggcatgctaggcgacaagattggcatttttccactcttgtatgtggagcttaacgactcagccaagcaattgattgagatggacaaaccttgccctgctgcagcctcaagttgtaacgcctccctcccgtccgatagcggggccgtcgctagcgtggcgccaagccccacactgagctcctccggagccgtgtctgccttccaaagaagggtggacggtaaaaagaataccaagaagcgccactcattcacagccttaagcgtgacgcataggagctcacaggcagcatcacaccgccattccatggaaatctcagccccagttttgatctcaagtagcgacccacgtgcagctgccagaatcggtgatctcgcacacctttcgtgcgctgcacccacacaggatgtttcctcttccgcggggagcaccccgacagccgtcccccgagccgcatccgtcagcggggagcaggggaccccacccaaggtgcaacttcccttgaatgtttacctggcactatatgcctacaagccacagaaaagcgatgagctcgagctccataagggtgaaatgtatcgggtgttggagaagtgccaagatggctggttcaaaggtgcttcactgcgtacgggagtgagcggcgtgttccccggcaactatgtaactcccgtgtcccgtgtgcccgccggaggcgccggaccccctagaaacaatgtcgtgggtgggtctcctcttgcgaaaggaattactaccaccatgcatcctggctctggctcactgagctcattggccacagcgacccgccccgctctaccaataacgactccgcaagcccacgcccagcatccaaccgcctcacctcccacaggaagttgcttacgccacagcgcccagcccacagctagccaggcccgctctacaatctctacagcagctcattctgccgctcaggcgcaagatcggcccactgcaaccgtatcacccctgcggacacagaactctccctcccggttacccgcaacatccctgaggccccacagtgttgtgagcccacagcactctcaccagcccccggtccagatgtgtcctcgtcctgccatccccctaacttccgccgcatccgccattacaccccccaatgtgagcgctgccaatttgaacggcgaggcaggcggtggccctattggtgtcctttcaacctcaagcccaactaatactggttgtaaactcgacgagaaaaagtcagagaaaaaagagaagaagagcgggctgctaaaactcttagccggcgcctctacaaagaaaaagtccagaagcccgccaagtgtgtccccaacccatgacccgcaggtagccgtggatgcactgttgcagggcgctgtcggtcccgaggtgagcagtctctctattcatgggcgagccgggagctgccccatcgagtctgaaatgcaaggggccatgggaatggaacctctccatagaaaggctggatcactcgatctgaattttacatccccttcccggcaggcccccctgtctatggctgctattcgccccgaacccaagttgctgccccgagaacggtaccgcgtcgttgtctcttaccccccccagtctgaggcagagattgaactgaaagagggagacattgtatttgtccataagaagagggaggacggatggtataagggaactcttcaaaggaacggaagaacagggctgttcccaggcagtttcgtggagagtttctag

SEQ ID NO: 39627 - DNA, 2649 bp, Artificial Sequence
  derived and/or modified sequence
atgctgctaggcgcttcctggctttgtgccagtaaagctgccgcagccgctgctcagtccgagggcgacgaagatagacccggagagcgccgacgaagacgagccgctgcaactgccgcaggagccggagaagacatggatgagagctcattgctggatttgctcgagtgttcagtttgcctggaaagactggacaccacagctaaagtactcccttgccagcataccttttgcagaagatgcctggaatccatcgtgtgttcccggcatgaactgagatgcccagagtgtagaattctggtaggctgcggagttgatgaattgcctgcaaacatcctgcttgtcagactgttggacggcattcgacagaggccaagggcgggaaccagccctggaggatccccaccagccagacccattccaggtcagtctgcggctccaacactggcaggtggtggcggtggagcagcagggagcacccctggctcaccagtgttcctgtccgccgctgccggatcaacggccggtagtctgcgggaattggccacttcccgaactgccccagccgctaagaatccttgccttctcccctacggaaaagccctctattcctatgagggtaaagagcctggcgacttaaaattcaataaaggggacatcatagtcctgagaagaaaggtggacgagcagtggtaccacggggagctgcatggtacccagggctttttacctgcaagttatatccagtgcatccagcctttgcctcatgctcccccacaggggaaggcactgtacgattttgaaatgaaagacaaagaccaggataaggactgcctcacgtttactaaggatgagatcctgactgtgttgcggagggtggatgagaattgggctgaaggcatgctcggggataagatcggaatatttcctctcctctatgttgagttgaatgactcagcgaagcaactcatagagatggataagccctgcccagctgctgcgtcttcttgcaacgcgtcattgccctcggattccggcgctgtggcttcagtcgctccctctcccacactgtccagctccggggcagtctccgcattccaaagacgcgttgacggcaaaaagaataccaagaaaaggcactcatttacagctctgtctgtaacccaccgcagttcccaggcagcctcacaccggcactccatggaaatttcagctcctgtactgatcagttcctcagatccccgagccgcagcccgaatcggcgatctggctcacctgagctgtgctgctccaacgcaggatgtctctagctctgctggatctactcctactgcagtcccgagggcggcttccgtgagcggagaacagggcactccgcctaaggtccagctgccattaaacgtctacctcgcattgtatgcatataaacctcaaaagtctgatgaactcgagctgcacaaaggggagatgtaccgagtgttagagaagtgccaggatggatggttcaaaggcgcaagtctcagaactggtgtgtcaggcgtctttccaggcaactatgtgacacctgtgagcagggttcctgctggcggtgctgggccaccgaggaacaacgtggtggggggaagtcctctcgccaagggaattacgaccacaatgcatcctggctccggttctctatctagcctagccaccgcaacccgcccagcactgccaattactacaccgcaggctcacgctcaacacccaacagcctcgcctcctaccggcagttgtctgcggcatagcgcccagcctactgcaagccaggcccgaagtacgatctcgacagcggcacactccgcggcacaggcccaggacaggccaacggccactgtatctccactgaggacgcaaaattctccctccagattgcccgcaacgtctctgcgcccacacagtgtggtgagtccacagcacagccaccagccaccagtccaaatgtgccctcgacctgcgatccctctaacatctgccgcatctgccatcactcccccaaatgtttctgccgctaatcttaacggggaggctggcggaggtccgatcggcgtgctttctaccagtagtccaactaacaccggatgcaagctggatgagaagaagtcagaaaagaaagagaagaaaagcggtctgttgaagctcctagccggagcaagcactaagaagaagtctcgatcccccccaagtgtgagccccacacacgacccccaggtggctgtggacgcactcctacagggcgcagtcgggcctgaagtgtcttccctttccatacacggaagagccggatcctgccctatagagtctgaaatgcaaggcgctatgggaatggagcccctgcacaggaaagccggatcgctggacctgaactttaccagccccagcagacaggctcctcttagtatggcagccattcgcccagagcccaagctgcttcctcgggagaggtaccgggtggtcgtgtcctatccaccacagtctgaagctgaaattgagctcaaggagggggatatcgtgttcgtgcacaagaagagagaggacggctggtacaaggggacactgcagcggaatggacgcaccggactcttcccaggctcctttgtggaatcgttctag

SEQ ID NO: 39628 - DNA, 2649 bp, Artificial Sequence
  derived and/or modified sequence
atgctgctcggagcgtcctggctgtgcgcatccaaggcggccgccgctgctgcgcagagcgagggcgacgaggacaggccaggcgagcgacggcggcgtcgggcggcggccaccgccgcgggggcgggcgaggacatggacgagtcgtcgctgctggacctgctggagtgctccgtgtgtctggagcgcctggacaccacggccaaggtgctgccatgccaacacactttctgccgccgctgcctggagagcatcgtgtgctcgcgccacgagctgcgctgccccgagtgccgcatcctggtgggctgcggcgtggacgaactgcccgccaacatcttgctggtgcgactgctggacggcatccgtcagcggccccgcgcgggcaccagccccggcggcagcccgcccgcgcgtcccatcccaggccagagtgcggcccccacgctcgcgggcggcgggggcggcgcggcaggcagcaccccgggttccccggttttcctctccgcggccgcgggcagcaccgccggcagtctgcgggagctggcgaccagcaggaccgcgccggcggcaaagaatccctgcctgcttccctatggcaaggccctctacagctacgaggggaaggaacctggtgacctcaagttcaacaagggggacatcatcgtcctgcggcgcaaggtggatgaacagtggtaccacggcgagctgcacggcacacagggcttcctcccagccagctatatccagtgcatccagcccttgccacacgccccgccccagggaaaagcactttatgatttcgagatgaaggacaaagaccaagacaaggactgtctgaccttcaccaaggacgagattctgacggtgctcaggagagtggatgagaactgggcggaaggcatgctgggagacaagatcgggatcttcccgctcctgtacgtggagctcaatgactccgccaagcagctcattgagatggacaagccatgcccagccgctgcatccagctgcaatgcctccctgccctctgactccggcgctgtggccagcgtggccccaagtcccactttaagcagctcaggggcggtcagtgcctttcagcggcgtgtggatggcaagaagaacaccaagaaacgccactccttcaccgcgctcagtgtgacgcacagatcctcccaggctgccagccacaggcattccatggaaattagtgctccagtgttgatcagctccagcgatccccgagccgcggccaggattggagaccttgctcatctgtcgtgcgctgctcccacccaggatgtctcctcctcggcgggatctacccccacggctgtcccacgggctgcctcggtgtctggagagcagggcacgcctcccaaggtccagctgcccctcaacgtgtacctggcgctctacgcctacaagccccagaagagtgacgagctggagctgcacaagggagagatgtaccgggtcctcgagaagtgtcaggatggctggttcaagggggcgtctctgaggaccggggtctctggggtgttccccggaaactacgtgacacccgtttccagggtgcctgcaggaggggcagggccgccccggaataatgtagtcggagggtctccactggccaaagggataaccacaaccatgcacccaggcagtgggagtctgagcagcctggccactgccaccaggcccgccctgcccatcaccactccccaggcccacgcccagcaccccacagcctcgcccccaacaggcagctgtctacggcactcagcccagccaacggccagccaagcccggagcaccatttcaacagctgcccactctgcagcccaggctcaggaccggccaactgccaccgtgtcacccctgcgcacccagaactctccatcccgcctgcctgccaccagcctcaggccccactcggtggtgtccccgcagcacagccaccagcccccggtgcagatgtgcccacggccggccatccccctcacatcagcagcatcagccatcacacctcccaacgtcagtgccgcaaacctcaacggggaggctggaggggggcccatcggtgttctgtccacatccagccccaccaacacgggatgcaaactagacgagaagaaaagtgaaaagaaagagaagaagagtgggctcctgaagcttctagccggagcatccaccaagaagaagtcacgctccccgccatctgtgtctccaacccacgacccccaggtggccgtggacgccctgctccaaggtgcagtgggccccgaagtgtcctcactgtccatccacggcagggcagggtcctgccccatagagagcgagatgcagggtgccatggggatggagcctctgcacaggaaggcaggctccttggatctaaacttcacatctccttcccggcaagctccgctgtccatggctgccatccgccccgagcccaagctgttgcccagagagaggtaccgcgtggtggtctcgtacccaccccagagtgaggcggagatcgagctgaaggaaggcgacatcgtctttgtgcacaagaagcgtgaggacggctggtacaaggggaccctgcagcggaacggccgcacaggcctcttcccgggcagcttcgtcgagagcttctga

SEQ ID NO: 39629 - protein, 1234 aa, Artificial Sequence
  derived and/or modified sequence
MKEEVKGIPVRVALRCRPLVPKEISEGCQMCLSFVPGETQVVVGTDKSFTYDFVFDPCTEQEEVFNKAVAPLIKGIFKGYNATVLAYGQTGSGKTYSMGGAYTAEQENEPTVGIIPRVIQLLFKEIDKKSDFEFTLKVSYLEIYNEEILDLLCPSREKAQINIREDPKEGIKIVGLTEKTVLVALDTVSCLEQGNNSRTVASTAMNSQSSRSHAIFTISIEQRKKSDKNCSFRSKLHLVDLAGSERQKKTKAEGDRLKEGININRGLLCLGNVISALGDDKKGSFVPYRDSKLTRLLQDSLGGNSHTLMIACVSPADSNLEETLSTLRYADRARKIKNKPIVNIDPHTAELNHLKQQVQQLQVLLLQAHGGTLPGSINAEPSENLQSLMEKNQSLVEENEKLSRCLSKAAGQTAQMLERIILTEQVNEKLNAKLEELRQHVACKLDLQKLVETLEDQELKENVEIICNLQQLITQLSDETVACTAAAIDTAVEEEAQVETSPETSRSSDAFTTQHALHQAQMSKEVVELNNALALKEALVRKMTQNDNQLQPIQFQYQDNIKNLELEVINLQKEKEELVRELQTAKKNVNQAKLSEHRHKLLQELEGQIADLKKKLNEQSKLLKLKESTERTVSKLNQEIWMMKNQRVQLMRQMKEDAEKFRQWKQKKDKEVIQLKERDRKRQYELLKLERNFQKQSSVLRRKTEEAAAANKRLKDALQKQREVTDKRKETQSHGKEGIAARVRNWLGNEIEVMVSTEEAKRHLNDLLEDRKILAQDVVQLKEKKESRENPPPKLRKCTFSLSEVHGQVLESEDCITKQIESLETEMELRSAQIADLQQKLLDAESEDRPKQCWENIATILEAKCALKYLIGELVSSKIHVTKLENSLRQSKASCADMQKMLFEEQNHFSEIETELQAELVRMEQQHQEKVLYLVSQLQESQMAEKQLEKSASEKEQQLVSTLQCQDEELEKMREVCEQNQQLLQENEIIKQKLILLQVASRQKHLPNDTLLSPDSSFEYIPPKPKPSRVKEKFLEQSMDIEDLKYCSEHSVNEHEDGDGDGDSDEGDDEEWKPTKLVKVSRKNIQGCSCKGWCGNKQCGCRKQKSDCGVDCSCDPTKCRNRQQGKDSLGTVEQTQDSEGSFKLEDPTEVTPGLSFFNPVCATPNSKILKEMCDMEQVLSKKTAPAPSPFDLPESKHGATEYQQNKPPGKKKKRALASNTSFFSGCSPIEEEAH

SEQ ID NO: 39630 - DNA, 3705 bp, Artificial Sequence
  derived and/or modified sequence
atgaaagaagaggtcaaaggtatcccggtgcgagtggcgttgcgctgccggcctctcgtacccaaggaaatctccgagggctgtcagatgtgtctttcctttgtacctggagaaacccaggtcgtggtcggcaccgataagtcatttacatacgacttcgttttcgacccttgtacggagcaagaggaagtatttaataaagctgtcgccccacttattaaggggatctttaaaggttataacgcgacggtgctggcctacggccaaaccggttctgggaaaacctatagcatgggaggggcttacacggccgaacaggaaaatgaaccaacagtgggaattattccaagggttattcagctgctgtttaaggaaatagataagaagtctgatttcgagttcaccctgaaggtctcatacctggagatctacaatgaagagattctggatctgctgtgcccctcgagggaaaaggcccagatcaacattcgagaagatcctaaagaggggatcaagattgtcggcttgacagagaaaaccgttctcgtcgctctggacacggtgtcctgcctggaacagggtaataactcgcgtaccgtggcctctaccgccatgaattcacagtcctctcggagtcacgccattttcaccatatctatcgaacaaagaaaaaaaagtgacaaaaactgtagctttcggtcaaaactgcacctggtcgacctcgctggaagtgagcgtcagaaaaagacaaaggccgagggagaccgcttgaaggaggggatcaacatcaaccgtggacttctctgtctggggaacgtgatcagcgccctaggagacgacaagaaaggcagtttcgtgccctatagagactccaagcttactaggttacttcaggacagcttgggcggcaactcgcacactcttatgatcgcttgtgtctcaccagccgactccaacttggaagagactttgagcacgctgagatatgcagatcgggcccggaagataaagaacaagcctatcgttaatatcgatcctcataccgctgaattgaatcatcttaaacaacaggtccaacagcttcaggtgttactcctgcaggcccatggcggcacccttcctggtagtattaatgcggagcccagtgaaaacctgcaaagtctcatggagaagaatcagtcgctggtggaagaaaacgagaagctaagccgttgtctgtctaaggccgccggccaaacggcccagatgctcgagcggattatcttgaccgagcaggttaacgagaagttgaatgccaagctggaagaactccgccagcacgtggcttgcaaactggaccttcaaaagttggtggagaccctggaggatcaggagttaaaggagaacgtcgagataatttgtaatctgcagcagctcattactcaattaagcgatgagaccgtggcatgcactgcagccgcaatcgatacagccgtggaggaagaggctcaggttgagacttcccctgaaaccagcagatcgtcagatgcattcacaacacagcatgccttgcatcaggcgcaaatgtctaaggaggtggtggaactcaacaacgccctggctttgaaagaggcactggtgcgcaagatgactcagaatgacaaccagctccagccgatacagttccagtatcaagataatattaaaaacctggaactggaggttatcaacctgcagaaagagaaagaagagttagtcagggagttgcagaccgccaagaaaaatgtgaaccaggctaagctcagcgaacaccggcacaaactcctgcaggaactggaaggccagatagcggacctcaaaaaaaagctcaacgaacaaagcaaactgttgaagctgaaggagtccacagagaggacggtgtctaaattaaatcaggaaatctggatgatgaagaatcagagggtccagctgatgaggcagatgaaagaagacgctgagaaatttcgccagtggaaacagaaaaaggacaaagaggttatccagttgaaggagcgcgataggaaacgccaatatgaactacttaagttggagcggaacttccagaaacagagtagcgttctcaggcgtaaaacagaggaggcagccgctgccaataaacgcctgaaagacgccctccagaaacagagagaggtcactgacaagagaaaagagactcaatcccacggtaaagaaggaatcgctgcaagagttagaaattggctaggcaatgagatagaggtgatggtgtcaactgaggaagctaaacgacatcttaacgacctgctggaagatagaaagattttggcacaggacgtggtgcaactgaaggagaagaaggaatcacgagaaaacccaccacctaaattgagaaaatgcacattctccttgtcagaggtgcacggccaggtgttggaatccgaggactgtatcacaaaacagatcgagagtctcgagacagaaatggaactgagatccgcccagatcgctgatctgcaacagaagctcctcgatgccgagagcgaggatcgcccgaaacaatgttgggaaaacatcgcgacaatcctggaagcgaagtgcgcccttaagtatctcattggagaactcgtctcatcgaagattcacgtgaccaagctcgagaatagtctcagacaatcaaaggcgtcatgtgcggatatgcagaagatgctattcgaggagcagaatcatttttcggaaattgagaccgaactccaggccgagttggtgcggatggaacagcaacatcaggagaaggtgttgtaccttgttagccagctgcaggaaagccagatggctgagaaacaactggagaaaagcgcaagcgaaaaagaacagcagttggtgtctacgctgcagtgccaggacgaggaactggagaagatgcgggaggtctgcgaacagaatcagcagcttctccaggagaatgagataataaaacaaaaactcattctcttgcaggtggcaagtcggcagaaacacctccctaatgacactttattgtcccctgactcttctttcgagtacatccctcccaaaccaaagcctagtagagtaaaggagaagttcctggagcaatccatggatatcgaagacctcaaatactgttctgaacattcagtaaacgaacacgaagatggtgatggcgacggcgattcggatgagggcgatgacgaggaatggaaacctactaaactggtcaaggtttcccggaaaaatatccaggggtgttcttgtaaaggttggtgcggcaataagcagtgcggctgtcgtaaacagaagagcgactgtggtgtggattgctcttgtgacccaacgaaatgccgaaaccggcagcagggcaaagattccctcgggaccgtcgagcagacacaggactctgaaggctcattcaagcttgaggatcctacggaggtcactcctggactgtcattcttcaacccagtctgcgccacacctaatagcaagattctgaaggagatgtgtgatatggagcaggtgttatcaaaaaaaacggcccctgcaccttctcccttcgatctaccagaaagcaaacacggtgccactgaataccagcagaacaagccgccgggcaagaagaaaaaacgtgctctagcctccaatactagcttctttagcgggtgtagtccgattgaggaagaagcacactag

SEQ ID NO: 39631 - DNA, 4378 bp, Artificial Sequence
  derived and/or modified sequence
ggatttgaaacttggcggttaaagctccggctgggacagggcggcgggagaccccgggtgaacggggaagggacatttagtttgagacggtgctgagataggatcatgaaggaagaggtgaagggaattcctgtaagagtggcactgcgttgtcgccctctggtccccaaagagattagcgagggctgccagatgtgcctttccttcgtgcccggggagactcaggtggtggttggtactgataaatccttcacctacgattttgtgtttgacccctgtactgagcaggaagaagtcttcaataaagcagtagcgccgctcataaaaggcatatttaaaggatataatgcaacggtcctggcctatgggcagactggctctggaaaaacctattcaatgggaggtgcatacactgcggagcaggagaatgaaccaacagttggcattattcctagggtaatacaactgctcttcaaagaaattgataaaaagagtgactttgaatttactctgaaagtgtcttacttagagatttacaatgaagaaattttggatcttctatgcccatctcgtgagaaagctcaaataaatatacgggaggatcctaaggaaggcataaagattgtgggactcactgagaagactgttttagttgccttggatactgtttcctgtttggagcagggcaacaactctaggactgtggcctccacagctatgaactcccagtcgtcccgatctcatgccatctttacaatctccatagagcaaagaaagaaaagtgacaagaattgcagctttcgctccaagctgcatcttgtagatctcgctggatcagaaagacagaagaaaaccaaggctgaaggggatcgtctaaaagagggtattaatattaaccgaggcctcctatgcttgggaaatgtaatcagtgctcttggagatgacaaaaagggtagctttgtgccctacagagattccaagttaactcgactgctgcaagattctctaggaggtaacagccacactcttatgatagcctgtgtgagtcctgctgactccaatctagaggaaacattaagtacccttcgctatgctgacagagcaagaaaaatcaagaacaaacctattgttaatattgatccccacacagctgaacttaatcatctaaagcaacaggtacaacagctacaagtcttgttgctacaagcccatggaggtaccctgcctggatctataaatgcagaaccatcagagaatctacaatccctgatggagaagaatcagtccctggtagaggagaatgaaaaattaagtcgttgtctgagcaaggcagctggtcagacagcccagatgttggagaggatcattttgacagagcaagtgaatgaaaaactgaacgccaagctagaagagctcaggcagcatgtggcctgcaagctggatcttcaaaagctagtggagactttggaagaccaggaattgaaagaaaatgtagagataatttgtaacctgcagcaactgattacccagttatcagatgaaactgttgcttgcacggctgcagccattgatactgcggtagaagaagaagctcaagtggaaaccagtccagagacaagcaggtcttctgacgcttttaccactcagcatgctctccatcaagctcagatgtctaaggaggtggttgagttgaataacgcccttgcactgaaagaggccctagttaggaagatgactcagaacgacaaccaactacagcccattcagtttcaataccaggataacataaaaaatctagaattagaagtcatcaatctgcaaaaggaaaaggaagaattggttcgtgaacttcagacagcaaagaagaatgtcaaccaagccaagctgagtgagcaccgccacaaacttctccaggagctggagggtcaaatagctgatctgaagaagaaactgaatgagcagtccaaacttctgaaactaaaggaatccacagagcgtactgtctccaagctgaaccaagagatatggatgatgaaaaaccagcgggtacagttaatgcgtcaaatgaaagaggatgctgagaagtttagacaatggaagcagaaaaaagacaaagaagtaatacagttgaaagaacgagaccgtaagaggcaatatgagctgctcaaacttgaaagaaacttccagaaacaatccagtgtgctcagacgtaaaacggaagaggcagcagctgccaacaagcgactcaaggatgctctccagaaacaacgagaggtcacagataagcggaaagagactcagagccatggaaaggaaggtattgcagctcgagtgaggaattggcttggaaatgaaattgaggttatggtcagtactgaggaagccaaacgccatctgaatgacctccttgaagacagaaagatcctggctcaggatgtggttcaactcaaagaaaaaaaggaatctcgggagaatccacctcctaaactccggaagtgtacattctccctttctgaggtgcatggtcaagttttggagtcagaagattgtattacaaaacagattgaaagcctagagactgaaatggaactcaggagtgctcagattgctgacctacagcagaagctgctggatgcagaaagtgaagataggccaaaacaatgctgggagaatattgccaccattctggaagccaagtgtgccctgaaatatttgattggagagctggtctcctccaaaatacatgtcaccaaacttgaaaacagcctgagacagagcaaggccagctgtgctgacatgcagaagatgctatttgaggaacaaaatcatttttctgagatagagacagagttacaagctgagctggtcagaatggagcaacagcaccaagagaaggtgctataccttgtcagccagctgcaggaaagccaaatggcagagaagcagttagagaaatcagccagtgaaaaggaacaacagctggtgagcacactgcagtgtcaggatgaagaacttgagaagatgcgagaagtgtgtgagcaaaatcagcagcttctccaagagaatgaaatcatcaagcagaaactgatcctcctccaggtagccagcagacagaaacatcttcctaatgatacccttctatctccagactcttcttttgaatatatcccacctaagccaaaaccttctcgtgttaaagaaaagtttctggagcaaagcatggacatcgaggatctaaaatattgttcagagcattctgtgaatgagcatgaagatggtgatggtgatggcgacagtgatgagggggatgatgaggaatggaagccaacaaaattagtcaaggtgtccaggaagaacatccaagggtgttcctgcaagggctggtgtgggaacaagcagtgtgggtgcaggaagcaaaagtcagactgtggtgtggactgtagctgtgaccccacaaagtgtcggaaccgccagcaaggcaaggatagcttgggcactgttgaacagacccaggattccgaaggctccttcaaactggaggatcctaccgaggtgaccccaggattgagcttctttaaccctgtctgtgccacccccaatagcaagatcctgaaagagatgtgtgacatggagcaggtgctgtcaaagaagactgctccagctccctccccttttgacctcccagagtcgaaacatggagcaacagaataccaacaaaataagcctccagggaagaaaaagaaacgagctctggctagcaacaccagcttcttctctggctgctcccctatcgaagaagaggcccactgaagttggagtcatcatctctacccccaatctggcttgggagatgctttccagttgcagccagaaggggttttttaaatgacttctctggatttcaggtttcttgccgttgaaaaaaaggaacaaagcattactaaaaagaaggtaacctttgttggatgttgtccctcagtctccatccccagactactgctctctgctctctagaaggctgctaaaccacctgctgaagagagaaccaacagactttcctaatgactcatcaggaaccagtcctcagtatgatcaagttccttcttatttgtgagcagttcaggctatctcctgatggggatgaggccaaggctttcttatcttttggttgtctctgcttaatggaggagcctggcctaggatggaggtctggctcagatctttcactccacctcgggaatggggttgtgatctttcctgtcctgaccccctctgaattgtaagtgtttcaatagtactcttgattgtatgccatgttgttgaagtaaatgaattatttttaaatgttaagtaaataaaccttagcccatctactgtt

SEQ ID NO: 39632 - DNA, 3705 bp, Artificial Sequence
  derived and/or modified sequence
atgaaggaggaggtgaagggcatccctgtgcgggtggccctgcgctgccggcccctggtgcccaaggagatcagcgagggctgccagatgtgcctgagctttgtgcctggagagacccaggtggtggtgggcacagacaagagcttcacctatgactttgtgtttgacccctgcacagagcaggaggaggtgttcaacaaggctgtggcccccctcatcaagggcatcttcaagggctacaatgccaccgtgctggcctacggccagacaggcagcggcaagacctacagcatgggcggggcctacacagctgagcaggagaatgagcccaccgtgggcatcatccccagggtcatccagctgctcttcaaggagattgacaagaagagtgactttgagttcaccctgaaggtgtcctacctggagatctacaatgaggagatcctggacctgctgtgccccagccgggagaaggcccagatcaacatccgggaggaccccaaggagggcatcaagatcgtgggcctgacagagaagacagtgctggtggccctggacacagtgtcctgcctggagcagggcaacaacagcaggacagtggccagcacagccatgaacagccagagcagccgcagccacgccatcttcaccatcagcattgagcagaggaagaagagtgacaagaactgcagcttccgcagcaagctgcacctggtggacctggccggcagcgagcggcagaagaagaccaaggccgagggggaccggctgaaggagggcatcaacatcaacagaggcctgctgtgcctgggcaatgtcatcagcgccctgggagatgacaagaagggcagctttgtgccctacagagacagcaagctgacccggctgctgcaggacagcctgggcggcaacagccacaccctgatgattgcctgtgtgtccccagctgacagcaacctggaggagaccctgagcaccctgcgctatgctgaccgggccaggaagatcaagaacaagcccatcgtgaacatcgacccccacacagctgagctgaaccacctgaagcagcaggtgcagcagctgcaggtgctgctgctgcaggcccatggaggcaccctgcccggcagcatcaatgctgagcccagcgagaacctgcagagcctgatggagaagaaccagagcctggtggaggagaatgagaagctgagccgctgcctgagcaaggccgccggccagacagcccagatgctggagcgcatcatcctgacagagcaggtgaatgagaagctgaatgccaagctggaggagctgcggcagcacgtggcctgcaagctggacctgcagaagctggtggagaccctggaggaccaggagctgaaggaaaatgtggagatcatctgcaacctgcagcagctgatcacccagctgagtgatgagaccgtggcctgcacagctgctgccatcgacacagctgtggaggaggaggcccaggtggagaccagccctgagaccagccgcagcagtgatgccttcaccacccagcacgccctgcaccaggcccagatgagcaaggaggtggtggagctgaacaatgccctggccctgaaggaggccctggtgaggaagatgacccagaatgacaaccagctgcagcccatccagttccagtaccaggacaacatcaagaacctggagctggaggtgatcaacctgcagaaggagaaggaggagctggtgcgggagctgcagacagccaagaagaatgtgaaccaggccaagctgtctgagcaccgccacaagctgctgcaggagctggagggccagattgctgacctgaagaagaagctgaatgagcagagcaagctgctgaagctgaaggagagcacagagaggacagtgtccaagctgaaccaggagatctggatgatgaagaaccagagggtgcagctgatgaggcagatgaaggaggatgctgagaagttccggcagtggaagcagaagaaggacaaggaggtgatccagctgaaggagcgggacaggaagaggcagtatgagctgctgaagctggagaggaacttccagaagcagagctctgtgctgcggaggaagacagaggaggccgctgctgccaacaagaggctgaaggatgccctgcagaagcagcgggaggtgacagacaagaggaaggagacccagagccacggcaaggagggcattgctgcccgggtgaggaactggctgggcaatgaaattgaggtgatggtgtccacagaggaggccaagaggcacctgaatgacctgctggaggacaggaagatcctggcccaggatgtggtgcagctgaaggagaagaaggagagcagagaaaatcctccacccaagctgaggaagtgcaccttcagcctgtctgaggtgcacggccaggtgctggagagcgaggactgcatcaccaagcagatcgagagcctggagacagagatggagctgcggagcgcccagattgctgacctgcagcagaagctgctggatgctgagagtgaagatcggcccaagcagtgctgggagaacatcgccaccatcctggaggccaagtgtgccctgaagtacctgattggagagctggtgagcagcaagatccacgtgaccaagctggagaacagcctgcggcagagcaaggccagctgtgccgacatgcagaagatgctgtttgaggagcagaaccacttcagcgagattgaaacagagctgcaggccgagctggtgaggatggagcagcagcaccaggagaaggtgctgtacctggtgtcccagctgcaggagagccagatggccgagaagcagctggagaagagcgccagcgagaaggagcagcagctggtgtccaccctgcagtgccaggatgaggagctggagaagatgagggaggtgtgtgagcagaaccagcagctgctgcaggagaatgagatcatcaagcagaagctgatcctgctgcaggtggccagccggcagaagcacctgcccaatgacaccctgctgagcccagacagcagctttgagtacatcccccccaagcccaagcccagccgggtgaaggagaagttcctggagcagagcatggacatcgaggacctgaagtactgcagcgagcacagcgtgaatgaacatgaagatggagatggagatggagacagtgatgaaggagatgatgaggagtggaagcccaccaagctggtgaaggtgtccaggaagaacatccagggctgcagctgcaagggctggtgtggcaacaagcagtgtggctgcaggaagcagaagagtgactgtggggtggactgcagctgtgaccccaccaagtgcaggaaccggcagcagggcaaggacagcctgggcaccgtggagcagacccaggacagcgagggcagcttcaagctggaggaccccacagaggtgaccccaggcctgtccttcttcaaccctgtgtgtgccacccccaacagcaagatcctgaaggagatgtgtgacatggagcaggtgctgagcaagaagacagccccagcccccagcccctttgacctgcctgagagcaagcatggagccacagagtaccagcagaacaagcccccaggcaagaagaagaagagggccctggccagcaacaccagcttcttcagcggctgcagccccatcgaggaggaggcccactag

SEQ ID NO: 39633 - DNA, 3705 bp, Artificial Sequence
  derived and/or modified sequence
atgaaggaggaggtgaagggcatccccgtgcgggtggccctgcggtgccggccactcgtgcccaaggagatcagtgagggctgtcagatgtgtctgtcttttgtgcctggcgaaactcaagtcgttgtcggaacggacaaatccttcacgtacgattttgtctttgacccctgcacggagcaggaggaagtatttaacaaagcagttgccccgctgatcaaaggaatattcaagggatacaacgctactgtgttagcatacggacagactggctcaggtaaaacttacagtatgggaggcgcgtatactgccgagcaggagaatgaaccgacagtcggtatcattccccgcgtcattcagctgttatttaaggagattgataagaagtcagattttgagtttaccctgaaagtgtcctacctcgaaatttacaatgaggaaatcctcgacctcttatgtccttcccgggagaaagcacaaattaatattagagaggaccccaaggaagggatcaagattgtgggcttgaccgagaaaaccgtgctggtggctctggacacggtttcttgcttggagcaaggcaataattcaagaaccgttgcgtcaacagccatgaactcccagtccagccgctcacacgcgatcttcacaatcagtattgaacagcggaaaaaatcagataaaaactgtagctttcgatccaagctgcaccttgtagacttggccgggagcgagcgccagaaaaagactaaagctgagggcgatcggctaaaagagggaattaacatcaaccgcggcctgctttgcctgggcaatgtgatatcagcactgggcgatgataaaaagggaagctttgtgccttatcgcgactcaaagcttactcgtttgctacaggattctctgggcggcaattcccacactctgatgatcgcttgtgtaagtccagcagatagcaacctggaagaaacactgagtacgctgcgctacgcagacagggcccgcaaaatcaaaaacaagcccatcgtaaacatcgaccctcatacagctgagctgaaccatttaaagcaacaggtgcagcaactgcaggttctcctgctccaagcacacgggggcacactgcctggctctatcaatgccgaaccttctgagaacctacaaagcttgatggaaaaaaaccagagtctcgtggaagaaaatgaaaaattgtcacggtgcctttccaaggccgccggacagactgctcagatgctagagagaattatcctgacggagcaagttaatgaaaagctaaatgccaagctggaggaactgcgtcaacacgtggcctgtaagctcgacctccagaagctggtggaaaccttggaagaccaagagctgaaggaaaatgtcgagataatctgtaacttacagcagttaattacccaactgtccgatgaaaccgtcgcctgtactgcagcagcgatcgacacggcggtagaggaagaagcccaggtagagacttctccggagaccagtcgaagtagtgatgcctttacaacacagcacgcccttcaccaagcgcaaatgagcaaagaagtggtggagctgaacaatgctttggcactgaaggaggcacttgttcgaaaaatgacacagaatgacaatcagctacagcctatccagtttcagtatcaggacaacatcaaaaaccttgagcttgaggttataaatctccagaaggagaaagaagagttagttagggagctgcaaacagctaaaaagaatgtgaatcaggctaagctgagcgagcaccggcacaagctcctacaggaactagaagggcagatcgcggacctgaagaaaaagctcaacgaacaatccaagctcttgaagctgaaggaaagtacagaacgcaccgtgtcaaaactgaatcaagagatctggatgatgaaaaaccagcgtgtgcagctaatgcggcagatgaaggaagatgcagagaaattcaggcaatggaaacagaaaaaggacaaggaagtgatccagctgaaggaaagagaccgcaaacgccagtatgagctgctcaaattagaaaggaacttccaaaagcaatccagtgtcctgaggcggaaaacggaggaggccgccgcagccaataagcggcttaaggatgccctgcagaagcaacgggaagttactgacaagcggaaggagactcagtctcatggcaaagaaggaattgccgctcgggtgcgaaattggctagggaatgagattgaagttatggtgagtacagaggaggcgaagagacacctgaacgacttgctggaagatcgaaagattctcgcccaggatgttgtgcagctgaaggagaaaaaggagtcccgggaaaacccacctcctaagctgcgcaagtgtactttttctctgtctgaggtccatggccaggtcctcgaaagcgaagattgcatcacgaaacagatcgaatctcttgagacagaaatggaacttcgcagtgcacagatagccgacctccagcagaaactgcttgacgctgagagcgaggatcggccaaaacagtgctgggagaatatcgctaccattctggaggcaaaatgcgcccttaaatatttaattggagaactagtctctagtaaaatccatgttactaagcttgaaaattcactgcgccaatcaaaggcttcatgtgcagatatgcaaaagatgctattcgaggagcagaatcatttcagcgagatcgaaacagagctgcaggctgaattggtccgaatggagcagcagcatcaggagaaagtactgtatctggttagtcaacttcaagagtcacagatggctgagaagcagctcgaaaaatctgcctctgagaaggagcagcaactcgtcagtactcttcagtgccaggatgaggagctggaaaagatgagagaagtatgcgaacagaatcagcagctgctgcaggaaaacgaaatcataaagcagaaactgatcctgttacaggtggcatccagacagaagcacctgcctaatgatacactgcttagccccgatagctccttcgagtacatccccccaaagccaaaacctagtagagtcaaagaaaagtttcttgagcagtcaatggatattgaagatctcaagtattgcagtgagcactcagttaatgaacatgaggatggcgacggggatggcgatagcgacgagggagacgatgaggaatggaagccaacaaaactggtgaaagtgagtcggaagaacattcagggttgtagctgtaagggatggtgcggcaacaagcagtgcgggtgccgcaaacagaaatctgattgcggcgttgattgcagctgcgaccccacaaaatgcaggaatcggcagcagggcaaggattcattgggcaccgtggaacagacacaggatagtgaaggatcattcaagctagaagaccctactgaagttaccccgggccttagcttcttcaatccagtttgtgccacacccaacagcaagatcctgaaggagatgtgcgacatggagcaggtcttatccaagaagacagctccagcaccctcaccattcgacctgccggaatccaagcatggggcaacagagtaccagcagaataaaccccctggcaagaagaaaaagcgggccctcgccagtaataccagtttctttagcggatgttctcctattgaagaagaagctcattag

SEQ ID NO: 39634 - DNA, 3705 bp, Artificial Sequence
  derived and/or modified sequence
atgaaagaagaggtgaagggcattcctgttcgcgtggccttgaggtgccggccactcgtgcccaaagagattagtgagggctgtcagatgtgcctgtcattcgtgccaggggagactcaggtggtagtcgggaccgacaagtcattcacctatgatttcgtgtttgatccctgtacagaacaggaagaggtctttaacaaggcagtggcacctctcatcaagggaatttttaaaggctacaatgctaccgtgctggcatatggtcagaccggcagcggcaagacttacagcatgggcggtgcctacacagcagagcaggaaaacgagccaaccgtgggtatcatccccagagttattcagctcttatttaaagagatagacaaaaagtccgactttgagtttacgttaaaggtatcttacctagagatatataatgaagagatactggatctgttatgtccatctcgcgagaaggcacagatcaacatccgcgaggaccccaaagaaggcattaagatagtgggtctgaccgagaagaccgtgctggttgcccttgatactgtatcttgcctggagcagggcaacaatagtagaaccgtggccagtaccgcaatgaactctcagtcttctcggagtcatgccatttttaccatttctattgaacaacgtaaaaaatcagacaagaactgcagcttcaggagcaagcttcacctggttgatctggctgggtcggagcggcaaaaaaagaccaaagctgagggagatcgattgaaggagggcatcaacattaaccgaggactcctctgcttggggaatgtgatttctgctttgggcgatgataaaaaaggctcctttgtgccctacagggactctaaactgactcgtctcctgcaggacagtctggggggtaactctcatacactcatgatcgcctgcgtgtcacctgcagacagcaaccttgaggagaccctgagtactttacggtacgccgatcgggcaagaaaaatcaagaacaagcccattgtaaatattgatcctcatacagctgagctgaatcatctcaagcagcaggtccagcagctccaagtgctcctgctgcaggcccacggaggcactctgcccggatccataaacgccgagccatcagagaacctgcagtcattaatggaaaaaaaccagtcattagtagaggaaaacgagaagctttcaaggtgcctttctaaagctgccggtcagacggctcaaatgctcgaacgaatcattttgaccgagcaggtgaacgaaaaattaaatgctaaactcgaagagctcagacagcatgtcgcctgcaaactggatctccagaagcttgtcgagaccctggaggatcaggaattgaaggaaaacgtggaaatcatctgtaacctccaacagctcatcacccagcttagcgatgagactgtggcatgcaccgcagccgcaattgatacagcggtcgaggaggaggcacaggtggagacctcccctgaaacgtctagatcaagcgatgccttcaccacacagcacgccctccatcaggcgcaaatgagcaaggaggtggtggaactgaacaatgcactcgctctgaaagaggcactggtccgaaagatgacccagaacgataaccagcttcagcctatccaattccagtaccaggacaatatcaagaatctcgagttagaagtgatcaacctgcagaaggagaaggaagagttggtgcgggagttgcagacggccaagaagaacgtcaaccaggcgaagctgagtgagcacaggcataaactcctgcaggagctggagggacagatcgctgacctcaagaagaaactgaatgagcaatcaaaactgctgaaacttaaggagtcaaccgagcggactgtgagcaaattgaatcaggaaatctggatgatgaaaaatcagcgggtccagctgatgaggcaaatgaaagaagatgccgagaagttcagacagtggaagcagaagaaagataaggaggttatacagctgaaggagcgggaccggaagcgccagtacgagttgctgaagttagaacggaatttccagaaacaatctagtgttctgcgcagaaaaactgaggaagccgcagccgctaacaaaagacttaaggatgcacttcagaaacagagggaagtgaccgataagcgaaaggaaacacaaagccatggtaaggaaggcattgccgctagagtcaggaattggcttggaaatgagattgaagtcatggtctccaccgaagaggctaaacgtcacctgaacgatctattggaagatcgtaagatcctggctcaggatgtggtccagcttaaggaaaaaaaagagtcaagggaaaacccccctcccaagctccgtaaatgcacgttctcattgtcagaagtacatggtcaagttttggaatccgaagactgcattacaaagcaaatcgaatctctggagacggaaatggagctaaggagcgctcagattgccgacctgcaacagaaactgttggatgcagagagtgaggatcgcccaaagcagtgctgggaaaatattgccacaattttagaggctaaatgcgccctgaagtacctgataggcgaattggtttccagtaagatccatgtgacgaagctggaaaattccctaagacagagcaaagcctcttgtgctgacatgcagaaaatgctgttcgaggagcagaaccacttttccgagatagagaccgaattacaggctgagctggtacgcatggaacagcaacatcaggaaaaagtgctctacttggtttctcagttacaggagagccaaatggctgaaaagcaacttgagaagtccgctagcgagaaggaacagcagctggtatccaccctgcagtgtcaggacgaggaactcgaaaagatgagagaggtgtgcgaacagaaccaacaactgctgcaggagaacgagataatcaagcagaaactaatcctgctgcaggtcgcaagccgtcaaaagcatctaccaaatgatactctgttgtcaccagactctagcttcgagtatataccaccaaagcctaagccttctagagtgaaggagaaattcttggagcagagtatggatattgaggaccttaagtactgctccgagcacagcgtaaacgagcatgaggatggagacggggatggagattcagatgaaggagacgacgaagaatggaagcctacaaagctggtcaaagttagccggaaaaatattcaggggtgttcttgtaaaggctggtgcgggaataaacaatgtgggtgcagaaagcaaaagagcgactgcggagttgactgctcctgtgatcctaccaagtgtcgcaacagacagcagggcaaggacagcctgggcacagttgagcagacacaggactctgaaggatctttcaagcttgaggatcctaccgaggtgacaccaggcctctccttctttaatccagtttgcgccacgcctaatagtaagatattaaaagagatgtgtgacatggaacaggtattgtccaaaaaaactgctcccgctccgtcccctttcgaccttccagagagcaaacacggggctacagagtaccaacagaataagcctcctgggaaaaaaaagaagcgcgctttagcgtcaaacactagtttcttttctgggtgtagtcccattgaagaagaggcacattag

SEQ ID NO: 39635 - DNA, 3705 bp, Artificial Sequence
  derived and/or modified sequence
atgaaggaggaggtgaagggcatccccgtgagagtggccctgagatgcagacccctggtgcccaaggagatcagcgagggctgccagatgtgcctgagcttcgtgcccggcgagacccaggtggtggtgggcaccgacaagagcttcacctacgacttcgtgttcgacccctgcaccgagcaggaggaggtgttcaacaaggccgtggcccccctgatcaagggcatcttcaagggctacaacgccaccgtgctggcctacggccagaccggcagcggcaagacctacagcatgggcggcgcctacaccgccgagcaggagaacgagcccaccgtgggcatcatccccagagtgatccagctgctgttcaaggagatcgacaagaagagcgacttcgagttcaccctgaaggtgagctacctggagatctacaacgaggagatcctggacctgctgtgccccagcagagagaaggcccagatcaacatcagagaggaccccaaggagggcatcaagatcgtgggcctgaccgagaagaccgtgctggtggccctggacaccgtgagctgcctggagcagggcaacaacagcagaaccgtggccagcaccgccatgaacagccagagcagcagaagccacgccatcttcaccatcagcatcgagcagagaaagaagagcgacaagaactgcagcttcagaagcaagctgcacctggtggacctggccggcagcgagagacagaagaagaccaaggccgagggcgacagactgaaggagggcatcaacatcaacagaggcctgctgtgcctgggcaacgtgatcagcgccctgggcgacgacaagaagggcagcttcgtgccctacagagacagcaagctgaccagactgctgcaggacagcctgggcggcaacagccacaccctgatgatcgcctgcgtgagccccgccgacagcaacctggaggagaccctgagcaccctgagatacgccgacagagccagaaagatcaagaacaagcccatcgtgaacatcgacccccacaccgccgagctgaaccacctgaagcagcaggtgcagcagctgcaggtgctgctgctgcaggcccacggcggcaccctgcccggcagcatcaacgccgagcccagcgagaacctgcagagcctgatggagaagaaccagagcctggtggaggagaacgagaagctgagcagatgcctgagcaaggccgccggccagaccgcccagatgctggagagaatcatcctgaccgagcaggtgaacgagaagctgaacgccaagctggaggagctgagacagcacgtggcctgcaagctggacctgcagaagctggtggagaccctggaggaccaggagctgaaggagaacgtggagatcatctgcaacctgcagcagctgatcacccagctgagcgacgagaccgtggcctgcaccgccgccgccatcgacaccgccgtggaggaggaggcccaggtggagaccagccccgagaccagcagaagcagcgacgccttcaccacccagcacgccctgcaccaggcccagatgagcaaggaggtggtggagctgaacaacgccctggccctgaaggaggccctggtgagaaagatgacccagaacgacaaccagctgcagcccatccagttccagtaccaggacaacatcaagaacctggagctggaggtgatcaacctgcagaaggagaaggaggagctggtgagagagctgcagaccgccaagaagaacgtgaaccaggccaagctgagcgagcacagacacaagctgctgcaggagctggagggccagatcgccgacctgaagaagaagctgaacgagcagagcaagctgctgaagctgaaggagagcaccgagagaaccgtgagcaagctgaaccaggagatctggatgatgaagaaccagagagtgcagctgatgagacagatgaaggaggacgccgagaagttcagacagtggaagcagaagaaggacaaggaggtgatccagctgaaggagagagacagaaagagacagtacgagctgctgaagctggagagaaacttccagaagcagagcagcgtgctgagaagaaagaccgaggaggccgccgccgccaacaagagactgaaggacgccctgcagaagcagagagaggtgaccgacaagagaaaggagacccagagccacggcaaggagggcatcgccgccagagtgagaaactggctgggcaacgagatcgaggtgatggtgagcaccgaggaggccaagagacacctgaacgacctgctggaggacagaaagatcctggcccaggacgtggtgcagctgaaggagaagaaggagagcagagagaaccccccccccaagctgagaaagtgcaccttcagcctgagcgaggtgcacggccaggtgctggagagcgaggactgcatcaccaagcagatcgagagcctggagaccgagatggagctgagaagcgcccagatcgccgacctgcagcagaagctgctggacgccgagagcgaggacagacccaagcagtgctgggagaacatcgccaccatcctggaggccaagtgcgccctgaagtacctgatcggcgagctggtgagcagcaagatccacgtgaccaagctggagaacagcctgagacagagcaaggccagctgcgccgacatgcagaagatgctgttcgaggagcagaaccacttcagcgagatcgagaccgagctgcaggccgagctggtgagaatggagcagcagcaccaggagaaggtgctgtacctggtgagccagctgcaggagagccagatggccgagaagcagctggagaagagcgccagcgagaaggagcagcagctggtgagcaccctgcagtgccaggacgaggagctggagaagatgagagaggtgtgcgagcagaaccagcagctgctgcaggagaacgagatcatcaagcagaagctgatcctgctgcaggtggccagcagacagaagcacctgcccaacgacaccctgctgagccccgacagcagcttcgagtacatcccccccaagcccaagcccagcagagtgaaggagaagttcctggagcagagcatggacatcgaggacctgaagtactgcagcgagcacagcgtgaacgagcacgaggacggcgacggcgacggcgacagcgacgagggcgacgacgaggagtggaagcccaccaagctggtgaaggtgagcagaaagaacatccagggctgcagctgcaagggctggtgcggcaacaagcagtgcggctgcagaaagcagaagagcgactgcggcgtggactgcagctgcgaccccaccaagtgcagaaacagacagcagggcaaggacagcctgggcaccgtggagcagacccaggacagcgagggcagcttcaagctggaggaccccaccgaggtgacccccggcctgagcttcttcaaccccgtgtgcgccacccccaacagcaagatcctgaaggagatgtgcgacatggagcaggtgctgagcaagaagaccgcccccgcccccagccccttcgacctgcccgagagcaagcacggcgccaccgagtaccagcagaacaagccccccggcaagaagaagaagagagccctggccagcaacaccagcttcttcagcggctgcagccccatcgaggaggaggcccactag

SEQ ID NO: 39636 - protein, 330 aa, Artificial Sequence
  derived and/or modified sequence
MELLSTPHSIEINNITCDSFRISWAMEDSDLERVTHYFIDLNKKENKNSNKFKHRDVPTKLVAKAVPLPMTVRGHWFLSPRTEYSVAVQTAVKQSDGEYLVSGWSETVEFCTGDYAKEHLAQLQEKAEQIAGRMLRFSVFYRNHHKEYFQHARTHCGNMLQPYLKDNSGSHGSPTSGMLHGVFFSCNTEFNTGQPPQDSPYGRWRFQIPAQRLFNPSTNLYFADFYCMYTAYHYAILVLAPKGSLGDRFCRDRLPLLDIACNKFLTCSVEDGELVFRHAQDLILEIIYTEPVDLSLGTLGEISGHQLMSLSTADAKKDPSCKTCNISVGR

SEQ ID NO: 39637 - protein, 237 aa, Artificial Sequence
  derived and/or modified sequence
MELLSTPHSIEINNITCDSFRISWAMEDSDLERVTHYFIDLNKKENKNSNHHKEYFQHARTHCGNMLQPYLKDNSGSHGSPTSGMLHGVFFSCNTEFNTGQPPQDSPYGRWRFQIPAQRLFNPSTNLYFADFYCMYTAYHYAILVLAPKGSLGDRFCRDRLPLLDIACNKFLTCSVEDGELVFRHAQDLILEIIYTEPVDLSLGTLGEISGHQLMSLSTADAKKDPSCKTCNISVGR

SEQ ID NO: 39638 - DNA, 993 bp, Artificial Sequence
  derived and/or modified sequence
atggagctgctgagcaccccccacagcatcgagatcaacaacatcacctgcgacagcttcagaatcagctgggccatggaggacagcgacctggagagagtgacccactacttcatcgacctgaacaagaaggagaacaagaacagcaacaagttcaagcacagagacgtgcccaccaagctggtggccaaggccgtgcccctgcccatgaccgtgagaggccactggttcctgagccccagaaccgagtacagcgtggccgtgcagaccgccgtgaagcagagcgacggcgagtacctggtgagcggctggagcgagaccgtggagttctgcaccggcgactacgccaaggagcacctggcccagctgcaggagaaggccgagcagatcgccggcagaatgctgagattcagcgtgttctacagaaaccaccacaaggagtacttccagcacgccagaacccactgcggcaacatgctgcagccctacctgaaggacaacagcggcagccacggcagccccaccagcggcatgctgcacggcgtgttcttcagctgcaacaccgagttcaacaccggccagcccccccaggacagcccctacggcagatggagattccagatccccgcccagagactgttcaaccccagcaccaacctgtacttcgccgacttctactgcatgtacaccgcctaccactacgccatcctggtgctggcccccaagggcagcctgggcgacagattctgcagagacagactgcccctgctggacatcgcctgcaacaagttcctgacctgcagcgtggaggacggcgagctggtgttcagacacgcccaggacctgatcctggagatcatctacaccgagcccgtggacctgagcctgggcaccctgggcgagatcagcggccaccagctgatgagcctgagcaccgccgacgccaagaaggaccccagctgcaagacctgcaacatcagcgtgggcagatag

SEQ ID NO: 39639 - DNA, 714 bp, Artificial Sequence
  derived and/or modified sequence
atggagctgctgagcaccccccacagcatcgagatcaacaacatcacctgcgacagcttcagaatcagctgggccatggaggacagcgacctggagagagtgacccactacttcatcgacctgaacaagaaggagaacaagaacagcaaccaccacaaggagtacttccagcacgccagaacccactgcggcaacatgctgcagccctacctgaaggacaacagcggcagccacggcagccccaccagcggcatgctgcacggcgtgttcttcagctgcaacaccgagttcaacaccggccagcccccccaggacagcccctacggcagatggagattccagatccccgcccagagactgttcaaccccagcaccaacctgtacttcgccgacttctactgcatgtacaccgcctaccactacgccatcctggtgctggcccccaagggcagcctgggcgacagattctgcagagacagactgcccctgctggacatcgcctgcaacaagttcctgacctgcagcgtggaggacggcgagctggtgttcagacacgcccaggacctgatcctggagatcatctacaccgagcccgtggacctgagcctgggcaccctgggcgagatcagcggccaccagctgatgagcctgagcaccgccgacgccaagaaggaccccagctgcaagacctgcaacatcagcgtgggcagatag

SEQ ID NO: 39640 - DNA, 993 bp, Artificial Sequence
  derived and/or modified sequence
atggagctgttgtctacgccgcattccatcgagattaataacattacatgcgacagctttagaatctcttgggccatggaggacagtgacctcgaacgggtgacgcactacttcatagatttgaataaaaaggagaataaaaatagcaacaagttcaaacatcgagacgtgcccacgaagttggtcgctaaggccgtgcccctacctatgaccgtgcgtggccactggtttttgagcccacgcaccgaatactctgtggccgttcagacggctgtgaaacaaagtgacggtgagtatctggttagcgggtggtccgagacagtggagttctgcacaggagactatgctaaggagcatcttgcccaactgcaggagaaagcagagcaaatcgccggcaggatgcttcgcttctccgtgttctatcgcaaccatcataaagagtacttccaacatgctcgaacacactgcggaaacatgctgcagccttacctgaaggacaactcgggtagccacgggagcccaacaagtgggatgctgcatggtgtcttttttagctgtaacaccgagttcaataccggtcagccgccccaggattcaccatatgggaggtggcgtttccaaatccctgctcaacgtctgtttaatcccagcacaaacctgtacttcgccgatttttactgcatgtacacggcataccactacgccatcctagttctggcgcccaaaggaagcctcggcgacagattttgccgagatagactgccccttctcgatattgcttgtaacaagttccttacttgctctgtggaggatggggagctcgtgttccgtcatgcccaggatttgatcctggaaattatttatactgaacccgtggacctgagcttaggtaccttgggggagataagcgggcaccaactgatgtcgctgtccaccgctgatgctaagaaagacccttcctgcaaaacgtgcaacattagtgtgggcagatag

SEQ ID NO: 39641 - DNA, 714 bp, Artificial Sequence
  derived and/or modified sequence
atggaactcctgtctacgccccactccatagaaattaataacataacgtgcgatagttttcgaatttcctgggctatggaggattctgaccttgaacgggtgacccattatttcattgacctgaataaaaaggagaacaagaattctaatcaccacaaagaatattttcagcacgcccgcactcattgtggcaatatgcttcagccctaccttaaagataactccgggtctcacggatcaccaacaagtgggatgctccatggcgtgtttttctcttgcaacactgagttcaacacaggccagcctccccaggatagtccatatggcagatggcgcttccagatacccgcgcaaaggctgtttaatccctccacaaacctctattttgctgatttttactgtatgtataccgcctaccactacgcaatactggttcttgcaccaaaaggatccctcggtgatcgcttctgtcgggatcgacttcctctgttagatattgcgtgtaataaattccttacctgcagcgtcgaggatggggaattagtcttccggcatgcacaagacctgatcctggaaatcatctacactgagcccgtcgatctgagtctgggcacccttggggagatctccggccatcagctgatgagcttatcaacagcggacgcaaagaaggatccttcttgcaagacctgcaatatttctgtcggccggtag

SEQ ID NO: 39642 - DNA, 993 bp, Artificial Sequence
  derived and/or modified sequence
atggaattactttctacgccacacagtattgagattaataacatcacctgcgattctttcaggatatcatgggcgatggaggatagtgacctggagcgcgttacccactacttcatcgatctgaacaagaaagaaaacaaaaatagcaacaagtttaaacaccgcgacgtccccactaagttggtagccaaggctgtcccgcttccgatgacagtgagaggacattggtttttatctcctcgcaccgagtattctgtggccgtgcagactgctgtgaaacagagcgatggcgaatacctagtatctggatggagcgagaccgtagagttctgcaccggggactatgctaaggagcatttggcccagcttcaggaaaaagcggagcagatcgctggtaggatgcttaggttctccgtgttctaccgcaaccaccacaaggaatacttccaacatgctaggacccactgtgggaacatgctccaaccctacctaaaggacaactctggatctcatgggagccccacatctggcatgttgcatggtgtattcttctcctgcaataccgagttcaacacaggccagcccccacaggattcgccttacggcaggtggagattccagattcccgcccagaggctcttcaacccaagtactaacctctacttcgccgatttctattgtatgtataccgcttatcactacgccatactggtgttggcccccaagggatctttgggggatcgcttctgccgtgatcgactgccattgctggacattgcctgtaataagttcttgacctgtagcgtggaggatggagagctggtcttccgccacgcacaagatttgattctagaaatcatctatacagaacctgtcgatctgagcctggggacactgggcgaaatcagtggccaccagctgatgagcctgtccaccgccgacgcaaagaaggatcccagctgtaagacctgtaacatctcagtaggacgttag

SEQ ID NO: 39643 - DNA, 993 bp, Artificial Sequence
  derived and/or modified sequence
atggagctgctgagcaccccccacagcattgagatcaacaacatcacctgtgacagcttccgcatctcctgggccatggaggacagcgacctggagcgggtgacccactacttcatcgacctgaacaagaaggagaacaagaacagcaacaagttcaagcacagagatgtgcccaccaagctggtggccaaggctgtgcccctgcccatgacagtgcggggccactggttcctgagccccaggacagagtacagcgtggccgtgcagacagctgtgaagcagagtgatggagagtacctggtgtctggctggagcgagaccgtggagttctgcaccggggactatgccaaggagcacctggcccagctgcaggagaaggccgagcagattgctggccgcatgctgcgcttcagcgtcttctacagaaaccaccacaaggagtacttccagcacgcccggacccactgcggcaacatgctgcagccctacctgaaggacaacagcggcagccacggcagccccaccagcggcatgctgcacggcgtcttcttcagctgcaacacagagttcaacacaggccagcccccccaggacagcccctacggccgctggaggttccagatcccagcccagaggctcttcaaccccagcaccaacctgtactttgctgacttctactgcatgtacacagcctaccactacgccatcctggtgctggcccccaagggcagcctgggggaccgcttctgccgggaccggctgcccctgctggacatcgcctgcaacaagttcctgacctgcagcgtggaggatggagagctggtgttcagacatgcccaggacctgatcctggagatcatctacacagagcctgtggacctgagcctgggcaccctgggggagatcagcggccaccagctgatgagcctgagcacagcagatgccaagaaggaccccagctgcaagacctgcaacatctctgtgggccgctag

SEQ ID NO: 39644 - DNA, 714 bp, Artificial Sequence
  derived and/or modified sequence
atggagctgctgagcaccccccacagcattgagatcaacaacatcacctgtgacagcttccgcatctcctgggccatggaggacagcgacctggagcgggtgacccactacttcatcgacctgaacaagaaggagaacaagaacagcaaccaccacaaggagtacttccagcacgcccggacccactgcggcaacatgctgcagccctacctgaaggacaacagcggcagccacggcagccccaccagcggcatgctgcatggagtcttcttcagctgcaacacagagttcaacacaggccagcccccccaggacagcccctacggccgctggaggttccagatcccagcccagaggctcttcaaccccagcaccaacctgtactttgctgacttctactgcatgtacacagcctaccactacgccatcctggtgctggcccccaagggcagcctgggggaccgcttctgccgggaccggctgcccctgctggacatcgcctgcaacaagttcctgacctgcagcgtggaggatggagagctggtgttcagacatgcccaggacctgatcctggagatcatctacacagagcctgtggacctgagcctgggcaccctgggggagatcagcggccaccagctgatgagcctgagcacagcagatgccaagaaggaccccagctgcaagacctgcaacatctctgtgggccgctag

SEQ ID NO: 39645 - DNA, 993 bp, Artificial Sequence
  derived and/or modified sequence
atggagctgctgagcaccccccacagcatcgagatcaacaacatcacgtgtgattctttcagaattagctgggccatggaggattccgacctcgaaagggtgacccattacttcatcgacttaaacaaaaaagagaacaaaaattccaataagttcaaacatcgcgatgtgcccacaaaactcgtggctaaagcagtgcctctacctatgaccgtccggggccactggttcctgtcaccaaggacagaatactctgtagccgtgcagactgccgtaaagcagagtgacggtgaatacctggtgtccgggtggagtgagacagttgaattttgtacaggcgactatgctaaagagcatctggctcagctccaagagaaggccgagcaaatcgcaggaagaatgttgagattctctgtattctatcgaaatcaccacaaagagtacttccaacatgcccggacacattgcgggaacatgctgcaaccctacctgaaggacaacagtggcagccatggatccccaaccagcggcatgcttcacggagtattcttttcttgcaacacagagtttaacaccgggcagccaccccaggatagcccgtacggccggtggcgtttccagattccagctcagagacttttcaatcccagtaccaatctctacttcgctgatttctattgtatgtatacagcatatcattacgcaatcctggtgcttgcacctaaggggagcctaggagacaggttttgcagggacagactcccattgctggacatagcctgcaataagttcttgacttgctctgtagaagatggggagctggtctttcgtcatgctcaagacctcatcctggagattatctatactgagccagttgacctatctctgggaactctaggggagatctccggacaccagctaatgtctttgtccactgcggacgccaaaaaggatccaagttgcaaaacttgtaacatctctgtaggccggtag

SEQ ID NO: 39646 - DNA, 714 bp, Artificial Sequence
  derived and/or modified sequence
atggagctgctgagcaccccccacagcatcgagatcaacaacatcacctgcgattccttcaggattagctgggcaatggaagatagtgacctggagcgcgtgacccactactttatcgacttaaataagaaggagaataaaaatagcaaccaccataaggaatacttccaacacgcacgcacacactgtggaaacatgctgcagccatacctaaaagacaactccgggtcacacgggtcgcctacctcaggcatgctgcatggagtcttcttctcctgtaacactgagttcaatacggggcaaccccctcaagactccccttacgggcggtggaggttccagattcctgcacagaggctgttcaacccgagcacaaatctgtatttcgccgatttttactgtatgtacacagcctatcactatgcaatcctcgtactcgccccaaaagggagccttggcgaccgcttctgtcgggacagactacctctcctggacatagcctgtaataaatttttaacctgtagcgtcgaagatggggaactggtgttcaggcatgctcaggatctcatcctcgaaattatctatactgagcccgtcgacctctcactcgggacactgggggaaatctcggggcatcagttaatgagtcttagcacggctgatgctaagaaggacccatcttgtaagacgtgcaacatatccgtcgggagatag

SEQ ID NO: 39647 - DNA, 993 bp, Artificial Sequence
  derived and/or modified sequence
atggagctgctgagcaccccccacagcatcgagatcaacaacatcacctgcgactctttccggattagctgggcgatggaggattctgacctggaaagggttacacattacttcatcgacctgaataagaaggagaacaaaaattcaaataagtttaagcatcgggacgttccaacaaaactagttgccaaggcagtgccactccctatgacggtaagaggccactggttcctgtcaccccgcacagaatactcggtggccgtgcagaccgccgtgaaacagagcgatggagagtaccttgtgtccggttggtcggaaaccgttgagttctgtactggtgactatgctaaggagcacttagcgcaattgcaggagaaagcggaacagattgcgggcagaatgctgcgtttctccgttttttatcggaatcaccataaggagtactttcagcatgcccgcactcattgtggtaacatgcttcagccttatctgaaagataactctgggagccatggttcgcccacttctgggatgctgcatggagtcttttttagctgcaacacagaatttaacaccggccaaccaccccaggactccccatatgggagatggcgatttcagattcccgcccagcggctgtttaacccctcaacgaacctatattttgcagacttctattgcatgtacactgcgtaccactacgcaatcctggtcttggccccgaagggatccctgggagatcggttctgtagggataggctgcccctgctcgacattgcttgcaacaagttcttgacatgcagtgtggaagatggagaactagtgtttcgccatgcacaggatttaatcctagagatcatctacaccgaacctgtggatcttagtttgggcaccctaggcgagatttctggccaccaacttatgtctttgtccacagccgacgccaaaaaagatccttcctgcaagacttgtaatatcagtgtcgggcgttag

SEQ ID NO: 39648 - DNA, 3200 bp, Artificial Sequence
  derived and/or modified sequence
agagatttccaagtagggggtgtgttggagggacttctgagggcagcttgtcctggaagaatgggggaaaggcggcgtgtgttgctgtccctgaggacatctgtgtagctccctgggagaccctctgccctttccccctcccaccagcccggcgagcagggaccaagcctgcttattatcacctgacgctgcgcagccgctgatcccattggtggaggcagattcggtctggctctctcgttctttctcccttctctgcctctctctcctccacgctgctttgatttcgctcttgcctctcttcttgcgctgctcagctgggaacatcgtctcaccaggggcagcagcgacgcgctgcacagccagacaggagctggctgcggggcatggaagcagcctccttggcagccgggagaggagcaagcgcacgccactgcccgtgacccaggcgtccggctgctgtcccctgccggggagctcatccacgcagaggtctctccctgtcctccctgcgagcttttcctctgcagagcccagtggagccagtccccacaggagacaaccctgacgggagcatggagctgctgtccacgccccacagcattgagatcaacaacatcacctgcgactccttccgcatctcctgggccatggaggacagtgacctggagagggtcacccattacttcattgaccttaacaagaaggagaataagaattccaacaagttcaagcaccgggacgtccccaccaagctcgtggccaaggcagtgccgctgcccatgacggtgagaggccactggttcctgagcccccgcacggagtacagtgtggccgtgcagacggcagtgaagcagagcgatggggagtacctggtgtccggctggagcgagacggtggagttctgcactggggattatgccaaggagcacctggctcagcttcaggagaaagctgagcagatcgcaggccgcatgctccgcttctccgtcttctaccgcaaccatcacaaggagtacttccagcatgccaggacccactgcgggaacatgctgcagccttacctgaaggacaacagtggcagccacggctcccccaccagcggtatgctccacggggtcttcttcagctgcaacacggagttcaacacgggccagcccccgcaggactccccctacggccgctggcgcttccagatcccagctcagcgcctcttcaatcccagcaccaacctctactttgcggacttctactgcatgtacacggcctaccactacgccatcctggtgctggcgcccaaaggctccctgggggaccgcttctgccgcgaccgcctgcccctcctggacattgcttgcaacaagttcctgacctgcagcgtggaggatggggagctggtcttccgccacgcccaggacctcatcctggagatcatctacactgagcccgtcgacctgtccctgggcaccctgggggagatcagtgggcaccagctcatgagtctgtctactgccgatgccaagaaggaccccagctgcaagacctgcaacatcagcgtgggccgctagggactcctggggagctggggggcgagggagagatgagcggaaggtggaggtgggtagcccaggttcagggagctggctttctctctcctgcccccctgctccctccactctgcccagctgccctcccctcgccccttggcattggaggcaacagacggtggtcctcttggtaagtgtggcccacacccagcctggtggacatggaaaggcttctcagcctctgtagttggcagctgggctggacttctggagaacttcccctttcctctggtttccttgtcctactgttctttgcctcgtccaggtctctatctcccaaagacctgcccacctcctgggctctcccagggaagcccctctgggccaaagcccatgggtagcttggctgcctccagaagagatgcagagagctgtggggcgatctttcttagtcccactcaccccactcagggccaaccacagaatgccccctccctgctgagctgggtctctggggcttcccactccaggcctggatcccttccttctataaatagtctcctgcaccaccgtgactccctggctgctccttgccccaaagaaccctcttcctgcatgggagagctgtccctccttctccacctgcccaccgggacactccccctgctctctagaaaggaactctctttcttctcttggcactgggggcgtcaggctgtcggatgttccttccttccataccccagcataccttctccttgcttagagtgcaggggtctgagacagcagccactggggttgaggagggggaggagacccctgagacccagaggtgccccttcctcagctgggagtgggccgcctcatgctctgctggggcctggcatggaacgtgagacctgtaagctgtcccgcgggccccggcaccccgcccagctgtgcactttgctcactcgctctgccatggtgccatgactgtactgtgcccatgcgtgacctggactgtggaccctctgctgctccgcctctcccctccccactggctctgtctgctctcctgccaccctgctggccgggagcccctccccggggagttcttggtgaagtccttcccgggcctccttgtgtttttgcctcattcctactgtcacacaggtcacgagggtggactccctacaatcaacaaagcaaacagagagcctgtgggaggggctgacagcagcagccggctgtttgggggatgatggaggtgacatcaggcagaggagagtgcagcctcacagtgactttctcagaggtgacagagatgatggatgagcagctggattttcgtgatgaaggacggaagcagcagcgggccggcaaggccatacctcggtgagggacaggtggacaacggtcacctatctgtagccaggggcagttgtgtggccagctgtctctctgggatgagtcaggaggcctggaggcttggggagaggtgtggagaaggagagaacatggcccaggccctttccttccccctgtgctgacagcattgctgtgggggtggcccactgccctcccctggccctcatgtccccccggggctggggtccgcctgcctgtgctgtgcttgcgacgtgcatcaataaaccaccatggcctgagggc

SEQ ID NO: 39649 - DNA, 1466 bp, Artificial Sequence
  derived and/or modified sequence
acgctgctttgatttcgctcttgcctctcttcttgcgctgctcagctgggaacatcgtctcaccaggggcagcagcgacgcgctgcacagccagacaggagctggctgcggggcatggaagcagcctccttggcagccgggagaggagcaagcgcacgccactgcccgtgacccaggcgtccggctgctgtcccctgccggggagctcatccacgcagaggtctctccctgtcctccctgcgagcttttcctctgcagagcccagtggagccagtccccacaggagacaaccctgacgggagcatggagctgctgtccacgccccacagcattgagatcaacaacatcacctgcgactccttccgcatctcctgggccatggaggacagtgacctggagagggtcacccattacttcattgaccttaacaagaaggagaataagaattccaaccatcacaaggagtacttccagcatgccaggacccactgcgggaacatgctgcagccttacctgaaggacaacagtggcagccacggctcccccaccagcggtatgctccacggggtcttcttcagctgcaacacggagttcaacacgggccagcccccgcaggactccccctacggccgctggcgcttccagatcccagctcagcgcctcttcaatcccagcaccaacctctactttgcggacttctactgcatgtacacggcctaccactacgccatcctggtgctggcgcccaaaggctccctgggggaccgcttctgccgcgaccgcctgcccctcctggacattgcttgcaacaagttcctgacctgcagcgtggaggatggggagctggtcttccgccacgcccaggacctcatcctggagatcatctacactgagcccgtcgacctgtccctgggcaccctgggggagatcagtgggcaccagctcatgagtctgtctactgccgatgccaagaaggaccccagctgcaagacctgcaacatcagcgtgggccgctagggactcctggggagctggggggcgagggagagatgagcggaaggtggaggtgggtagcccaggttcagggagctggctttctctctcctgcccccctgctccctccactctgcccagctgccctcccctcgccccttggcattggaggcaacagacggtggtcctcttggtaagtgtggcccacacccagcctggtggacatggaaaggcttctcagcctctgtagttggcagctgggctggacttctggagaacttcccctttcctctggtttccttgtcctactgttctttgcctcgtccaggtctctatctcccaaagacctgcccacctcctgggctctcccagggaagcccctctgggccaaagcccatgggtagcttggctgcctccagaagagatgcagagagctgtggggcgatctttcttagtcccactcaccccactca

SEQ ID NO: 39650 - DNA, 3094 bp, Artificial Sequence
  derived and/or modified sequence
ttctttctcccttctctgcctctctctcctccacgctgctttgatttcgctcttgcctctcttcttgcgctgctcagctgggaacatcgtctcaccaggggcagcagcgacgcgctgcacagccagacaggagctggctgcggggcatggaagcagcctccttggcagccgggagaggagcaagcgcacgccactgcccgtgacccaggcgtccggctgctgtcccctgccggggagctcatccacgcagaggtctctccctgtcctccctgcgagcttttcctctgcagagcccagtggagccagccatgtaccgcggcaacgcttgctgaccccagtgaggagagaggcctgaatccgagggccctggcacctgtgagctcttggctgtcacctgccccaagcctcgcacctccgctccacagcagtccccacaggagacaaccctgacgggagcatggagctgctgtccacgccccacagcattgagatcaacaacatcacctgcgactccttccgcatctcctgggccatggaggacagtgacctggagagggtcacccattacttcattgaccttaacaagaaggagaataagaattccaacaagttcaagcaccgggacgtccccaccaagctcgtggccaaggcagtgccgctgcccatgacggtgagaggccactggttcctgagcccccgcacggagtacagtgtggccgtgcagacggcagtgaagcagagcgatggggagtacctggtgtccggctggagcgagacggtggagttctgcactggggattatgccaaggagcacctggctcagcttcaggagaaagctgagcagatcgcaggccgcatgctccgcttctccgtcttctaccgcaaccatcacaaggagtacttccagcatgccaggacccactgcgggaacatgctgcagccttacctgaaggacaacagtggcagccacggctcccccaccagcggtatgctccacggggtcttcttcagctgcaacacggagttcaacacgggccagcccccgcaggactccccctacggccgctggcgcttccagatcccagctcagcgcctcttcaatcccagcaccaacctctactttgcggacttctactgcatgtacacggcctaccactacgccatcctggtgctggcgcccaaaggctccctgggggaccgcttctgccgcgaccgcctgcccctcctggacattgcttgcaacaagttcctgacctgcagcgtggaggatggggagctggtcttccgccacgcccaggacctcatcctggagatcatctacactgagcccgtcgacctgtccctgggcaccctgggggagatcagtgggcaccagctcatgagtctgtctactgccgatgccaagaaggaccccagctgcaagacctgcaacatcagcgtgggccgctagggactcctggggagctggggggcgagggagagatgagcggaaggtggaggtgggtagcccaggttcagggagctggctttctctctcctgcccccctgctccctccactctgcccagctgccctcccctcgccccttggcattggaggcaacagacggtggtcctcttggtaagtgtggcccacacccagcctggtggacatggaaaggcttctcagcctctgtagttggcagctgggctggacttctggagaacttcccctttcctctggtttccttgtcctactgttctttgcctcgtccaggtctctatctcccaaagacctgcccacctcctgggctctcccagggaagcccctctgggccaaagcccatgggtagcttggctgcctccagaagagatgcagagagctgtggggcgatctttcttagtcccactcaccccactcagggccaaccacagaatgccccctccctgctgagctgggtctctggggcttcccactccaggcctggatcccttccttctataaatagtctcctgcaccaccgtgactccctggctgctccttgccccaaagaaccctcttcctgcatgggagagctgtccctccttctccacctgcccaccgggacactccccctgctctctagaaaggaactctctttcttctcttggcactgggggcgtcaggctgtcggatgttccttccttccataccccagcataccttctccttgcttagagtgcaggggtctgagacagcagccactggggttgaggagggggaggagacccctgagacccagaggtgccccttcctcagctgggagtgggccgcctcatgctctgctggggcctggcatggaacgtgagacctgtaagctgtcccgcgggccccggcaccccgcccagctgtgcactttgctcactcgctctgccatggtgccatgactgtactgtgcccatgcgtgacctggactgtggaccctctgctgctccgcctctcccctccccactggctctgtctgctctcctgccaccctgctggccgggagcccctccccggggagttcttggtgaagtccttcccgggcctccttgtgtttttgcctcattcctactgtcacacaggtcacgagggtggactccctacaatcaacaaagcaaacagagagcctgtgggaggggctgacagcagcagccggctgtttgggggatgatggaggtgacatcaggcagaggagagtgcagcctcacagtgactttctcagaggtgacagagatgatggatgagcagctggattttcgtgatgaaggacggaagcagcagcgggccggcaaggccatacctcggtgagggacaggtggacaacggtcacctatctgtagccaggggcagttgtgtggccagctgtctctctgggatgagtcaggaggcctggaggcttggggagaggtgtggagaaggagagaacatggcccaggccctttccttccccctgtgctgacagcattgctgtgggggtggcccactgccctcccctggccctcatgtccccccggggctggggtccgcctgcctgtgctgtgcttgcgacgtgcatcaataaaccaccatggcctgagggccctgctcgtctc

SEQ ID NO: 39651 - DNA, 993 bp, Artificial Sequence
  derived and/or modified sequence
atggagctgctctcaacccctcacagtatcgaaatcaacaatattacctgcgattctttccggatatcctgggcaatggaagactctgatctagaacgcgtgacccattacttcatagatctcaacaagaaagaaaataagaactcaaataagttcaaacatcgagacgtgccaacaaagctggtggctaaggcggtgccgctccccatgaccgtgcggggtcattggtttctgtctcccagaacggagtattctgtcgccgtacaaaccgccgtgaaacagtctgatggcgaatatctggtgagcgggtggagtgagacagttgaattttgtactggtgattacgccaaggagcacctggcccaactgcaagaaaaagctgaacaaatagccggaaggatgctgcggttctctgtattctatagaaaccatcataaagagtacttccaacacgctcgaacccactgtggtaatatgttgcagccttacttgaaagacaatagtggaagccacggcagtccaacatctggcatgctgcacggcgtgttcttctcttgtaataccgagtttaatacaggccaaccaccacaagactccccctatggcaggtggagatttcagattccagcccagaggctctttaacccctcaaccaacctctattttgcggatttttactgcatgtacactgcttaccactatgccatcttggtgcttgccccaaagggaagtctgggtgaccgcttctgtcgtgatagactccctctgcttgatatcgcctgtaacaaatttcttacctgtagtgttgaggatggggaacttgtatttcgccacgcccaagacctgatactagagatcatatacacagagcctgtggatctctccctcggcaccttaggcgagatatcaggtcaccagctaatgagcctctccaccgcagatgcaaagaaggatccgtcttgtaaaacctgtaacattagcgttgggagatag

SEQ ID NO: 39652 - DNA, 714 bp, Artificial Sequence
  derived and/or modified sequence
atggaacttctgtctaccccacatagtatcgagattaacaacatcacatgcgattctttccgaattagttgggccatggaagattccgacttggaaagggtgacgcactacttcatcgacttaaacaagaaagaaaacaagaattctaatcaccataaggagtattttcaacacgccaggacacattgcgggaatatgttgcagccctacctgaaggataactccggaagtcacggcagtcccacgtccgggatgctccacggggttttctttagctgcaacactgaattcaatactggccagccgccacaggactcaccatacggcagatggcgttttcagatacctgcgcaaagactgttcaatccaagtacgaacttatatttcgccgacttctattgtatgtacactgcataccactacgccattctcgtgctcgccccaaagggctctcttggtgacagattttgtagagacaggctcccactgctcgatatagcctgcaataagtttctaacttgctccgtcgaggacggagagctggtgtttaggcatgcccaagacctcatactggagataatatacaccgaacctgtggatctttccctcggaacccttggagagattagcggtcaccaactgatgtctctgtctacagcagatgccaaaaaagatccttcctgtaagacttgcaacatatcagtagggagatag

SEQ ID NO: 39653 - DNA, 993 bp, Artificial Sequence
  derived and/or modified sequence
atggaacttttgtcgacgccacacagtattgagataaacaatattacatgtgactccttcaggatctcctgggctatggaggatagcgatttggagcgagtgacgcattactttatagatctgaacaaaaaagagaataagaattccaacaaattcaagcatcgggacgtcccaaccaaacttgtggctaaggcagtgcctctgccaatgaccgtgagaggccattggtttctgtctcccaggactgagtattctgtggcagtccagaccgccgtcaaacagagtgacggcgaatatctggtaagcggttggagtgagactgtggaattctgcacaggcgattacgccaaagagcatctggcccagctgcaggagaaagctgagcagatcgcgggaagaatgctacgattttcggttttctacagaaatcaccacaaggagtactttcagcacgcccgtacacattgcggcaatatgctgcagccataccttaaggacaattcgggaagccatggctcccccacttcaggtatgctacacggagtgttcttctcctgtaacacagagttcaatacgggacagcctccccaagattccccgtacggccgatggagatttcagattccggcacagagactctttaatccctccacaaatctctattttgcagatttctactgcatgtatacagcctaccattatgccatcttagtcttagctccgaaagggtccttaggcgacaggttttgccgcgacaggctgcccttactggacattgcatgcaacaagttcctgacttgttccgtggaggacggcgagctggtctttcggcatgctcaagatctgatcctagagatcatatataccgaacccgtggatctgtccctcggcacgctgggggaaatctccgggcaccagttgatgtctctgagcacggccgacgctaaaaaggacccatcctgtaaaacctgtaatatcagtgtcggcagatag

SEQ ID NO: 39654 - protein, 199 aa, Artificial Sequence
  derived and/or modified sequence
MGRLHCTEDPVPEAVGGDMQQLNQLGAQFSALTEVLFHFLTEPKEVERFLAQLSEFATTNQISLGSLRSIVKSLLLVPNGALKKSLTAKQVQADFITLGLSEEKATYFSEKWKQNAPTLARWAIGQTLMINQLIDMEWKFGVTSGSSELEKVGSIFLQLKLVVKKGNQTENVYIELTLPQFYSFLHEMERVRTSMECFC

SEQ ID NO: 39655 - DNA, 600 bp, Artificial Sequence
  derived and/or modified sequence
atgggcagactgcactgcaccgaggaccccgtgcccgaggccgtgggcggcgacatgcagcagctgaaccagctgggcgcccagttcagcgccctgaccgaggtgctgttccacttcctgaccgagcccaaggaggtggagagattcctggcccagctgagcgagttcgccaccaccaaccagatcagcctgggcagcctgagaagcatcgtgaagagcctgctgctggtgcccaacggcgccctgaagaagagcctgaccgccaagcaggtgcaggccgacttcatcaccctgggcctgagcgaggagaaggccacctacttcagcgagaagtggaagcagaacgcccccaccctggccagatgggccatcggccagaccctgatgatcaaccagctgatcgacatggagtggaagttcggcgtgaccagcggcagcagcgagctggagaaggtgggcagcatcttcctgcagctgaagctggtggtgaagaagggcaaccagaccgagaacgtgtacatcgagctgaccctgccccagttctacagcttcctgcacgagatggagagagtgagaaccagcatggagtgcttctgctag

SEQ ID NO: 39656 - DNA, 1907 bp, Artificial Sequence
  derived and/or modified sequence
ggcaataccaggtgatgctggggtgatgctgatgcccttccaaggttgagacctagtctctactctgatgtcagctctccgagagacactctggcctgctttgttcccttccctgtccccagtgtctggcatcgagtaggctgccataaatatctctggagtgcatagtaacagtgatgatgataatagcagctagccattgattgaagacctcttgtgtgccggtctctgcgttaaacatttctggaggcttaactcatttaaggagctaccccagccatcattttctcagatggtgaaactgaggttcagagaggccaagcgccgtacccaaaggtcactcagcgggagagctggcaggaaacctcgcgtctgccggtgccggcgccgcccctgcccctccccggagcccggcggccgcgcgtgtccgcggccctgcgagggctccccggctccggacagcccagggcggccgggggaggagtgcgctgcgacggccgtggcgaaagtgcggttgtggatgcgcggagaggccggcagcggtggcagcggcagcggaggaggaagctgagcagggcggcggcggcggtggaacctgcggggctggggcgcgcgccatgggccgcctgcactgcactgaggacccggtgccggaggccgtgggcggcgacatgcagcagctgaaccagctgggcgcgcagttctcagccctgacagaggtgcttttccacttcctaactgagccaaaagaggtggaaagatttctggctcagctctctgaatttgccaccaccaatcagatcagtcttggctccctcagaagcatcgtgaaaagcctccttctggttccaaatggtgctttgaagaagagtctcacagccaagcaggtccaggcggatttcataactctgggtcttagtgaggagaaagccacttacttttctgaaaagtggaagcagaatgctcccacccttgctcgatgggccataggtcagactctgatgattaaccagctcatagatatggagtggaaatttggagtgacatctgggagcagcgaattggagaaagtgggaagtatatttttacaactaaagttggtggttaagaaaggaaatcaaaccgaaaatgtgtatatagaattaaccttgcctcagttctacagcttcctgcacgagatggagcgagtcagaaccagcatggagtgtttctgctgatttctgtccctgcatctcccctggccccgttccctgccctcctcccttccctgggtgactgctctgagaggcacttcactcacaggcctgtgggatgctccatggggccctgctggctccatggggcccaggtgcaaagggtttctgaaaaacagcaggattaagtactgaaagagcccaacacaattaccctgtaaactctctgttagggcaaccaccaccacctgtcttccaggacacatttttagatactctgacaggccactgcatctcagattcaggggagaaaataagttgtcacctccccttcaaagttccagagtaaacaaatggtgccatcattcaagataacatgctgatcaccctcctcccaaaaagcaagagcttgtttatggctgaggaatcggcggattgtctgaatgacacatatacagagcccccacggatttctgcacactctgggtctgtgctggtggaacattgccaatcagttcttaatgaggcacctgtgtgtaaatacatgcttggtcttctctgcagagaactgaggctaaactctgtccctacttctggttttgccctgtcatgtcgtaacgaggtgggccttttgaggccattttagtttgagttcgagccaaccacctctgttggttagatgatgaataaaaaggttctgaagaaaaggtctgg

SEQ ID NO: 39657 - DNA, 600 bp, Artificial Sequence
  derived and/or modified sequence
atgggtcggctgcattgtacagaagacccagttcctgaggccgttggcggtgacatgcagcagctgaaccaactgggcgcccagtttagcgccctaacagaggtcttattccattttttgaccgaacctaaggaagttgagcgatttctggctcagctgtcagaatttgcaaccacaaaccaaatatccctcggctccctgaggtcgatcgtgaaaagcttgctattggtccctaacggggccctgaaaaaaagtctgactgccaagcaggtccaggctgactttatcacgttgggcctgagtgaggagaaggccacatatttctcagaaaagtggaagcaaaatgcacccacgttagcgaggtgggcaataggacagacactgatgattaatcaactgatcgatatggaatggaaatttggagtcacatctggctcgtctgaactagaaaaggtgggatctatattcctacagctgaaactggttgtgaaaaagggtaaccaaacggaaaacgtgtacatcgagctgacactgccacagttctatagctttctccacgaaatggaaagagtgcgcaccagtatggagtgcttctgctag

SEQ ID NO: 39658 - DNA, 600 bp, Artificial Sequence
  derived and/or modified sequence
atgggccgcctgcactgcacagaggaccctgtgcctgaggccgtgggcggggacatgcagcagctgaaccagctgggcgcccagttcagcgccctgacagaggtgctcttccacttcctgacagagcccaaggaggtggagcgcttcctggcccagctgtctgaatttgccaccaccaaccagatcagcctgggcagcctgcggagcatcgtgaagagcctgctgctggtgcccaatggagccctgaagaagagcctgacagccaagcaggtgcaggccgacttcatcaccctgggcctgtctgaggagaaggccacctacttcagcgagaagtggaagcagaatgcccccaccctggcccgctgggccatcggccagaccctgatgatcaaccagctgattgacatggagtggaagtttggagtgaccagcggcagcagcgagctggagaaggtgggcagcatcttcctgcagctgaagctggtggtgaagaagggcaaccagacagaaaatgtgtacatcgagctgaccctgccccagttctacagcttcctgcacgagatggagcgggtgaggacctccatggagtgcttctgctag

SEQ ID NO: 39659 - DNA, 600 bp, Artificial Sequence
  derived and/or modified sequence
atgggccggctgcactgcaccgaggaccccgtgcccgaggccgtgggaggagatatgcagcaactaaaccagctgggagctcagttctccgctttaactgaggtcctgttccattttttaacagagcccaaagaggtggaaaggttcttggcacagttaagcgagttcgcgacaactaaccagatttctctgggctccctgcggagtatagtgaagtccctgctactggtccctaatggcgccttgaaaaaaagcctcactgccaaacaggtgcaggccgacttcataaccctcggcctgtctgaggagaaagctacatactttagcgagaagtggaagcagaacgctcctacattagcccggtgggctattggacaaaccctcatgatcaaccagctgattgatatggagtggaaatttggcgtgacgagcggtagctcagagcttgaaaaagtcggcagtatttttctgcagctaaagcttgtggtgaagaaaggcaatcagaccgagaatgtgtacatagagttgactctgccccagttctactcgttcctgcacgaaatggagcgtgtgagaacatccatggagtgcttctgttag

SEQ ID NO: 39660 - DNA, 600 bp, Artificial Sequence
  derived and/or modified sequence
atggggagactgcactgtaccgaggaccccgtgccagaagctgttgggggtgatatgcaacaactaaaccagctcggggctcagttctcagccctcactgaggtgctgttccactttctcacggagcctaaggaggtcgagcggttcctggctcaactgagtgaatttgccacaactaatcagatcagcctcggctcactgaggtctattgtgaaatccctgttgctggtccccaatggcgcactgaaaaaaagtctgacagcgaagcaggttcaggccgactttattaccctgggcctcagtgaggaaaaagcaacgtactttagcgaaaaatggaagcagaatgccccaaccctggctaggtgggcgattgggcagacattaatgattaaccagttgatcgacatggagtggaagttcggtgtcacttcaggcagcagtgagctggagaaggtgggcagcatctttcttcagcttaagctcgtggtcaaaaaagggaaccagacagagaacgtctatattgagctgaccctcccacagttctactccttcttgcacgagatggaacgcgtgcggaccagcatggagtgtttctgttag

SEQ ID NO: 39661 - protein, 451 aa, Artificial Sequence
  derived and/or modified sequence
MQLPRWWELGDPCAWTGQGRGTRRMSPATTGTFLLTVYSIFSKVHSDRNVYPSAGVLFVHVLEREYFKGEFPPYPKPGEISNDPITFNTNLMGYPDRPGWLRYIQRTPYSDGVLYGSPTAENVGKPTIIEITAYNRRTFETARHNLIINIMSAEDFPLPYQAEFFIKNMNVEEMLASEVLGDFLGAVKNVWQPERLNAINITSALDRGGRVPLPINDLKEGVYVMVGADVPFSSCLREVENPQNQLRCSQEMEPVITCDKKFRTQFYIDWCKISLVDKTKQVSTYQEVIRGEGILPDGGEYKPPSDSLKSRDYYTDFLITLAVPSAVALVLFLILAYIMCCRREGVIQLVHHSAIQKSTKELRDMSKNREIAWPLSTLPVFHPVTGEIIPPLHTDNYDSTNMPLMQTQQNLPHQTQIPQQQTTGDFRLTTFQRFEVNGIPEERKLTEAMNL

SEQ ID NO: 39662 - DNA, 1356 bp, Artificial Sequence
  derived and/or modified sequence
atgcagctgccaagatggtgggagctgggtgacccctgcgcttggacaggacaggggcgtggcaccagaagaatgagcccagcgacgacaggcaccttcctgcttaccgtttattcaatcttctcaaaagtgcatagtgaccgaaatgtgtaccccagtgcaggtgtgcttttcgtgcacgtgctggagcgtgaatattttaagggcgaatttcccccataccccaagcccggcgagatctcgaatgacccaatcacatttaacactaaccttatggggtatcccgaccggcctgggtggctgcgctacattcagcgcaccccatatagcgacggagtgttgtacgggagtcccacagccgaaaacgtaggcaaaccgaccatcatcgaaatcacagcctataaccgcagaaccttcgaaacagcccgtcataatcttatcattaacatcatgagcgccgaagactttcctctgccgtaccaggctgaatttttcatcaaaaatatgaatgtagaggaaatgctggccagcgaggtcttgggggactttctgggggccgttaagaacgtctggcagccggagcggctaaacgccatcaatatcacaagcgctttggatagagggggccgcgtgcctctgccaatcaatgatctaaaagagggcgtctacgtcatggtgggcgccgacgtaccattctcatcctgtctcagggaggtggaaaacccccagaatcagttgcggtgttctcaggaaatggaaccggtcattacatgtgacaaaaaatttagaacacagttctatatagattggtgtaaaatcagtctggtggacaagacgaaacaagtctcgacataccaggaagtgatacgtggagaaggcatcttaccggatggcggggagtacaagcctccttcagacagcttgaaatcgagagactactataccgacttccttattactttagctgtcccttcagccgtggctctggtgctgtttctcattcttgcctacatcatgtgttgcagaagagaaggggtgatccaactggtgcatcattcagccatccaaaaatctacaaaggagctacgggacatgtctaagaaccgggaaattgcatggccactttccacactgcctgtgtttcaccccgtgaccggggagattatcccacccctacataccgataattatgactccactaacatgcccctaatgcaaacccagcaaaatctaccacaccagacccagatcccccagcagcagacaaccggggactttcgtctgaccactttccaacggtttgaggtgaatggtattcctgaggaacgaaagctcacagaagccatgaatctgtag

SEQ ID NO: 39663 - DNA, 1356 bp, Artificial Sequence
  derived and/or modified sequence
atgcagctgccccgctggtgggagctgggggacccctgtgcctggacaggccagggccggggcaccaggaggatgagccctgccaccaccggcaccttcctgctgactgtgtacagcatcttcagcaaggtgcacagcgacagaaatgtgtaccccagcgctggggtgctgtttgtgcacgtgctggagcgggagtacttcaagggggagttccccccctaccccaagccaggagagatcagcaatgaccccatcaccttcaacaccaacctgatgggctacccagaccggcccggctggctgcgctacatccagaggaccccctacagtgatggagtgctgtatggcagccccacagcagaaaatgtgggcaagcccaccatcatcgagatcacagcctacaacagaaggacctttgaaacagcccggcacaacctgatcatcaacatcatgtctgctgaggacttccccctgccctaccaggccgagttcttcatcaagaacatgaatgtggaggagatgctggccagcgaggtgctgggggacttcctgggcgctgtgaagaatgtgtggcagcctgagcggctgaatgccatcaacatcaccagcgccctggaccggggcggccgggtgcccctgcccatcaatgacctgaaggagggcgtgtatgtgatggtgggcgcagatgtgcccttcagcagctgcctgcgggaggtggagaacccccagaaccagctgcgctgcagccaggagatggagcccgtcatcacctgtgacaagaagttccgcacccagttctacatcgactggtgcaagatcagcctggtggacaagaccaagcaggtgtccacctaccaggaggtgatccggggggagggcatcctgcctgatggaggagagtacaagcccccaagtgacagcctgaagagccgggactactacacagacttcctgatcaccctggccgtgcccagcgctgtggccctggtgctcttcctgatcctggcctacatcatgtgctgccggcgggagggcgtcatccagctggtgcaccacagcgccatccagaagagcaccaaggagctgcgggacatgagcaagaaccgggagatcgcctggcccctgagcaccctgcctgtgttccaccctgtgactggagagatcatcccccccctgcacacagacaactatgacagcaccaacatgcccctgatgcagacccagcagaacctgccccaccagacccagatcccccagcagcagaccactggagacttccggctgaccaccttccagagatttgaggtgaatggcatccctgaggagaggaagctgacagaggccatgaacctgtag

SEQ ID NO: 39664 - DNA, 1356 bp, Artificial Sequence
  derived and/or modified sequence
atgcagctgccccggtggtgggagctgggcgacccctgcgcctggaccggccaggggagaggaactcgccgcatgtctccagcaacaactggcacctttttgctcacggtctattcaattttttcgaaggtgcactcagaccgaaacgtctatccgtccgctggcgtgttgtttgtacatgtgttagaaagagagtactttaaaggcgagtttccaccgtatcccaagccgggcgagatcagcaacgatccaattactttcaacaccaatttaatggggtatcccgatcgaccgggatggcttagatacatccagcgaacgccgtatagcgatggtgtgttgtacggaagtcctactgcggagaatgtcggtaaacccaccattatcgagatcaccgcatacaatcggcgtacgttcgaaacggctaggcacaatctgattattaacataatgtccgccgaagatttccctctcccataccaagctgagtttttcattaaaaatatgaacgtggaggaaatgctggcttcagaagtactgggtgacttcctgggcgctgtgaagaacgtctggcaacctgaacgcttaaacgctattaacattacatcggctctggatagaggaggacgagtacctctgcccatcaacgacttgaaagagggtgtgtatgtgatggtcggagcggacgtaccatttagttcttgcctcagagaggtcgagaacccccagaaccagttgagatgttcccaagaaatggagccagttattacttgcgacaaaaaatttaggacgcagttctatatcgactggtgtaaaatttctcttgtggataagactaagcaggtcagtacataccaagaggtgattcgaggggaaggaatactcccggacggtggtgaatataaaccaccttcagatagcctgaagtcaagggactattacaccgattttttgattaccctggccgtgccttccgccgtggctcttgtgctttttctaattctggcctacatcatgtgctgtcggagggaaggcgtcatacagctcgtgcatcactctgccatccaaaagtctaccaaggaactgcgggatatgagtaagaatagagagattgcctggcccttgagcacacttccagtttttcatcccgtcacaggagagatcattccgcccctacataccgacaactatgatagtactaatatgcctctgatgcagacacagcagaatttgccccaccaaacgcagatcccccagcaacagacaactggcgactttcgccttaccacctttcagcgatttgaggtcaatgggatacccgaagagcgaaaattgaccgaagccatgaatctgtag

SEQ ID NO: 39665 - DNA, 1356 bp, Artificial Sequence
  derived and/or modified sequence
atgcagttgcctcgctggtgggagctgggcgatccgtgcgcttggaccggccagggacgcggaacaagacggatgtcccccgcaactaccggcacgtttctgctgaccgtgtactccattttcagcaaggtacactccgaccgtaacgtctacccgtccgcaggtgtgctgtttgtgcacgtgctggagagagagtacttcaagggagagtttccaccgtaccctaaacccggtgaaatttccaacgaccctatcaccttcaacacaaatctgatggggtatccggatcgaccagggtggttgcgatacatccagaggacgccctactccgacggcgtgctgtacggttctcccactgcagaaaatgtgggaaagcctacaattatcgaaatcacagcttacaatagaagaactttcgagaccgcaagacacaacttgatcatcaatattatgagcgccgaagatttccccctcccttatcaggcagaattctttatcaagaacatgaacgttgaggagatgctagcatccgaggtcttgggcgattttttgggagcagtgaagaatgtttggcagcccgagcggttgaatgcaataaatatcacctccgcactggaccgcggtggaagggttccactccctataaacgaccttaaggaaggcgtttacgtgatggttggcgcagatgtacctttttctagttgtctgcgggaggtggagaatcctcagaaccaattgagatgctcccaggagatggagcccgttattacatgtgataagaagtttcggacccagttctacattgattggtgcaaaatttccctggtggataagactaagcaagtatccacttaccaggaagtgattaggggagaaggcatcctcccagatggcggagagtacaagcctcccagtgacagtctcaagagccgcgactactatactgatttcctcataaccctggcagtgccaagcgcagtggccctggtactgttcctcattcttgcatatatcatgtgttgtcgccgagaaggagtcatacaactggtgcatcactcagctatccagaaaagcactaaggagctgagggatatgtctaaaaaccgcgaaatcgcttggcccctgtcaactctccctgtctttcatccagtaactggcgagatcataccccctctccacaccgacaactacgactccaccaacatgcctttgatgcagacccaacagaacctgccacaccagactcagattcctcaacagcaaaccaccggggactttcgactcacaacctttcagagatttgaagtcaacggcatccctgaggaacgtaaactgaccgaagccatgaacctttag

SEQ ID NO: 39666 - DNA, 1409 bp, Artificial Sequence
  derived and/or modified sequence
atgcaattgccccggtggtgggagctgggagacccctgtgcttggacgggacagggtcgggggacacgcaggatgagccccgcgaccactggcacattcttgctgacagtgtacagtattttctccaaggtacactccgatcggaatgtatacccatcagcaggtgtcctctttgttcatgttttggaaagagaatattttaagggggaatttccaccttacccaaaacctggcgagattagtaatgatcccataacatttaatacaaatttaatgggttacccagaccgacctggatggcttcgatatatccaaaggacaccatatagtgatggagtcctatatgggtccccaacagctgaaaatgtggggaagccaacaatcattgagataactgcctacaacaggcgcacctttgagactgcaaggcataatttgataattaatataatgtctgcagaagacttcccgttgccatatcaagcagaattcttcattaagaatatgaatgtagaagaaatgttggccagtgaggttcttggagactttcttggcgcagtgaaaaatgtgtggcagccagagcgcctgaacgccataaacatcacatcggccctagacaggggtggcagggtgccacttcccattaatgacctgaaggagggcgtttatgtcatggttggtgcagatgtcccgttttcttcttgtttacgagaagttgaaaatccacagaatcaattgagatgtagtcaagaaatggagcctgtaataacatgtgataaaaaatttcgtactcaattttacattgactggtgcaaaatttcattggttgataaaacaaagcaagtgtccacctatcaggaagtgattcgtggagaggggattttacctgatggtggagaatacaaacccccttctgattctttgaaaagcagagactattacacggatttcctaattacactggctgtgccctcggcagtggcactggtcctttttctaatacttgcttatatcatgtgctgccgacgggaaggcgtcatccaactggtccatcacagtgctattcagaaatctaccaaggagcttcgagacatgtccaagaatagagagatagcatggcccctgtcaacgcttcctgtgttccaccctgtgactggggaaatcatacctcctttacacacagacaactatgatagcacaaacatgccattgatgcaaacgcagcagaacttgccacatcagactcagattccccaacagcagactacaggagattttcgtttgacaacttttcaaagatttgaggtaaatggtatccctgaagaaagaaaactgactgaagcaatgaatttataatcagacaatatagcagttacatcacatttcttttctcttccaataatgcatga

SEQ ID NO: 39667 - DNA, 1356 bp, Artificial Sequence
  derived and/or modified sequence
atgcagctgcccagatggtgggagctgggcgacccctgcgcctggaccggccagggcagaggcaccagaagaatgagccccgccaccaccggcaccttcctgctgaccgtgtacagcatcttcagcaaggtgcacagcgacagaaacgtgtaccccagcgccggcgtgctgttcgtgcacgtgctggagagagagtacttcaagggcgagttccccccctaccccaagcccggcgagatcagcaacgaccccatcaccttcaacaccaacctgatgggctaccccgacagacccggctggctgagatacatccagagaaccccctacagcgacggcgtgctgtacggcagccccaccgccgagaacgtgggcaagcccaccatcatcgagatcaccgcctacaacagaagaaccttcgagaccgccagacacaacctgatcatcaacatcatgagcgccgaggacttccccctgccctaccaggccgagttcttcatcaagaacatgaacgtggaggagatgctggccagcgaggtgctgggcgacttcctgggcgccgtgaagaacgtgtggcagcccgagagactgaacgccatcaacatcaccagcgccctggacagaggcggcagagtgcccctgcccatcaacgacctgaaggagggcgtgtacgtgatggtgggcgccgacgtgcccttcagcagctgcctgagagaggtggagaacccccagaaccagctgagatgcagccaggagatggagcccgtgatcacctgcgacaagaagttcagaacccagttctacatcgactggtgcaagatcagcctggtggacaagaccaagcaggtgagcacctaccaggaggtgatcagaggcgagggcatcctgcccgacggcggcgagtacaagccccccagcgacagcctgaagagcagagactactacaccgacttcctgatcaccctggccgtgcccagcgccgtggccctggtgctgttcctgatcctggcctacatcatgtgctgcagaagagagggcgtgatccagctggtgcaccacagcgccatccagaagagcaccaaggagctgagagacatgagcaagaacagagagatcgcctggcccctgagcaccctgcccgtgttccaccccgtgaccggcgagatcatcccccccctgcacaccgacaactacgacagcaccaacatgcccctgatgcagacccagcagaacctgccccaccagacccagatcccccagcagcagaccaccggcgacttcagactgaccaccttccagagattcgaggtgaacggcatccccgaggagagaaagctgaccgaggccatgaacctgtag

SEQ ID NO: 39668 - protein, 462 aa, Artificial Sequence
  derived and/or modified sequence
MQLPRWWELGDPCAWTGQGRGTRRMSPATTGTFLLTVYSIFSKVHSDRNVYPSAGVLFVHVLEREYFKGEFPPYPKPGEISNDPITFNTNLMGYPDRPGWLRYIQRTPYSDGVLYGSPTAENVGKPTIIEITAYNRRTFETARHNLIINIMSAEDFPLPYQAEFFIKNMNVEEMLASEVLGDFLGAVKNVWQPERLNAINITSALDRGGRVPLPINDLKEGVYVMVGADVPFSSCLREVENPQNQLRCSQEMEPVITCDKKFRTQFYIDWCKISLVDKTKQVSTYQEVIRGEGILPDGGEYKPPSDSLKSRDYYTDFLITLAVPSAVALVLFLILAYIMCCRREGVEKRNMQTPDIQLVHHSAIQKSTKELRDMSKNREIAWPLSTLPVFHPVTGEIIPPLHTDNYDSTNMPLMQTQQWSFAPVAQAGVQWSDLGSLQPPPPRNLPHQTQIPQQQTTGKWYP

SEQ ID NO: 39669 - DNA, 1389 bp, Artificial Sequence
  derived and/or modified sequence
atgcagctgcctagatggtgggaacttggggacccatgtgcttggactggtcagggcagaggtacgagacggatgagtcccgctacaaccgggactttcctgctgacagtatactcgatcttttctaaagtgcacagcgatcgcaacgtctatcccagcgcgggcgttctgtttgtgcacgtgctggagcgcgaatacttcaaaggagaattcccaccttatcccaaaccaggagagatatccaatgatcccattaccttcaacaccaacctcatggggtatcccgataggcccggttggctgaggtatattcaaaggactccatacagtgacggggtactatatggctcacccactgcggagaatgtcgggaagcccactataatagaaatcaccgcttataaccgtcgcacgtttgagaccgcccggcacaatctcatcatcaacatcatgtcggccgaagatttccctctcccttatcaggcggaattcttcattaaaaacatgaatgtggaggagatgcttgcgtccgaagtcctcggtgatttcttgggagctgtcaagaacgtctggcaacctgagcgcctcaatgcaatcaatataacaagcgcactggacagagggggccgagtgcctttgcccataaatgacctgaaggaaggcgtctacgtgatggtgggcgcggacgtaccattctcttcctgcctgcgagaggtggagaacccgcagaaccagctgagatgcagccaagagatggagccggtcatcacatgtgacaagaaattcaggacccagttctacatcgactggtgcaagatttcgctggtcgataagaccaaacaggtgagcacataccaggaggtgattcgcggagaaggtatcctgcctgacggcggtgaatataaacctccctccgactccttgaagtcccgggactattacaccgattttctgattaccttggctgtaccttcagccgtagcactggtactgtttttgattctggcctacatcatgtgctgccgccgtgaaggtgtggagaagcgtaatatgcaaactccagacatccagctggtccatcattccgctatccagaaaagcaccaaggagctgcgcgatatgagcaagaacagagagatcgcatggcccctctcaaccctgcctgttttccaccctgttaccggggaaatcatcccccccctccataccgataactatgactccacaaacatgcccctgatgcaaacccagcagtggagttttgccccagtggctcaagcaggagtccagtggagcgacctgggctcactgcaacccccgccccctcggaacctgccacaccagacacagatccctcagcaacaaaccactggaaagtggtacccatag

SEQ ID NO: 39670 - DNA, 1389 bp, Artificial Sequence
  derived and/or modified sequence
atgcagctgccccgctggtgggagctgggggacccctgtgcctggacaggccagggccggggcaccaggaggatgagccctgccaccaccggcaccttcctgctgactgtgtacagcatcttcagcaaggtgcacagcgacagaaatgtgtaccccagcgctggggtgctgtttgtgcacgtgctggagcgggagtacttcaagggggagttccccccctaccccaagccaggagagatcagcaatgaccccatcaccttcaacaccaacctgatgggctacccagaccggcccggctggctgcgctacatccagaggaccccctacagtgatggagtgctgtatggcagccccacagcagaaaatgtgggcaagcccaccatcatcgagatcacagcctacaacagaaggacctttgaaacagcccggcacaacctgatcatcaacatcatgtctgctgaggacttccccctgccctaccaggccgagttcttcatcaagaacatgaatgtggaggagatgctggccagcgaggtgctgggggacttcctgggcgctgtgaagaatgtgtggcagcctgagcggctgaatgccatcaacatcaccagcgccctggaccggggcggccgggtgcccctgcccatcaatgacctgaaggagggcgtgtatgtgatggtgggcgcagatgtgcccttcagcagctgcctgcgggaggtggagaacccccagaaccagctgcgctgcagccaggagatggagcccgtcatcacctgtgacaagaagttccgcacccagttctacatcgactggtgcaagatcagcctggtggacaagaccaagcaggtgtccacctaccaggaggtgatccggggggagggcatcctgcctgatggaggagagtacaagcccccaagtgacagcctgaagagccgggactactacacagacttcctgatcaccctggccgtgcccagcgctgtggccctggtgctcttcctgatcctggcctacatcatgtgctgccggcgggagggcgtggagaagaggaacatgcagaccccagacatccagctggtgcaccacagcgccatccagaagagcaccaaggagctgcgggacatgagcaagaaccgggagatcgcctggcccctgagcaccctgcccgtcttccaccctgtgactggagagatcatcccccccctgcacacagacaactatgacagcaccaacatgcccctgatgcagacccagcagtggagctttgcccctgtggcccaggccggcgtgcagtggagcgacctgggcagcctgcagcccccacctccaagaaacctgccccaccagacccagatcccccagcagcagaccaccgggaagtggtacccctag

SEQ ID NO: 39671 - DNA, 1389 bp, Artificial Sequence
  derived and/or modified sequence
atgcagctgccccggtggtgggagctgggcgacccctgcgcctggaccgggcagggcaggggcacgaggaggatgagccctgctacaaccggaactttcttgctgaccgtatattccatcttcagtaaggtgcattctgacaggaatgtgtacccaagcgctggggtgctgttcgttcacgtgcttgagcgggagtatttcaagggcgaatttcccccctaccccaagcccggtgaaatcagcaacgatccaataacattcaacactaatctaatgggctatcccgacagacctggatggctgaggtatatccagcgcaccccatatagcgacggtgtactgtatggcagccccacggcagagaatgtaggaaagcccaccatcatcgagattaccgcatataaccgaaggacatttgaaactgcgcgtcacaacttaattattaacattatgtcggcagaggactttcctcttccatatcaggcggagttcttcataaaaaacatgaatgtcgaggaaatgttggcctctgaagtgctgggcgactttctcggcgccgtgaaaaacgtgtggcaaccggagaggctgaatgccatcaacattacaagcgccctggaccggggcggccgagtgccactccctattaacgacctcaaagaaggggtctacgtgatggttggagccgatgtgcccttctcttcctgtctgagggaggtggagaacccccagaaccagcttaggtgcagccaggagatggagccggtgataacttgtgataagaagtttagaactcagttttacatcgattggtgtaagatctccttggtggacaaaaccaagcaggttagcacatatcaggaggttatcaggggagaaggtatcctcccagatggaggtgaatacaagccaccatccgacagtctaaaatcgcgcgattactatacagactttctcatcacgttggcggttcctagcgcggtggccctggtactgttcctgatcctcgcatatattatgtgctgcagaagagagggcgtggagaaaagaaatatgcagactcctgacatccaattggtgcatcatagtgccatccagaaatctactaaagaacttcgggatatgagcaagaacagagaaatcgcctggccactgtccaccctgccagtctttcacccagtgacaggggaaattattccccccttgcacacagataactacgactccacgaacatgccactgatgcagactcaacaatggagctttgcccctgttgctcaagccggggtgcagtggtctgacctggggtcactgcaacctcccccgccacgtaatctccctcaccagactcagattccccagcaacagaccaccggcaaatggtatccgtag

SEQ ID NO: 39672 - DNA, 1389 bp, Artificial Sequence
  derived and/or modified sequence
atgcaattgccccgttggtgggaactgggcgacccatgtgcctggactggacaaggcagaggaactagacgaatgtcccccgctacaactggaacgtttctgctgacagtgtattccattttttccaaggtgcattccgacagaaacgtgtatccatccgccggagtcttgtttgtgcacgttctggaacgagaatatttcaaaggcgaatttccaccgtatccaaaacccggagaaatcagcaatgatcctataacatttaatacgaatcttatgggttatccagatcgaccaggatggctgcggtacattcagcgaactccttacagcgacggagtgctctacgggtcaccaactgctgagaacgttgggaagccaaccatcatagagattacagcctacaacaggcgaaccttcgagacggccagacataatcttatcattaatatcatgagcgcagaggattttccgctcccctaccaggctgagttttttataaaaaacatgaatgtcgaagagatgctagcgagcgaagtattgggtgactttctgggggcagtaaagaacgtttggcagccggaacgcctgaacgcaataaacatcacatctgccctcgacagagggggacgcgtgccactccccatcaacgacttaaaagaaggagtgtatgtcatggttggagctgacgttccgttttcatcttgcctccgagaagtcgaaaatccacagaaccagctccgctgcagccaagagatggaaccggtaattacttgcgacaagaaattccggactcagttctacatcgactggtgtaaaatttccctcgttgacaagactaagcaagtgagcacctaccaagaggtgataaggggcgaaggtatcctgcccgatggaggggaatacaaaccacccagtgattctctgaagtctcgggattactacaccgattttctaataactctggctgtgcccagcgcagtggccctggtgcttttccttatcctcgcctatattatgtgctgtcgacgggaaggtgtggaaaagcgcaatatgcagacaccagacatacaactcgtgcaccattcggcgatccagaagtccacgaaggagctacgggatatgagtaaaaatcgggagatcgcctggcctctttctacattacccgtttttcaccctgtgaccggggaaatcattccacccctccacacagacaactatgactcgactaatatgccgctgatgcagacccagcaatggtcctttgccccagttgctcaggccggagttcagtggtccgaccttggttccctgcaacccccaccacctagaaatcttcctcaccagactcagatcccacagcagcagacaacaggcaagtggtacccgtag

SEQ ID NO: 39673 - DNA, 1666 bp, Artificial Sequence
  derived and/or modified sequence
ggacggacggcctagccaggccaagaatgcaattgccccggtggtgggagctgggagacccctgtgcttggacgggacagggtcgggggacacgcaggatgagccccgcgaccactggcacattcttgctgacagtgtacagtattttctccaaggtacactccgatcggaatgtatacccatcagcaggtgtcctctttgttcatgttttggaaagagaatattttaagggggaatttccaccttacccaaaacctggcgagattagtaatgatcccataacatttaatacaaatttaatgggttacccagaccgacctggatggcttcgatatatccaaaggacaccatatagtgatggagtcctatatgggtccccaacagctgaaaatgtggggaagccaacaatcattgagataactgcctacaacaggcgcacctttgagactgcaaggcataatttgataattaatataatgtctgcagaagacttcccgttgccatatcaagcagaattcttcattaagaatatgaatgtagaagaaatgttggccagtgaggttcttggagactttcttggcgcagtgaaaaatgtgtggcagccagagcgcctgaacgccataaacatcacatcggccctagacaggggtggcagggtgccacttcccattaatgacctgaaggagggcgtttatgtcatggttggtgcagatgtcccgttttcttcttgtttacgagaagttgaaaatccacagaatcaattgagatgtagtcaagaaatggagcctgtaataacatgtgataaaaaatttcgtactcaattttacattgactggtgcaaaatttcattggttgataaaacaaagcaagtgtccacctatcaggaagtgattcgtggagaggggattttacctgatggtggagaatacaaacccccttctgattctttgaaaagcagagactattacacggatttcctaattacactggctgtgccctcggcagtggcactggtcctttttctaatacttgcttatatcatgtgctgccgacgggaaggcgtggaaaagagaaacatgcaaacaccagacatccaactggtccatcacagtgctattcagaaatctaccaaggagcttcgagacatgtccaagaatagagagatagcatggcccctgtcaacgcttcctgtgttccaccctgtgactggggaaatcatacctcctttacacacagacaactatgatagcacaaacatgccattgatgcaaacgcagcaatggagtttcgctcctgttgcccaggctggagtgcaatggagcgatcttggctcactgcagcctccgcctcccaggaacttgccacatcagactcagattccccaacagcagactacaggtaaatggtatccctgaagaaagaaaactgactgaagcaatgaatttataatcagacaatatagcagttacatcacatttcttttctcttccaataatgcatgagcttttctggcatatgttatgcatgttggcagtattaagtgtataccaaataatacaacataactttcattttactaatgtatttttttgtacttaaagcatttttgacaatttgtaaaacattgatgactttatatttgttacaataaaagttgatctttaaa

SEQ ID NO: 39674 - DNA, 1389 bp, Artificial Sequence
  derived and/or modified sequence
atgcagctgcccagatggtgggagctgggcgacccctgcgcctggaccggccagggcagaggcaccagaagaatgagccccgccaccaccggcaccttcctgctgaccgtgtacagcatcttcagcaaggtgcacagcgacagaaacgtgtaccccagcgccggcgtgctgttcgtgcacgtgctggagagagagtacttcaagggcgagttccccccctaccccaagcccggcgagatcagcaacgaccccatcaccttcaacaccaacctgatgggctaccccgacagacccggctggctgagatacatccagagaaccccctacagcgacggcgtgctgtacggcagccccaccgccgagaacgtgggcaagcccaccatcatcgagatcaccgcctacaacagaagaaccttcgagaccgccagacacaacctgatcatcaacatcatgagcgccgaggacttccccctgccctaccaggccgagttcttcatcaagaacatgaacgtggaggagatgctggccagcgaggtgctgggcgacttcctgggcgccgtgaagaacgtgtggcagcccgagagactgaacgccatcaacatcaccagcgccctggacagaggcggcagagtgcccctgcccatcaacgacctgaaggagggcgtgtacgtgatggtgggcgccgacgtgcccttcagcagctgcctgagagaggtggagaacccccagaaccagctgagatgcagccaggagatggagcccgtgatcacctgcgacaagaagttcagaacccagttctacatcgactggtgcaagatcagcctggtggacaagaccaagcaggtgagcacctaccaggaggtgatcagaggcgagggcatcctgcccgacggcggcgagtacaagccccccagcgacagcctgaagagcagagactactacaccgacttcctgatcaccctggccgtgcccagcgccgtggccctggtgctgttcctgatcctggcctacatcatgtgctgcagaagagagggcgtggagaagagaaacatgcagacccccgacatccagctggtgcaccacagcgccatccagaagagcaccaaggagctgagagacatgagcaagaacagagagatcgcctggcccctgagcaccctgcccgtgttccaccccgtgaccggcgagatcatcccccccctgcacaccgacaactacgacagcaccaacatgcccctgatgcagacccagcagtggagcttcgcccccgtggcccaggccggcgtgcagtggagcgacctgggcagcctgcagccccccccccccagaaacctgccccaccagacccagatcccccagcagcagaccaccggcaagtggtacccctag

SEQ ID NO: 39675 - protein, 2016 aa, Artificial Sequence
  derived and/or modified sequence
MANFLLPRGTSSFRRFTRESLAAIEKRMAEKQARGSTTLQESREGLPEEEAPRPQLDLQASKKLPDLYGNPPQELIGEPLEDLDPFYSTQKTFIVLNKGKTIFRFSATNALYVLSPFHPIRRAAVKILVHSLFNMLIMCTILTNCVFMAQHDPPPWTKYVEYTFTAIYTFESLVKILARGFCLHAFTFLRDPWNWLDFSVIIMAYVSENIKLGNLSALRTFRVLRALKTISVIPGLKTIVGALIQSVKKLADVMVLTVFCLSVFALIGLQLFMGNLRHKCVRNFTALNGTNGSVEADGLVWESLDLYLSDPENYLLKNGTSDVLLCGNSSDAGTCPEGYRCLKAGENPDHGYTSFDSFAWAFLALFRLMTQDCWERLYQQTLRSAGKIYMIFFMLVIFLGSFYLVNLILAVVAMAYEEQNQATIAETEEKEKRFQEAMEMLKKEHEALTIRGVDTVSRSSLEMSPLAPVNSHERRSKRRKRMSSGTEECGEDRLPKSDSEDGPRAMNHLSLTRGLSRTSMKPRSSRGSIFTFRRRDLGSEADFADDENSTAGESESHHTSLLVPWPLRRTSAQGQPSPGTSAPGHALHGKKNSTVDCNGVVSLLGAGDPEATSPGSHLLRPVMLEHPPDTTTPSEEPGGPQMLTSQAPCVDGFEEPGARQRALSAVSVLTSALEELEESRHKCPPCWNRLAQRYLIWECCPLWMSIKQGVKLVVMDPFTDLTITMCIVLNTLFMALEHYNMTSEFEEMLQVGNLVFTGIFTAEMTFKIIALDPYYYFQQGWNIFDSIIVILSLMELGLSRMSNLSVLRSFRLLRVFKLAKSWPTLNTLIKIIGNSVGALGNLTLVLAIIVFIFAVVGMQLFGKNYSELRDSDSGLLPRWHMMDFFHAFLIIFRILCGEWIETMWDCMEVSGQSLCLLVFLLVMVIGNLVVLNLFLALLLSSFSADNLTAPDEDREMNNLQLALARIQRGLRFVKRTTWDFCCGLLRQRPQKPAALAAQGQLPSCIATPYSPPPPETEKVPPTRKETRFEEGEQPGQGTPGDPEPVCVPIAVAESDTDDQEEDEENSLGTEEESSKQQESQPVSGGPEAPPDSRTWSQVSATASSEAEASASQADWRQQWKAEPQAPGCGETPEDSCSEGSTADMTNTAELLEQIPDLGQDVKDPEDCFTEGCVRRCPCCAVDTTQAPGKVWWRLRKTCYHIVEHSWFETFIIFMILLSSGALAFEDIYLEERKTIKVLLEYADKMFTYVFVLEMLLKWVAYGFKKYFTNAWCWLDFLIVDVSLVSLVANTLGFAEMGPIKSLRTLRALRPLRALSRFEGMRVVVNALVGAIPSIMNVLLVCLIFWLIFSIMGVNLFAGKFGRCINQTEGDLPLNYTIVNNKSQCESLNLTGELYWTKVKVNFDNVGAGYLALLQVATFKGWMDIMYAAVDSRGYEEQPQWEYNLYMYIYFVIFIIFGSFFTLNLFIGVIIDNFNQQKKKLGGQDIFMTEEQKKYYNAMKKLGSKKPQKPIPRPLNKYQGFIFDIVTKQAFDVTIMFLICLNMVTMMVETDDQSPEKINILAKINLLFVAIFTGECIVKLAALRHYYFTNSWNIFDFVVVILSIVGTVLSDIIQKYFFSPTLFRVIRLARIGRILRLIRGAKGIRTLLFALMMSLPALFNIGLLLFLVMFIYSIFGMANFAYVKWEAGIDDMFNFQTFANSMLCLFQITTSAGWDGLLSPILNTGPPYCDPTLPNSNGSRGDCGSPAVGILFFTTYIIISFLIVVNMYIAIILENFSVATEESTEPLSEDDFDMFYEIWEKFDPEATQFIEYSVLSDFADALSEPLRIAKPNQISLINMDLPMVSGDRIHCMDILFAFTKRVLGESGEMDALKIQMEEKFMAANPSKISYEPITTTLRRKHEEVSAMVIQRAFRRHLLQRSLKHASFLFRQQAGSGLSEEDAPEREGLIAYVMSENFSRPLGPPSSSSISSTSFPPSYDSVTRATSDNLQVRGSDYSHSEDLADFPPSPDRDRESIV

SEQ ID NO: 39676 - DNA, 8504 bp, Artificial Sequence
  derived and/or modified sequence
agacggcggcggcgcccgtaggatgcagggatcgctcccccggggccgctgagcctgcgcccagtgccccgagccccgcgccgagccgagtccgcgccaagcagcagccgcccaccccggggcccggccgggggaccagcagcttccccacaggcaacgtgaggagagcctgtgcccagaagcaggatgagaagatggcaaacttcctattacctcggggcaccagcagcttccgcaggttcacacgggagtccctggcagccatcgagaagcgcatggcagagaagcaagcccgcggctcaaccaccttgcaggagagccgagaggggctgcccgaggaggaggctccccggccccagctggacctgcaggcctccaaaaagctgccagatctctatggcaatccaccccaagagctcatcggagagcccctggaggacctggaccccttctatagcacccaaaagactttcatcgtactgaataaaggcaagaccatcttccggttcagtgccaccaacgccttgtatgtcctcagtcccttccaccccatccggagagcggctgtgaagattctggttcactcgctcttcaacatgctcatcatgtgcaccatcctcaccaactgcgtgttcatggcccagcacgaccctccaccctggaccaagtatgtcgagtacaccttcaccgccatttacacctttgagtctctggtcaagattctggctcgaggcttctgcctgcacgcgttcactttccttcgggacccatggaactggctggactttagtgtgattatcatggcgtatgtatcagaaaatataaaactaggcaatttgtcggctcttcgaactttcagagtcctgagagctctaaaaactatttcagttatcccagggctgaagaccatcgtgggggccctgatccagtctgtgaagaagctggctgatgtgatggtcctcacagtcttctgcctcagcgtctttgccctcatcggcctgcagctcttcatgggcaacctaaggcacaagtgcgtgcgcaacttcacagcgctcaacggcaccaacggctccgtggaggccgacggcttggtctgggaatccctggacctttacctcagtgatccagaaaattacctgctcaagaacggcacctctgatgtgttactgtgtgggaacagctctgacgctgggacatgtccggagggctaccggtgcctaaaggcaggcgagaaccccgaccacggctacaccagcttcgattcctttgcctgggcctttcttgcactcttccgcctgatgacgcaggactgctgggagcgcctctatcagcagaccctcaggtccgcagggaagatctacatgatcttcttcatgcttgtcatcttcctggggtccttctacctggtgaacctgatcctggccgtggtcgcaatggcctatgaggagcaaaaccaagccaccatcgctgagaccgaggagaaggaaaagcgcttccaggaggccatggaaatgctcaagaaagaacacgaggccctcaccatcaggggtgtggataccgtgtcccgtagctccttggagatgtcccctttggccccagtaaacagccatgagagaagaagcaagaggagaaaacggatgtcttcaggaactgaggagtgtggggaggacaggctccccaagtctgactcagaagatggtcccagagcaatgaatcatctcagcctcacccgtggcctcagcaggacttctatgaagccacgttccagccgcgggagcattttcacctttcgcaggcgagacctgggttctgaagcagattttgcagatgatgaaaacagcacagcgggggagagcgagagccaccacacatcactgctggtgccctggcccctgcgccggaccagtgcccagggacagcccagtcccggaacctcggctcctggccacgccctccatggcaaaaagaacagcactgtggactgcaatggggtggtctcattactgggggcaggcgacccagaggccacatccccaggaagccacctcctccgccctgtgatgctagagcacccgccagacacgaccacgccatcggaggagccaggcgggccccagatgctgacctcccaggctccgtgtgtagatggcttcgaggagccaggagcacggcagcgggccctcagcgcagtcagcgtcctcaccagcgcactggaagagttagaggagtctcgccacaagtgtccaccatgctggaaccgtctcgcccagcgctacctgatctgggagtgctgcccgctgtggatgtccatcaagcagggagtgaagttggtggtcatggacccgtttactgacctcaccatcactatgtgcatcgtactcaacacactcttcatggcgctggagcactacaacatgacaagtgaattcgaggagatgctgcaggtcggaaacctggtcttcacagggattttcacagcagagatgaccttcaagatcattgccctcgacccctactactacttccaacagggctggaacatcttcgacagcatcatcgtcatccttagcctcatggagctgggcctgtcccgcatgagcaacttgtcggtgctgcgctccttccgcctgctgcgggtcttcaagctggccaaatcatggcccaccctgaacacactcatcaagatcatcgggaactcagtgggggcactggggaacctgacactggtgctagccatcatcgtgttcatctttgctgtggtgggcatgcagctctttggcaagaactactcggagctgagggacagcgactcaggcctgctgcctcgctggcacatgatggacttctttcatgccttcctcatcatcttccgcatcctctgtggagagtggatcgagaccatgtgggactgcatggaggtgtcggggcagtcattatgcctgctggtcttcttgcttgttatggtcattggcaaccttgtggtcctgaatctcttcctggccttgctgctcagctccttcagtgcagacaacctcacagcccctgatgaggacagagagatgaacaacctccagctggccctggcccgcatccagaggggcctgcgctttgtcaagcggaccacctgggatttctgctgtggtctcctgcggcagcggcctcagaagcccgcagcccttgccgcccagggccagctgcccagctgcattgccaccccctactccccgccacccccagagacggagaaggtgcctcccacccgcaaggaaacacggtttgaggaaggcgagcaaccaggccagggcacccccggggatccagagcccgtgtgtgtgcccatcgctgtggccgagtcagacacagatgaccaagaagaagatgaggagaacagcctgggcacggaggaggagtccagcaagcagcaggaatcccagcctgtgtccggtggcccagaggcccctccggattccaggacctggagccaggtgtcagcgactgcctcctctgaggccgaggccagtgcatctcaggccgactggcggcagcagtggaaagcggaaccccaggccccagggtgcggtgagaccccagaggacagttgctccgagggcagcacagcagacatgaccaacaccgctgagctcctggagcagatccctgacctcggccaggatgtcaaggacccagaggactgcttcactgaaggctgtgtccggcgctgtccctgctgtgcggtggacaccacacaggccccagggaaggtctggtggcggttgcgcaagacctgctaccacatcgtggagcacagctggttcgagacattcatcatcttcatgatcctactcagcagtggagcgctggccttcgaggacatctacctagaggagcggaagaccatcaaggttctgcttgagtatgccgacaagatgttcacatatgtcttcgtgctggagatgctgctcaagtgggtggcctacggcttcaagaagtacttcaccaatgcctggtgctggctcgacttcctcatcgtagacgtctctctggtcagcctggtggccaacaccctgggctttgccgagatgggccccatcaagtcactgcggacgctgcgtgcactccgtcctctgagagctctgtcacgatttgagggcatgagggtggtggtcaatgccctggtgggcgccatcccgtccatcatgaacgtcctcctcgtctgcctcatcttctggctcatcttcagcatcatgggcgtgaacctctttgcggggaagtttgggaggtgcatcaaccagacagagggagacttgcctttgaactacaccatcgtgaacaacaagagccagtgtgagtccttgaacttgaccggagaattgtactggaccaaggtgaaagtcaactttgacaacgtgggggccgggtacctggcccttctgcaggtggcaacatttaaaggctggatggacattatgtatgcagctgtggactccagggggtatgaagagcagcctcagtgggaatacaacctctacatgtacatctattttgtcattttcatcatctttgggtctttcttcaccctgaacctctttattggtgtcatcattgacaacttcaaccaacagaagaaaaagttagggggccaggacatcttcatgacagaggagcagaagaagtactacaatgccatgaagaagctgggctccaagaagccccagaagcccatcccacggcccctgaacaagtaccagggcttcatattcgacattgtgaccaagcaggcctttgacgtcaccatcatgtttctgatctgcttgaatatggtgaccatgatggtggagacagatgaccaaagtcctgagaaaatcaacatcttggccaagatcaacctgctctttgtggccatcttcacaggcgagtgtattgtcaagctggctgccctgcgccactactacttcaccaacagctggaatatcttcgacttcgtggttgtcatcctctccatcgtgggcactgtgctctcggacatcatccagaagtacttcttctccccgacgctcttccgagtcatccgcctggcccgaataggccgcatcctcagactgatccgaggggccaaggggatccgcacgctgctctttgccctcatgatgtccctgcctgccctcttcaacatcgggctgctgctcttcctcgtcatgttcatctactccatctttggcatggccaacttcgcttatgtcaagtgggaggctggcatcgacgacatgttcaacttccagaccttcgccaacagcatgctgtgcctcttccagatcaccacgtcggccggctgggatggcctcctcagccccatcctcaacactgggccgccctactgcgaccccactctgcccaacagcaatggctctcggggggactgcgggagcccagccgtgggcatcctcttcttcaccacctacatcatcatctccttcctcatcgtggtcaacatgtacattgccatcatcctggagaacttcagcgtggccacggaggagagcaccgagcccctgagtgaggacgacttcgatatgttctatgagatctgggagaaatttgacccagaggccactcagtttattgagtattcggtcctgtctgactttgccgatgccctgtctgagccactccgtatcgccaagcccaaccagataagcctcatcaacatggacctgcccatggtgagtggggaccgcatccattgcatggacattctctttgccttcaccaaaagggtcctgggggagtctggggagatggacgccctgaagatccagatggaggagaagttcatggcagccaacccatccaagatctcctacgagcccatcaccaccacactccggcgcaagcacgaagaggtgtcggccatggttatccagagagccttccgcaggcacctgctgcaacgctctttgaagcatgcctccttcctcttccgtcagcaggcgggcagcggcctctccgaagaggatgcccctgagcgagagggcctcatcgcctacgtgatgagtgagaacttctcccgaccccttggcccaccctccagctcctccatctcctccacttccttcccaccctcctatgacagtgtcactagagccaccagcgataacctccaggtgcgggggtctgactacagccacagtgaagatctcgccgacttccccccttctccggacagggaccgtgagtccatcgtgtgagcctcggcctggctggccaggacacactgaaaagcagcctttttcaccatggcaaacctaaatgcagtcagtcacaaaccagcctggggccttcctggctttgggagtaagaaatgggcctcagccccgcggatcaaccaggcagagttctgtggcgccgcgtggacagccggagcagttggcctgtgcttggaggcctcagatagacctgtgacctggtctggtcaggcaatgccctgcggctctggaaagcaacttcatcccagctgctgaggcgaaatataaaactgagactgtatatgttgtgaatgggctttcataaatttattatatttgatatttttttacttgagcaaagaactaaggatttttccatggacatgggcagcaattcacgctgtctcttcttaaccctgaacaagagtgtctatggagcagccggaagtctgttctcaaagcagaagtggaatccagtgtggctcccacaggtcttcactgcccaggggtcgaatggggtccccctcccacttgacctgagatgctgggagggctgaacccccactcacacaagcacacacacacagtcctcacacacggaggccagacacaggccgtgggacccaggctcccagcctaagggagacaggcctttccctgccggccccccaaggatggggttcttgtccacggggctcactctggccccctattgtctccaaggtcccattttccccctgtgttttcacgcaggtcatattgtcagtcctacaaaaataaaaggcttccagaggagagtggcctgggtcccagggctggccctaggcactgatagttgccttttcttcccctcctgtaagagtattaacaaaaccaaaggacacaagggtgcaagccccattcacggcctggcatgcagcttgtccttgctcctggaacctggcaggccctgcccagccagccatcggaagagagggctgagccatgggggtttggggctaagaagttcaccagccctgagccatggcggcccctcagcctgcctgaagagaggaaactggcgatctcccagggctctctggaccatacgcggaggagttttctgtgtggtctccagctcctctccagacacagagacatgggagtggggagcggagcttggccctgcgccctgtgcagggaaagggatggtcaggcccagttctcgtgcccttagaggggaatgaaccatggcacctttgagagagggggcactgtggtcaggcccagcctctctggctcagcccgggatcctgatggcacccacacagaggacctctttggggcaagatccaggtggtcccataggtcttgtgaaaaggctttttcagggaaaaatattttactagtccaatcacccccaggacctcttcagctgctgacaatcctatttagcatatgcaaatcttttaacatagagaactgtcaccctgaggtaacagggtcaactggcgaagcctgagcaggcaggggcttggctgccccattccagctctcccatggagcccctccaccgggcgcatgcctcccaggccacctcagtctcacctgccggctctgggctggctgctcctaacctacctcgccgagctgtcggagggctggacatttgtggcagtgctgaagggggcattgccggcgagtaaagtattatgtttcttcttgtcaccccagttcccttggtggcaaccccagacccaacccatgcccctgacagatctagttctcttctcctgtgttccctttgagtccagtgtgggacacggtttaactgtcccagcgacatttctccaagtggaaatcctatttttgtagatctccatgctttgctctcaaggcttggagaggtatgtgcccctcctgggtgctcaccgcctgctacacaggcaggaatgcggttgggaggcaggtcgggctgccagcccagctggccggaaggagactgtggtttttgtgtgtgtggacagcccgggagctttgagacaggtgcctggggctggctgcagacggtgtggttgggggtgggaggtgagctagacccaacccttagcttttagcctggctgtcacctttttaatttccagaactgcacaatgaccagcaggagggaaggacagacatcaagtgccagatgttgtctgaactaatcgagcacttctcaccaaacttcatgtataaataaaatacatatttttaaaacaaaccaataaatggcttacatga

SEQ ID NO: 39677 - DNA, 6051 bp, Artificial Sequence
  derived and/or modified sequence
atggcgaactttctattacctcgaggcaccagctcctttcggcgattcacacgggagtcgctggctgcgatagaaaagcgaatggccgagaagcaggctcgaggcagtaccacccttcaggaatcaagagaaggcctgcctgaggaagaggctccacgccctcagcttgatctacaggcctcaaagaaattgccagatttgtatggcaatcctcctcaagagctcatcggtgagcccctggaggaccttgatcctttttacagcacccagaaaacattcatagttctgaacaaaggtaaaaccatcttccgcttcagtgccactaacgccctctatgtgcttagccccttccacccgatacgtcgcgctgcagtgaaaattctggtgcactcattgtttaacatgttgattatgtgcacgattctcaccaattgtgtcttcatggcccagcacgatcctcccccctggacaaagtacgtggaatatactttcaccgctatctatacatttgagtcattggttaaaatcctcgcacgcggattttgtctgcacgcctttacgtttctaagagatccttggaactggctcgacttttcagtaatcatcatggcctacgttagtgagaacatcaagctcggtaaccttagcgcattgaggacttttcgggtcctcagagcattgaaaacgattagcgtaattcctggcctgaaaactatcgtgggagcccttatacaatcagtcaaaaaacttgccgacgtgatggttcttacagtgttttgcttgagcgtgtttgcactgattggactgcagcttttcatgggcaatctgaggcataaatgtgtccgcaacttcacagctctaaatggaaccaacggttctgtcgaagcagatggtcttgtttgggagtctctggacctgtacctctccgatccagaaaactatttactcaagaatggtacaagcgatgtcctgctctgcggaaattcgtcggatgctgggacctgcccagaaggttatcgatgcctgaaagctggcgagaatcccgatcacggctatacatcctttgacagcttcgcatgggcgtttttggccctttttcgtttgatgactcaggactgctgggagaggctctaccaacagactctcaggagcgctggtaagatctacatgatctttttcatgctcgtgatttttttaggcagtttttacctcgtcaacctgatcctggccgtggtggcgatggcatatgaggaacagaaccaagcaactatcgccgaaactgaggaaaaagagaagcgctttcaggaggccatggaaatgctgaaaaaagagcacgaagcactgactatacgcggagtcgacaccgtgtctcggagtagcctggagatgagccccctagcgccagtgaactctcatgagaggcgctctaaaaggcgcaaaaggatgagtagtggcaccgaagagtgcggagaggaccgcctaccaaaaagcgatagtgaggatggacctagagccatgaaccacctgtccctgaccagaggcttgtcgcgaacgtccatgaagccaagatcctctaggggttccattttcactttcagaagacgcgatctgggatctgaagccgacttcgctgacgacgagaacagcaccgccggcgagagcgaaagccaccacacttctctcctggtcccttggccactgcggcgtactagcgcacagggacagcctagccctggtacttctgcacctggccatgccctgcacggtaaaaagaatagcacagtggattgtaatggggtggtgtctctgcttggcgctggcgatccagaggcgaccagccccggttctcacctgctgcggcctgttatgctcgagcatccccccgacaccaccacaccttctgaggagccaggaggcccccaaatgctgacctcacaggcgccttgtgtggatggctttgaggagcctggcgcgaggcagcgggcattgtctgcggtgtccgtcttgaccagcgctttagaggagcttgaagagagccgtcataagtgtcccccgtgttggaaccggctggctcagaggtatctgatctgggagtgctgccctctttggatgagcatcaaacagggggttaaattggtagttatggaccccttcaccgacctgacaattactatgtgcatcgttttgaacacgctattcatggctctggagcattataatatgacttcggagtttgaagaaatgctgcaagttgggaacttggttttcaccggcatcttcactgctgaaatgacctttaaaatcatcgcgcttgatccctactactacttccaacaggggtggaatatttttgacagcatcatcgtgatcctctcccttatggagttagggctgtctaggatgtccaatctctcagtactcagaagttttcgactgttaagggtgttcaagctggccaagagctggccaaccttgaataccctcatcaagatcataggcaattcggtgggggcattgggtaacctcacacttgttctggctatcatcgtgtttattttcgccgtggttggaatgcaactgtttggaaaaaactactccgagctgcgggactctgactccggcttactgcctagatggcacatgatggatttcttccatgcctttcttatcatcttcaggatcctctgcggtgagtggattgaaacgatgtgggattgtatggaggtgagtggtcagagcttatgtctcttagtcttccttttagtgatggttataggcaacttggtggtccttaacctattcttggctcttctcctcagcagtttctcagcagataacctaacagctccggatgaagaccgagaaatgaataacctgcagctggcactcgccagaatccagcgcggtctgcggttcgttaagcgcactacatgggatttttgctgcggacttctccggcagcggccccagaagccggccgcgctagcagcccagggacagttgccttcgtgtatagccaccccttactcgccccccccacctgagaccgaaaaggtcccaccaacccgaaaggaaactcggtttgaagagggcgaacagcccggacagggcactccaggtgatcccgaacctgtgtgcgttccgattgcggtcgccgagtcagacacagacgatcaggaggaagacgaggagaacagcctgggtaccgaggaggaaagttcgaagcaacaggagtctcagccagtgtccggtgggcctgaggctcctcccgactcccgaacctggagtcaggttagtgctaccgcttcaagcgaagcagaagccagtgcaagccaagctgattggagacagcaatggaaagctgaaccccaggcacctggatgtggagaaactcccgaagatagctgcagtgaaggctcaaccgcggatatgactaacaccgccgagctgctggaacaaattcctgacctcggtcaggacgtgaaggacccagaggattgcttcacagagggatgcgtgagacggtgtccctgttgcgctgtggacaccacacaagctcctggcaaggtgtggtggcgcctacggaaaacttgctaccacatcgtcgagcattcttggttcgagacttttattatttttatgatcctcctgtcatctggggcacttgcattcgaagacatatatctggaagaacgtaagaccatcaaggtgctgcttgaatacgccgataaaatgttcacttacgtgttcgttctggagatgctgctcaaatgggtcgcctatggctttaagaagtattttacgaatgcatggtgttggctagacttcctgatcgtggacgtgagtctggtgagtctggtcgcaaatactcttggattcgctgaaatgggacctatcaagagtctgagaaccctccgcgccctgcgtcccctccgtgccctctcacgcttcgagggcatgagagtcgtggtgaacgcactggtgggtgctattcctagcatcatgaacgttctactggtgtgtctgattttttggcttatcttcagtattatgggagttaacttatttgccggcaagttcggtcggtgcatcaaccaaacagagggggacctcccacttaattacaccatcgtgaacaacaaatctcagtgcgaaagcctaaatttgacgggtgaactgtactggaccaaagtcaaggtcaattttgataacgtgggcgctggatatctggccctgctacaggtagctacattcaagggctggatggatatcatgtatgctgccgtggactcccggggctacgaggagcagccacaatgggagtacaatttatacatgtacatttattttgtcatcttcatcattttcggttctttcttcactttgaatttgttcatcggggtcattatcgataatttcaatcagcagaagaagaaactgggtggacaggacatcttcatgacagaagagcagaaaaagtattacaatgccatgaagaaactgggttctaaaaagccgcagaagccgattcccaggcccctcaacaagtaccaagggttcatcttcgatattgtaacaaaacaagcttttgatgtgaccatcatgttcctgatctgcctgaatatggttaccatgatggtggagacagatgatcaaagccctgagaagatcaatatcctcgccaaaatcaatctactgttcgtggccatctttaccggagagtgtatcgtgaaacttgcagctctgcgccattactacttcaccaacagctggaatatctttgatttcgttgtggtgattttatctatcgtgggcaccgtcctgtctgatattatccaaaaatactttttttcacccaccctgttccgcgtgatcagactggctagaattggacggattctgagactgataagaggcgcaaaggggatcaggacgctcttattcgccttaatgatgagcctccccgccctgtttaatatcggcctcttgctgtttttagtgatgttcatctacagcatcttcgggatggccaattttgcctatgtgaagtgggaagcagggatcgacgacatgttcaactttcagaccttcgcaaactcaatgttgtgcctttttcagatcacaacaagcgcagggtgggatgggctcctgagccctatcctgaatactggcccaccttactgtgatccaaccctccctaacagtaacgggtctagaggggattgtggtagccccgccgtaggcatactctttttcactacttacattattattagtttcctgattgttgtgaacatgtacattgcaataattcttgagaactttagtgtggctaccgaggaaagcacagagcctctcagcgaggacgattttgacatgttttatgagatctgggaaaaattcgacccggaagctacacaattcatcgagtactctgttctctctgactttgcggacgccctatcagagcccctccggatagcaaaaccaaaccagatttctctcattaacatggatctgccgatggtgagcggtgaccgcatacactgtatggatatcctgtttgccttcaccaagcgcgtgctgggtgaaagcggtgaaatggacgcacttaagatccagatggaggaaaaattcatggccgctaatccaagcaaaatttcttacgagccaatcactacaacactgaggagaaagcacgaggaagtttccgcaatggtcatccagcgggctttcaggcggcacctgctgcagcgttctctaaaacatgcatcctttctgttcagacaacaggccggctcaggcctgtcagaggaggatgcccccgagcgcgaaggcttaatcgcctatgtgatgtccgagaatttcagcaggcctcttggcccgccgtcaagcagctccatttcctccacatcttttccccctagttacgatagcgtgacgagagcaacatctgacaatcttcaggtccgtggatcagactatagccatagtgaggacctagcagacttcccccctagtcccgaccgagatagagagagtatcgtgtag

SEQ ID NO: 39678 - DNA, 6051 bp, Artificial Sequence
  derived and/or modified sequence
atggccaacttcctgctgccccggggcaccagcagcttccgccgcttcacccgggagagcctggccgccatcgagaagaggatggccgagaagcaggcccggggcagcaccaccctgcaggagagccgggagggcctgcctgaggaggaggccccccggccccagctggacctgcaggccagcaagaagctgcctgacctgtatggcaaccccccccaggagctgattggagagcccctggaggacctggaccccttctacagcacccagaagaccttcatcgtgctgaacaagggcaagaccatcttccgcttcagcgccaccaatgccctgtatgtgctgagccccttccaccccatcagaagagctgctgtgaagatcctggtgcacagcctcttcaacatgctgatcatgtgcaccatcctgaccaactgtgtgttcatggcccagcacgaccccccaccctggaccaagtatgtggagtacaccttcaccgccatctacacctttgagagcctggtgaagatcctggcccggggcttctgcctgcacgccttcaccttcctgcgggacccctggaactggctggacttcagcgtcatcatcatggcctacgtgtctgagaacatcaagctgggcaacctgagcgccctgcggaccttccgggtgctgcgggccctgaagaccatcagcgtcatccctggcctgaagaccatcgtgggcgccctgatccagagcgtgaagaagctggctgatgtgatggtgctgactgtgttctgcctgtctgtgtttgccctgattggcctgcagctgttcatgggcaacctgcggcacaagtgtgtgaggaacttcaccgccctgaatggcaccaatggatctgtggaggctgatggcctggtgtgggagagcctggacctgtacctgagtgaccctgagaactacctgctgaagaatggcaccagtgatgtgctgctgtgtggcaacagcagtgatgctggcacctgcccagagggctaccgctgcctgaaggccggggagaacccagaccacggctacaccagctttgacagctttgcctgggccttcctggccctcttccggctgatgacccaggactgctgggagcggctgtaccagcagaccctgcggtctgctgggaagatctacatgatcttcttcatgctggtgatcttcctgggcagcttctacctggtgaacctgatcctggccgtggtggccatggcctatgaggagcagaaccaggccaccatcgccgagacagaggagaaggagaagcgcttccaggaggccatggagatgctgaagaaggagcacgaggccctgaccatccggggcgtggacacagtgagccgcagcagcctggagatgagccccctggcccctgtgaacagccatgagcggcgcagcaagaggaggaagaggatgagcagcggcacagaggagtgtggagaagatcggctgcccaagagtgacagtgaagatggcccccgggccatgaaccacctgagcctgacccggggcctgagcaggacctccatgaagcccaggagcagccggggcagcatcttcaccttcagaagaagagacctgggcagcgaggccgactttgctgatgatgagaacagcacagctggggagagcgagagccaccacaccagcctgctggtgccctggcccctgcggaggaccagcgcccagggccagcccagccctggcaccagcgcccctggccacgccctgcacggcaagaagaacagcacagtggactgcaatggagtggtgtccctgctgggcgctggggaccctgaggccaccagccctggcagccacctgctgcggcctgtgatgctggagcaccccccagacaccaccacccccagcgaggagcccggcggcccccagatgctgaccagccaggccccctgtgtggatggctttgaggagcccggggcccggcagagggccctgtctgctgtgtctgtgctgaccagcgccctggaggagctggaggagagccgccacaagtgccccccctgctggaaccggctggcccagcgctacctgatctgggagtgctgccccctgtggatgagcatcaagcagggcgtgaagctggtggtgatggaccccttcacagacctgaccatcaccatgtgcatcgtgctgaacaccctcttcatggccctggagcactacaacatgaccagcgagtttgaggagatgctgcaggtgggcaacctggtgttcaccggcatcttcaccgctgagatgaccttcaagatcatcgccctggacccctactactacttccagcagggctggaacatctttgacagcatcatcgtcatcctgagcctgatggagctgggcctgagcaggatgagcaacctgtctgtgctgcgctccttccggctgctgcgggtcttcaagctggccaagtcctggcccaccctgaacaccctcatcaagatcatcggcaacagcgtgggcgccctgggcaacctgaccctggtgctggccatcatcgtgttcatctttgctgtggtgggcatgcagctgtttgggaagaactacagcgagctgcgggacagcgacagcggcctgctgccccgctggcacatgatggacttcttccacgccttcctgatcatcttccgcatcctgtgtggggagtggattgagaccatgtgggactgcatggaggtgtctggccagagcctgtgcctgctggtgttcctgctggtgatggtgattggcaacctggtggtgctgaacctcttcctggccctgctgctgagcagcttctctgctgacaacctgacagccccagatgaggaccgggagatgaacaacctgcagctggccctggcccgcatccagaggggcctgcgctttgtgaagaggaccacctgggacttctgctgcggcctgctgcggcagaggccccagaagccagctgccctggccgcccagggccagctgcccagctgcatcgccaccccctacagccccccacctcctgagacagagaaggtgccccccaccaggaaggagaccaggtttgaggagggggagcagcccggccagggcacccctggggaccctgagcctgtgtgtgtgcccatcgctgtggccgagagtgacacagatgaccaggaggaggatgaggagaacagcctgggcacagaggaggagagcagcaagcagcaggagagccagcctgtgtctgggggccctgaggcccccccagacagcaggacctggagccaggtgtctgccacagccagcagcgaggccgaggccagcgccagccaggccgactggaggcagcagtggaaggccgagccccaggcccctggctgtggggagaccccagaggacagctgcagcgagggcagcacagctgacatgaccaacacagctgagctgctggagcagatcccagacctgggccaggatgtgaaggaccctgaggactgcttcacagagggctgtgtgcggcgctgcccctgctgtgctgtggacaccacccaggcccctgggaaggtgtggtggaggctgaggaagacctgctaccacatcgtggagcacagctggtttgagaccttcatcatcttcatgatcctgctgagcagcggggccctggcctttgaggacatctacctggaggagaggaagaccatcaaggtgctgctggagtatgctgacaagatgttcacctacgtgtttgtgctggagatgctgctgaagtgggtggcctacggcttcaagaagtacttcaccaatgcctggtgctggctggacttcctgattgtggatgtgtccctggtgtccctggtggccaacaccctgggctttgctgagatgggccccatcaagagcctgcggaccctgcgggccctgcggcccctgcgggccctgagcagatttgagggcatgagggtggtggtgaatgccctggtgggcgccatccccagcatcatgaatgtgctgctggtgtgcctgatcttctggctgatcttcagcatcatgggcgtgaacctgtttgctgggaagtttggccgctgcatcaaccagacagaaggagacctgcccctgaactacaccatcgtgaacaacaagagccagtgtgagagcctgaacctgaccggggagctgtactggaccaaggtgaaggtgaactttgacaacgtgggcgccggctacctggccctgctgcaggtggccaccttcaagggctggatggacatcatgtatgctgctgtggacagccggggctatgaggagcagccccagtgggagtacaacctgtacatgtacatctacttcgtcatcttcatcatcttcggcagcttcttcaccctgaacctcttcatcggggtcatcatcgacaacttcaaccagcagaagaagaagctgggcggccaggacatcttcatgacagaggagcagaagaagtactacaatgccatgaagaagctgggcagcaagaagccccagaagcccatcccccggcccctgaacaagtaccagggcttcatctttgacatcgtgaccaagcaggcctttgatgtgaccatcatgttcctgatctgcctgaacatggtgaccatgatggtggagacagatgaccagagccctgagaagatcaacatcctggccaagatcaacctgctgtttgtggccatcttcaccggggagtgcatcgtgaagctggccgccctgcggcactactacttcaccaacagctggaacatctttgattttgtggtggtgatcctgagcatcgtgggcaccgtgctgagtgacatcatccagaagtacttcttcagccccaccctcttccgggtcatccggctggcccgcatcggccgcatcctgcggctcatccggggggccaagggcatccgcaccctgctgtttgccctgatgatgagcctgcctgccctcttcaacatcggcctgctgctcttcctggtgatgttcatctacagcatcttcggcatggccaactttgcctacgtgaagtgggaggccggcattgatgacatgttcaacttccagacctttgccaacagcatgctgtgcctcttccagatcaccaccagcgctggctgggatggcctgctgagccccatcctgaacacaggccccccctactgtgaccccaccctgcccaacagcaatggcagcagaggagactgtggcagccctgctgtgggcatcctcttcttcaccacctacatcatcatctccttcctgattgtggtgaacatgtacatcgccatcatcctggagaacttctctgtggccacagaggagagcacagagcccctgtctgaagatgactttgacatgttttatgagatctgggagaagtttgatcctgaggccacccagttcatcgagtacagcgtgctgagtgactttgctgatgccctgtctgagcccctgagaattgccaagcccaaccagatcagcctcatcaacatggacctgcccatggtgtctggggaccgcatccactgcatggacatcctgtttgccttcaccaagagggtgctgggggagagcggggagatggatgccctgaagatccagatggaggagaagttcatggccgccaaccccagcaagatctcctatgagcccatcaccaccaccctgcggaggaagcatgaggaggtgtctgccatggtgatccagagggccttcagaagacacctgctgcagaggagcctgaagcacgccagcttcctgttccggcagcaggccggcagcggcctgtctgaagaagatgcccctgagcgggagggcctcatcgcctacgtgatgtctgagaacttcagccggcccctgggcccccccagcagcagcagcatcagcagcaccagcttcccccccagctatgattctgtgacccgggccaccagtgacaacctgcaggtgcggggcagtgactacagccacagcgaggacctggccgacttcccccccagcccagaccgggaccgggagagcatcgtgtag

SEQ ID NO: 39679 - DNA, 6051 bp, Artificial Sequence
  derived and/or modified sequence
atggccaacttcctgctgccccggggcaccagcagcttccggcggtttacccgagagtcccttgcagccatcgagaaacggatggcagaaaaacaggccaggggctccaccacgctgcaggagtctcgggaagggctccccgaagaggaagccccccgtccccagctcgaccttcaggcgagcaagaaactgcccgacttatatgggaatcccccccaagaactaattggcgaaccactggaagacctggacccattctattctactcagaaaacgttcattgttctgaataagggtaagaccattttccggttctctgccaccaacgccctgtacgtgctgtcacctttccatccaatcagacgtgcagctgtgaagatcctcgtccattctctctttaacatgcttattatgtgcaccatcctcactaactgtgtgttcatggcccagcacgatccccccccctggacaaagtacgtggaatacacgttcactgcaatttacacttttgagtccctggtgaaaattttggctcgcggattttgtctgcacgcatttaccttcctgcgagacccatggaactggttggatttctctgttattattatggcatacgtctccgaaaatatcaaattgggaaatctgagcgccttacggacctttagagtgttgagagccctgaaaaccatctctgtgatcccaggcctcaagaccatcgtgggcgcccttatccagagtgttaagaaactcgcagacgtgatggtccttacggttttctgtctgtcggttttcgcattgattggtttgcaacttttcatgggcaacctgaggcacaaatgcgtgaggaattttaccgcgctgaatggaacaaatggcagcgttgaagccgacggccttgtgtgggagtcactggatttatacctaagtgacccggaaaactatctactgaagaacggcacgagcgacgtgctcctctgtggcaactcgtcagacgctggcacctgccccgaggggtataggtgtctcaaagccggagaaaacccggaccacggctacacaagcttcgacagtttcgcttgggcctttctcgccctgtttcgtcttatgacacaggattgctgggaaagattgtatcagcagactctccgttcggctgggaagatttatatgatcttcttcatgctagtgatctttcttgggtcgttttatctggtaaatctaatactggcagtggttgccatggcctacgaggagcagaaccaggccaccattgctgagaccgaggaaaaggaaaaacgctttcaagaggctatggaaatgcttaaaaaagagcatgaagccctgaccattaggggcgtcgacacggtgtcccggagctccttagagatgagccctcttgcacccgtgaatagtcacgaacgtagaagtaagcgaagaaagagaatgagctccggaaccgaggagtgcggggaagatcggctgccaaaatctgacagtgaggacgggcccagagccatgaaccatctgtccctgactagaggactctcacggacaagtatgaaaccacggtcctcgagagggtccatattcacatttagaagaagggatctggggtctgaggctgatttcgcagatgacgaaaactcgacagcaggagagtcagagtcacatcatacctctctacttgtgccatggcctctgcgccggacgtccgctcaaggccagcctagtcccggtaccagtgcccctgggcatgctctacatgggaagaagaatagtacagtggactgtaatggagtggtctcactgctgggcgcgggggaccctgaagcaacctccccaggatcacatctgctccggccggttatgctagagcatccacccgataccaccaccccctccgaagagcctggtggaccccagatgctgacaagccaggccccatgtgtcgacggatttgaggagcctggcgccagacaaagggccctttcagctgtcagcgtgctcacttccgcactggaggagctggaagaaagccgacataaatgtccaccttgctggaaccgcctggcacagagatatctcatttgggagtgctgtccattgtggatgagcatcaagcagggcgtaaagttggttgttatggacccattcactgacctgaccataaccatgtgcattgtgctgaataccctatttatggccctggaacactataatatgacgtctgagtttgaggagatgctgcaagtcggaaatctggtgttcaccggcattttcactgcggaaatgacattcaagatcatcgctctggacccatattactactttcaacaaggctggaacatcttcgatagcataatagtgatactgtctctgatggaactcggtctcagtaggatgagcaatctttctgtcctacgaagttttcggctgctgagggtattcaaattggcgaagtcttggcccacacttaatacgcttatcaagatcattggaaactccgtcggcgcactgggaaacctgacactggttttggccataatagtgttcattttcgccgttgttggcatgcagctgtttgggaaaaattatagcgagctccgagactcagatagtggtctgctacctagatggcacatgatggacttctttcatgctttccttatcatcttcaggattctgtgtggggaatggattgagacgatgtgggattgcatggaagtgtcaggccaatcactatgtctgttggtgttcttactggtcatggtgataggaaacctggtcgtgctgaacctgttcctggcactattgctgagtagtttttcagccgataacctgacagctcccgacgaagaccgcgagatgaataatctgcaactggcgctggcacggatccaacgaggcctgcgatttgtgaagagaaccacttgggacttctgctgtggcctgctccgccagcgaccacagaagcccgctgctttggctgcacaaggacagctgccaagctgcattgccaccccttatagtcccccccccccagaaacggaaaaagtcccaccaacccgcaaagagacccggttcgaggagggggagcagcctggccagggtactcccggagacccagaacccgtctgcgtgccgatcgccgtggcggaaagcgatacagacgaccaggaggaggatgaggagaacagcctcggcacagaggaggagagtagcaagcagcaggagtcacagccggtgtcgggcggccctgaggcaccaccagacagcagaacctggtcccaggtgtctgccacagcaagcagcgaggccgaggcatctgctagtcaggcagactggagacagcagtggaaggcagagccgcaggcaccgggctgcggagaaacgccagaggatagctgcagcgagggttccacagccgacatgactaacactgccgagttgctggaacagatacctgatctaggacaggatgtgaaagatcctgaggactgcttcacggaagggtgcgtgcgccggtgcccatgttgtgccgtcgataccacgcaggcacctggcaaggtttggtggaggttgcggaaaacttgctatcacattgtggagcactcttggttcgaaaccttcataatttttatgatcctcctgtcatctggcgcgttggcttttgaggacatatatctggaagaaagaaagacgattaaggtgcttctcgaatacgccgacaaaatgtttacatacgtctttgtccttgaaatgcttcttaaatgggtagcatacgggttcaagaagtactttaccaatgcatggtgttggttagactttttaatagtggacgtgtccctcgtttcactggttgcgaacacactgggcttcgcagagatgggccctataaagtcccttaggacgctccgcgctttgaggcctctgcgagccctgtcccgatttgagggcatgcgggtggttgtcaatgcactcgtgggtgccatcccgtctataatgaatgtgctactggtctgcctcattttctggttaatattctccattatgggagtcaacttgttcgctggcaagtttggtcggtgtattaaccagaccgaaggcgatcttcctctcaattacacaattgtcaacaacaagagccagtgtgagtccttaaaccttacaggcgagctttattggaccaaggtgaaagttaatttcgacaacgtgggagccgggtaccttgctctcctgcaggtcgctacttttaagggatggatggatatcatgtatgccgcggtcgattcccgggggtatgaggaacagccccaatgggagtacaatctttatatgtatatatacttcgtcatctttatcattttcggaagcttctttacactcaatctgtttatcggggttatcattgacaacttcaatcagcagaagaaaaagctgggcggacaggatatattcatgacagaagaacaaaagaaatattataatgccatgaaaaaactgggcagtaaaaaaccccagaaaccgataccgagacccctcaataagtatcagggcttcatctttgatatcgtgactaagcaggccttcgatgtgaccatcatgttcttgatctgtcttaatatggtaaccatgatggtggagaccgacgaccagtcacccgaaaagattaatatcctggccaaaataaatctgctgttcgtggcgatttttaccggcgagtgcattgtgaaactggccgctctgagacactattactttactaattcttggaatatctttgactttgtggttgtgatcttatcaatcgttggcaccgtgttatcagacattatccagaaatattttttctccccaacactcttccgggtgatcagattggctagaatcggccgcatcctgagactgattcgcggggccaaggggatccgtacgctgctgttcgctctgatgatgagcctgccagcactgtttaacatcggcctcttgttatttctcgtgatgttcatttactcgatcttcggtatggctaacttcgcctacgtcaagtgggaggctggaatcgatgacatgtttaactttcagacctttgctaattcaatgttgtgtctctttcagatcacaacctctgcgggatgggacggtttactatccccaattctgaacaccgggccgccctattgcgatcctaccctccccaactccaatggctcaaggggagactgcggttcccccgctgttggcattcttttcttcacaacttacatcatcatttccttcctgattgtggttaacatgtacatcgccatcatcctcgagaattttagtgtggcaaccgaagaatctacggagccacttagcgaggatgattttgatatgttctacgaaatttgggagaagttcgatccagaagccactcagtttattgaatatagcgttctctcagacttcgctgacgcactgagcgaaccactgagaattgctaagcctaaccagatctccctgataaatatggatttgcctatggtcagtggcgatcgcatacattgcatggacattctcttcgcattcaccaagcgagttctgggcgagtccggggaaatggacgctctgaagatccagatggaggaaaaattcatggccgctaaccccagcaagatttcttacgagcctatcaccaccactctgaggaggaagcacgaggaagtgtccgccatggtgatccagcgggcgtttaggaggcatctgcttcagcgcagcttgaagcatgctagcttcctattcagacagcaggccggctccggactctctgaagaagacgcaccagaacgcgagggtctcatcgcctacgtaatgtcagagaacttcagtcggcccctgggcccaccttcctcatccagcatatcatctactagtttcccaccgtcctacgactccgttacccgcgccacctcggataacttgcaggtccgaggtagtgactattcgcactctgaagacctggctgacttccctccctctcccgacagagaccgggagtccatcgtgtag

SEQ ID NO: 39680 - DNA, 6050 bp, Artificial Sequence
  derived and/or modified sequence
atggctaactttttgctgccaaggggcactagctccttcaggcggtttaccagagaatccctcgcagccattgaaaagcgtatggccgagaagcaggctagaggtagtaccacactgcaagagtctcgtgaaggcttaccagaggaggaagcccctcgcccacagctggacctccaggcgtccaagaaactgccagacctttacggcaatcccccacaggaactcatcggcgagccactggaggatctggaccccttctactcaacccagaagaccttcattgtgttaaacaaggggaaaaccatcttccgcttcagcgccacaaatgcgctctatgtgttgagtcccttccaccccatccgcagagctgctgtcaagattctcgtgcattcccttttcaatatgttgattatgtgtacaattttgaccaactgcgtgtttatggctcaacatgatcctccgccttggactaaatatgttgagtatacgtttacagcaatatacacctttgagagcttagtgaaaattctggctcggggattttgtttgcacgccttcacatttcttcgcgatccgtggaactggctggatttcagtgtcattatcatggcgtacgtgagcgaaaatattaaactggggaacttgagtgcccttcgaacattccgagttctccgtgctctgaaaacaatttccgtgattcccggtttaaaaacgatcgtgggagccctcattcagagcgtgaagaaacttgcagatgtgatggtgttgaccgtcttctgtctgtccgtgttcgccctgatcggcctgcagctgtttatgggaaatctccgacataaatgtgtgcgaaactttactgctctgaacggaacaaacggctccgttgaggccgatggattggtgtgggagagcttggatctttacttgtctgatcctgaaaactaccttttgaaaaacggtacttcggatgtgctgctgtgcggaaattcgtccgacgcgggaacttgcccggagggatacagatgtctgaaggcaggcgagaacccagatcatggttacacttcattcgattcgttcgcttgggcctttctggcattgtttcggttgatgacccaggattgctgggaacgtttatatcagcagaccctgcgctctgctggtaaaatttacatgatcttcttcatgctggtcattttcctcggatctttctacctggtcaacttaatccttgcagtggtcgctatggcctatgaagaacagaaccaggcaactattgcagagaccgaagagaaagagaaaagattccaggaagctatggaaatgttgaaaaaagagcatgaggcccttaccatccgaggggtcgatacagtctcgcgctcttcattggaaatgtccccactggcaccggttaacagccacgaaagacgatcaaaacggagaaagcgtatgtcttccggcactgaagagtgcggcgaggatcggctccccaaatccgactccgaggacggtcctagggccatgaaccatctgtccctgaccaggggactgtcccgaacgagcatgaaaccccgaagctcccgcggtagcattttcacctttaggaggagagacctcgggagtgaagcagacttcgccgacgatgaaaatagcaccgccggagagtcggagtcgcatcatacttcccttctggtgccttggcctctgaggcgtactagcgcccaagggcagccttctccgggaacttctgcccctgggcacgctttacacggcaaaaagaatagtacagtggactgcaatggcgtcgtcagcctgctcggcgcaggagatcccgaggccacaagcccaggatcccacctgctgcgcccagtgatgctggaacatccaccagatacaacaacaccctcagaggaacctggcggaccgcaaatgcttaccagtcaggccccttgcgttgacgggtttgaggagccaggtgctcgccagagagccctgagtgccgtttcggtcctcacaagcgcccttgaagaacttgaagagagtagacacaaatgccccccatgttggaaccgtttggctcaaaggtatctgatttgggagtgttgtccattgtggatgagtattaaacaaggggtgaagctggtcgtgatggatccgttcaccgacctcacgattacaatgtgcatcgttctcaacactctgttcatggccctggagcactataacatgacctcggagttcgaagagatgttacaggtcggcaaccttgtgtttaccgggatttttacagccgaaatgacctttaagatcattgctctggatccatattattactttcagcagggttggaacatttttgacagtatcatcgtgattctttccctgatggagctggggcttagcagaatgagcaacctctctgtcctccgaagctttcgtctcctccgcgtattcaagctggccaaaagctggcctactctcaacaccttgattaaaattattggcaactccgtcggggcactaggcaacctgacgctggtgctggcaatcatcgtctttattttcgccgtggtgggtatgcagctttttggtaagaattactccgaactgagagactccgactcggggctcctgccacgctggcatatgatggacttctttcacgcttttctgattatcttccggattctgtgcggagagtggattgagacaatgtgggactgcatggaggtgtccgggcagtctttgtgcttgctggttttcctgcttgtcatggtcataggaaatttggtggtattgaacctgtttctggccttacttctatcctctttcagcgccgataatctgaccgcaccagacgaagaccgcgagatgaataatctgcagctggccctcgcccgaatccaacgcggactgcgctttgttaagcggacaacctgggacttctgctgcggcctgctgcgccagagaccacaaaaacccgctgctctggctgctcaggggcaactgccctcctgtatcgcaacgccttacagccctccgcctccggagaccgagaaggttccacctacacgaaaggaaacacggtttgaggaaggagaacagccaggccagggaactcctggcgaccccgaacctgtgtgcgtacctatcgccgtcgctgagagcgacaccgatgaccaggaagaggatgaagagaactcactgggcaccgaggaggagtccagtaaacaacaggaaagccaaccggtgtctggcggaccagaggcaccaccggactctcgtacgtggagccaggtcagcgccactgcctcatctgaagccgaagcgtccgcctctcaggcagactggcggcaacagtggaaagcggaaccacaggctcccggatgtggcgagacccccgaggacagttgctccgaaggcagcactgccgatatgaccaatactgccgagcttctggaacaaatcccagatctggggcaagacgtcaaggacccagaagattgcttcactgaaggctgcgtacgtagatgtccatgctgcgccgtcgacacgacccaggcgccaggcaaggtttggtggcgcctaagaaaaacctgctatcatattgtggaacacagttggtttgagactttcatcatctttatgatcctgctgtccagcggcgcactggcattcgaagacatctacctggaagagcgcaagaccattaaagtcctcttagaatacgccgataagatgtttacctacgtcttcgtcctcgagatgctgctaaaatgggtcgcgtatggcttcaaaaaatattttaccaacgcctggtgctggctcgatttcctcatcgtggacgtgagtctagtcagcctcgtggcaaacactttgggtttcgcagagatgggccctatcaaatctctcagaacactgagagctctacggcctcttcgagctctgtcgcgcttcgagggtatgagggtagtcgttaatgccctcgtaggtgccattccgtccataatgaatgtgctgttggtctgcctgatcttctggctgatcttttcaatcatgggagttaacctgtttgcaggcaaatttggccgatgcatcaaccaaaccgagggggatttacccctaaactataccattgtgaataacaagagccagtgtgagagtctcaatctcacaggcgagctctattggaccaaagtgaaggtgaactttgataatgtgggtgcaggctacttggcgcttcttcaggtggccacgtttaagggttggatggatatcatgtatgcagctgtggattcgcggggatacgaagaacagccacaatgggagtacaatctttacatgtacatctattttgtgatcttcatcatctttggctctttcttcacactgaacctgttcatcggggtaatcatcgacaattttaaccagcagaaaaaaaaacttggcggtcaggatatattcatgacagaagagcagaagaagtactacaacgcgatgaaaaagctgggctccaaaaaaccacagaaacccatccctcgcccactaaataaataccaaggttttattttcgatatcgtaactaagcaggccttcgatgtgacaatcatgtttctcatttgcctgaatatggtgaccatgatggtggagactgacgaccagtccccagagaagattaatatcttagcaaagataaatctcctatttgtggccatattcaccggggagtgcattgtaaagctagccgctttgcggcattactacttcacgaattcctggaacatattcgactttgtggtcgttatattaagtattgtcggcaccgttttgtctgacattatacagaagtattttttcagccctacactgttccgggtgattagacttgcgaggatcggcaggatcttgcgattgatcagaggtgcgaagggtatcagaaccctgctgtttgcactcatgatgagcctgcccgctctgttcaacattggactcctccttttcctcgtgatgttcatctatagtatattcggcatggctaactttgcctatgttaaatgggaagccggaatcgatgatatgtttaactttcagacttttgctaacagtatgctctgcctgttccagatcactacgagtgctggatgggacgggctgctatctcccattttaaacaccgggccaccctattgtgaccccacactgcccaattcaaacgggagccgcggagattgcggttcaccagcggtggggattttatttttcaccacatacatcataatttcttttcttattgttgtaaacatgtacatcgctatcatcctggagaacttttctgtggccactgaggaatccaccgaacccctgtctgaagatgatttcgatatgttctacgagatatgggagaagtttgaccccgaggcaactcaattcatcgaatactctgtgctttccgacttcgcggacgctttaagcgaacctttgcggatagccaaaccgaaccagatctcattaataaatatggatctgcccatggtgtcaggcgaccgtattcactgcatggacatcctgttcgcattcaccaagcgcgtgctcggcgagtccggagagatggatgccctgaagattcaaatggaggagaagtttatggcggctaacccaagtaagatcagctatgagccgataaccacaactttgcggagaaaacatgaggaagtgtccgccatggttatccagcgagcctttcgtcggcacctgctgcagcgttctctcaagcacgcctcttttttgttccgccaacaggctgggagcggtctgtctgaagaagacgctccagagagagaggggttaatcgcctacgtgatgagcgaaaacttctcgcggccactgggacctccaagcagttccagcattagttctactagttttcctcccagctacgacagcgtgacccgagccaccagtgacaacctgcaagttagggggagcgactattctcactctgaggatctagcagatttcccaccatctcctgatcgggatcgagaatccatcgtgta

SEQ ID NO: 39681 - DNA, 6051 bp, Artificial Sequence
  derived and/or modified sequence
atggccaacttcctgctgcccagaggcaccagcagcttcagaagattcaccagagagagcctggccgccatcgagaagagaatggccgagaagcaggccagaggcagcaccaccctgcaggagagcagagagggcctgcccgaggaggaggcccccagaccccagctggacctgcaggccagcaagaagctgcccgacctgtacggcaaccccccccaggagctgatcggcgagcccctggaggacctggaccccttctacagcacccagaagaccttcatcgtgctgaacaagggcaagaccatcttcagattcagcgccaccaacgccctgtacgtgctgagccccttccaccccatcagaagagccgccgtgaagatcctggtgcacagcctgttcaacatgctgatcatgtgcaccatcctgaccaactgcgtgttcatggcccagcacgacccccccccctggaccaagtacgtggagtacaccttcaccgccatctacaccttcgagagcctggtgaagatcctggccagaggcttctgcctgcacgccttcaccttcctgagagacccctggaactggctggacttcagcgtgatcatcatggcctacgtgagcgagaacatcaagctgggcaacctgagcgccctgagaaccttcagagtgctgagagccctgaagaccatcagcgtgatccccggcctgaagaccatcgtgggcgccctgatccagagcgtgaagaagctggccgacgtgatggtgctgaccgtgttctgcctgagcgtgttcgccctgatcggcctgcagctgttcatgggcaacctgagacacaagtgcgtgagaaacttcaccgccctgaacggcaccaacggcagcgtggaggccgacggcctggtgtgggagagcctggacctgtacctgagcgaccccgagaactacctgctgaagaacggcaccagcgacgtgctgctgtgcggcaacagcagcgacgccggcacctgccccgagggctacagatgcctgaaggccggcgagaaccccgaccacggctacaccagcttcgacagcttcgcctgggccttcctggccctgttcagactgatgacccaggactgctgggagagactgtaccagcagaccctgagaagcgccggcaagatctacatgatcttcttcatgctggtgatcttcctgggcagcttctacctggtgaacctgatcctggccgtggtggccatggcctacgaggagcagaaccaggccaccatcgccgagaccgaggagaaggagaagagattccaggaggccatggagatgctgaagaaggagcacgaggccctgaccatcagaggcgtggacaccgtgagcagaagcagcctggagatgagccccctggcccccgtgaacagccacgagagaagaagcaagagaagaaagagaatgagcagcggcaccgaggagtgcggcgaggacagactgcccaagagcgacagcgaggacggccccagagccatgaaccacctgagcctgaccagaggcctgagcagaaccagcatgaagcccagaagcagcagaggcagcatcttcaccttcagaagaagagacctgggcagcgaggccgacttcgccgacgacgagaacagcaccgccggcgagagcgagagccaccacaccagcctgctggtgccctggcccctgagaagaaccagcgcccagggccagcccagccccggcaccagcgcccccggccacgccctgcacggcaagaagaacagcaccgtggactgcaacggcgtggtgagcctgctgggcgccggcgaccccgaggccaccagccccggcagccacctgctgagacccgtgatgctggagcacccccccgacaccaccacccccagcgaggagcccggcggcccccagatgctgaccagccaggccccctgcgtggacggcttcgaggagcccggcgccagacagagagccctgagcgccgtgagcgtgctgaccagcgccctggaggagctggaggagagcagacacaagtgccccccctgctggaacagactggcccagagatacctgatctgggagtgctgccccctgtggatgagcatcaagcagggcgtgaagctggtggtgatggaccccttcaccgacctgaccatcaccatgtgcatcgtgctgaacaccctgttcatggccctggagcactacaacatgaccagcgagttcgaggagatgctgcaggtgggcaacctggtgttcaccggcatcttcaccgccgagatgaccttcaagatcatcgccctggacccctactactacttccagcagggctggaacatcttcgacagcatcatcgtgatcctgagcctgatggagctgggcctgagcagaatgagcaacctgagcgtgctgagaagcttcagactgctgagagtgttcaagctggccaagagctggcccaccctgaacaccctgatcaagatcatcggcaacagcgtgggcgccctgggcaacctgaccctggtgctggccatcatcgtgttcatcttcgccgtggtgggcatgcagctgttcggcaagaactacagcgagctgagagacagcgacagcggcctgctgcccagatggcacatgatggacttcttccacgccttcctgatcatcttcagaatcctgtgcggcgagtggatcgagaccatgtgggactgcatggaggtgagcggccagagcctgtgcctgctggtgttcctgctggtgatggtgatcggcaacctggtggtgctgaacctgttcctggccctgctgctgagcagcttcagcgccgacaacctgaccgcccccgacgaggacagagagatgaacaacctgcagctggccctggccagaatccagagaggcctgagattcgtgaagagaaccacctgggacttctgctgcggcctgctgagacagagaccccagaagcccgccgccctggccgcccagggccagctgcccagctgcatcgccaccccctacagcccccccccccccgagaccgagaaggtgccccccaccagaaaggagaccagattcgaggagggcgagcagcccggccagggcacccccggcgaccccgagcccgtgtgcgtgcccatcgccgtggccgagagcgacaccgacgaccaggaggaggacgaggagaacagcctgggcaccgaggaggagagcagcaagcagcaggagagccagcccgtgagcggcggccccgaggccccccccgacagcagaacctggagccaggtgagcgccaccgccagcagcgaggccgaggccagcgccagccaggccgactggagacagcagtggaaggccgagccccaggcccccggctgcggcgagacccccgaggacagctgcagcgagggcagcaccgccgacatgaccaacaccgccgagctgctggagcagatccccgacctgggccaggacgtgaaggaccccgaggactgcttcaccgagggctgcgtgagaagatgcccctgctgcgccgtggacaccacccaggcccccggcaaggtgtggtggagactgagaaagacctgctaccacatcgtggagcacagctggttcgagaccttcatcatcttcatgatcctgctgagcagcggcgccctggccttcgaggacatctacctggaggagagaaagaccatcaaggtgctgctggagtacgccgacaagatgttcacctacgtgttcgtgctggagatgctgctgaagtgggtggcctacggcttcaagaagtacttcaccaacgcctggtgctggctggacttcctgatcgtggacgtgagcctggtgagcctggtggccaacaccctgggcttcgccgagatgggccccatcaagagcctgagaaccctgagagccctgagacccctgagagccctgagcagattcgagggcatgagagtggtggtgaacgccctggtgggcgccatccccagcatcatgaacgtgctgctggtgtgcctgatcttctggctgatcttcagcatcatgggcgtgaacctgttcgccggcaagttcggcagatgcatcaaccagaccgagggcgacctgcccctgaactacaccatcgtgaacaacaagagccagtgcgagagcctgaacctgaccggcgagctgtactggaccaaggtgaaggtgaacttcgacaacgtgggcgccggctacctggccctgctgcaggtggccaccttcaagggctggatggacatcatgtacgccgccgtggacagcagaggctacgaggagcagccccagtgggagtacaacctgtacatgtacatctacttcgtgatcttcatcatcttcggcagcttcttcaccctgaacctgttcatcggcgtgatcatcgacaacttcaaccagcagaagaagaagctgggcggccaggacatcttcatgaccgaggagcagaagaagtactacaacgccatgaagaagctgggcagcaagaagccccagaagcccatccccagacccctgaacaagtaccagggcttcatcttcgacatcgtgaccaagcaggccttcgacgtgaccatcatgttcctgatctgcctgaacatggtgaccatgatggtggagaccgacgaccagagccccgagaagatcaacatcctggccaagatcaacctgctgttcgtggccatcttcaccggcgagtgcatcgtgaagctggccgccctgagacactactacttcaccaacagctggaacatcttcgacttcgtggtggtgatcctgagcatcgtgggcaccgtgctgagcgacatcatccagaagtacttcttcagccccaccctgttcagagtgatcagactggccagaatcggcagaatcctgagactgatcagaggcgccaagggcatcagaaccctgctgttcgccctgatgatgagcctgcccgccctgttcaacatcggcctgctgctgttcctggtgatgttcatctacagcatcttcggcatggccaacttcgcctacgtgaagtgggaggccggcatcgacgacatgttcaacttccagaccttcgccaacagcatgctgtgcctgttccagatcaccaccagcgccggctgggacggcctgctgagccccatcctgaacaccggccccccctactgcgaccccaccctgcccaacagcaacggcagcagaggcgactgcggcagccccgccgtgggcatcctgttcttcaccacctacatcatcatcagcttcctgatcgtggtgaacatgtacatcgccatcatcctggagaacttcagcgtggccaccgaggagagcaccgagcccctgagcgaggacgacttcgacatgttctacgagatctgggagaagttcgaccccgaggccacccagttcatcgagtacagcgtgctgagcgacttcgccgacgccctgagcgagcccctgagaatcgccaagcccaaccagatcagcctgatcaacatggacctgcccatggtgagcggcgacagaatccactgcatggacatcctgttcgccttcaccaagagagtgctgggcgagagcggcgagatggacgccctgaagatccagatggaggagaagttcatggccgccaaccccagcaagatcagctacgagcccatcaccaccaccctgagaagaaagcacgaggaggtgagcgccatggtgatccagagagccttcagaagacacctgctgcagagaagcctgaagcacgccagcttcctgttcagacagcaggccggcagcggcctgagcgaggaggacgcccccgagagagagggcctgatcgcctacgtgatgagcgagaacttcagcagacccctgggcccccccagcagcagcagcatcagcagcaccagcttcccccccagctacgacagcgtgaccagagccaccagcgacaacctgcaggtgagaggcagcgactacagccacagcgaggacctggccgacttcccccccagccccgacagagacagagagagcatcgtgtag

SEQ ID NO: 39682 - protein, 1998 aa, Artificial Sequence
  derived and/or modified sequence
MANFLLPRGTSSFRRFTRESLAAIEKRMAEKQARGSTTLQESREGLPEEEAPRPQLDLQASKKLPDLYGNPPQELIGEPLEDLDPFYSTQKTFIVLNKGKTIFRFSATNALYVLSPFHPIRRAAVKILVHSLFNMLIMCTILTNCVFMAQHDPPPWTKYVEYTFTAIYTFESLVKILARGFCLHAFTFLRDPWNWLDFSVIIMAYVSENIKLGNLSALRTFRVLRALKTISVIPGLKTIVGALIQSVKKLADVMVLTVFCLSVFALIGLQLFMGNLRHKCVRNFTALNGTNGSVEADGLVWESLDLYLSDPENYLLKNGTSDVLLCGNSSDAGTCPEGYRCLKAGENPDHGYTSFDSFAWAFLALFRLMTQDCWERLYQQTLRSAGKIYMIFFMLVIFLGSFYLVNLILAVVAMAYEEQNQATIAETEEKEKRFQEAMEMLKKEHEALTIRGVDTVSRSSLEMSPLAPVNSHERRSKRRKRMSSGTEECGEDRLPKSDSEDGPRAMNHLSLTRGLSRTSMKPRSSRGSIFTFRRRDLGSEADFADDENSTAGESESHHTSLLVPWPLRRTSAQGQPSPGTSAPGHALHGKKNSTVDCNGVVSLLGAGDPEATSPGSHLLRPVMLEHPPDTTTPSEEPGGPQMLTSQAPCVDGFEEPGARQRALSAVSVLTSALEELEESRHKCPPCWNRLAQRYLIWECCPLWMSIKQGVKLVVMDPFTDLTITMCIVLNTLFMALEHYNMTSEFEEMLQVGNLVFTGIFTAEMTFKIIALDPYYYFQQGWNIFDSIIVILSLMELGLSRMSNLSVLRSFRLLRVFKLAKSWPTLNTLIKIIGNSVGALGNLTLVLAIIVFIFAVVGMQLFGKNYSELRDSDSGLLPRWHMMDFFHAFLIIFRILCGEWIETMWDCMEVSGQSLCLLVFLLVMVIGNLVVLNLFLALLLSSFSADNLTAPDEDREMNNLQLALARIQRGLRFVKRTTWDFCCGLLRQRPQKPAALAAQGQLPSCIATPYSPPPPETEKVPPTRKETRFEEGEQPGQGTPGDPEPVCVPIAVAESDTDDQEEDEENSLGTEEESSKQQESQPVSGGPEAPPDSRTWSQVSATASSEAEASASQADWRQQWKAEPQAPGCGETPEDSCSEGSTADMTNTAELLEQIPDLGQDVKDPEDCFTEGCVRRCPCCAVDTTQAPGKVWWRLRKTCYHIVEHSWFETFIIFMILLSSGALAFEDIYLEERKTIKVLLEYADKMFTYVFVLEMLLKWVAYGFKKYFTNAWCWLDFLIVDVSLVSLVANTLGFAEMGPIKSLRTLRALRPLRALSRFEGMRVVVNALVGAIPSIMNVLLVCLIFWLIFSIMGVNLFAGKFGRCINQTEGDLPLNYTIVNNKSQCESLNLTGELYWTKVKVNFDNVGAGYLALLQVYEEQPQWEYNLYMYIYFVIFIIFGSFFTLNLFIGVIIDNFNQQKKKLGGQDIFMTEEQKKYYNAMKKLGSKKPQKPIPRPLNKYQGFIFDIVTKQAFDVTIMFLICLNMVTMMVETDDQSPEKINILAKINLLFVAIFTGECIVKLAALRHYYFTNSWNIFDFVVVILSIVGTVLSDIIQKYFFSPTLFRVIRLARIGRILRLIRGAKGIRTLLFALMMSLPALFNIGLLLFLVMFIYSIFGMANFAYVKWEAGIDDMFNFQTFANSMLCLFQITTSAGWDGLLSPILNTGPPYCDPTLPNSNGSRGDCGSPAVGILFFTTYIIISFLIVVNMYIAIILENFSVATEESTEPLSEDDFDMFYEIWEKFDPEATQFIEYSVLSDFADALSEPLRIAKPNQISLINMDLPMVSGDRIHCMDILFAFTKRVLGESGEMDALKIQMEEKFMAANPSKISYEPITTTLRRKHEEVSAMVIQRAFRRHLLQRSLKHASFLFRQQAGSGLSEEDAPEREGLIAYVMSENFSRPLGPPSSSSISSTSFPPSYDSVTRATSDNLQVRGSDYSHSEDLADFPPSPDRDRESIV

SEQ ID NO: 39683 - DNA, 8450 bp, Artificial Sequence
  derived and/or modified sequence
agacggcggcggcgcccgtaggatgcagggatcgctcccccggggccgctgagcctgcgcccagtgccccgagccccgcgccgagccgagtccgcgccaagcagcagccgcccaccccggggcccggccgggggaccagcagcttccccacaggcaacgtgaggagagcctgtgcccagaagcaggatgagaagatggcaaacttcctattacctcggggcaccagcagcttccgcaggttcacacgggagtccctggcagccatcgagaagcgcatggcagagaagcaagcccgcggctcaaccaccttgcaggagagccgagaggggctgcccgaggaggaggctccccggccccagctggacctgcaggcctccaaaaagctgccagatctctatggcaatccaccccaagagctcatcggagagcccctggaggacctggaccccttctatagcacccaaaagactttcatcgtactgaataaaggcaagaccatcttccggttcagtgccaccaacgccttgtatgtcctcagtcccttccaccccatccggagagcggctgtgaagattctggttcactcgctcttcaacatgctcatcatgtgcaccatcctcaccaactgcgtgttcatggcccagcacgaccctccaccctggaccaagtatgtcgagtacaccttcaccgccatttacacctttgagtctctggtcaagattctggctcgaggcttctgcctgcacgcgttcactttccttcgggacccatggaactggctggactttagtgtgattatcatggcgtatgtatcagaaaatataaaactaggcaatttgtcggctcttcgaactttcagagtcctgagagctctaaaaactatttcagttatcccagggctgaagaccatcgtgggggccctgatccagtctgtgaagaagctggctgatgtgatggtcctcacagtcttctgcctcagcgtctttgccctcatcggcctgcagctcttcatgggcaacctaaggcacaagtgcgtgcgcaacttcacagcgctcaacggcaccaacggctccgtggaggccgacggcttggtctgggaatccctggacctttacctcagtgatccagaaaattacctgctcaagaacggcacctctgatgtgttactgtgtgggaacagctctgacgctgggacatgtccggagggctaccggtgcctaaaggcaggcgagaaccccgaccacggctacaccagcttcgattcctttgcctgggcctttcttgcactcttccgcctgatgacgcaggactgctgggagcgcctctatcagcagaccctcaggtccgcagggaagatctacatgatcttcttcatgcttgtcatcttcctggggtccttctacctggtgaacctgatcctggccgtggtcgcaatggcctatgaggagcaaaaccaagccaccatcgctgagaccgaggagaaggaaaagcgcttccaggaggccatggaaatgctcaagaaagaacacgaggccctcaccatcaggggtgtggataccgtgtcccgtagctccttggagatgtcccctttggccccagtaaacagccatgagagaagaagcaagaggagaaaacggatgtcttcaggaactgaggagtgtggggaggacaggctccccaagtctgactcagaagatggtcccagagcaatgaatcatctcagcctcacccgtggcctcagcaggacttctatgaagccacgttccagccgcgggagcattttcacctttcgcaggcgagacctgggttctgaagcagattttgcagatgatgaaaacagcacagcgggggagagcgagagccaccacacatcactgctggtgccctggcccctgcgccggaccagtgcccagggacagcccagtcccggaacctcggctcctggccacgccctccatggcaaaaagaacagcactgtggactgcaatggggtggtctcattactgggggcaggcgacccagaggccacatccccaggaagccacctcctccgccctgtgatgctagagcacccgccagacacgaccacgccatcggaggagccaggcgggccccagatgctgacctcccaggctccgtgtgtagatggcttcgaggagccaggagcacggcagcgggccctcagcgcagtcagcgtcctcaccagcgcactggaagagttagaggagtctcgccacaagtgtccaccatgctggaaccgtctcgcccagcgctacctgatctgggagtgctgcccgctgtggatgtccatcaagcagggagtgaagttggtggtcatggacccgtttactgacctcaccatcactatgtgcatcgtactcaacacactcttcatggcgctggagcactacaacatgacaagtgaattcgaggagatgctgcaggtcggaaacctggtcttcacagggattttcacagcagagatgaccttcaagatcattgccctcgacccctactactacttccaacagggctggaacatcttcgacagcatcatcgtcatccttagcctcatggagctgggcctgtcccgcatgagcaacttgtcggtgctgcgctccttccgcctgctgcgggtcttcaagctggccaaatcatggcccaccctgaacacactcatcaagatcatcgggaactcagtgggggcactggggaacctgacactggtgctagccatcatcgtgttcatctttgctgtggtgggcatgcagctctttggcaagaactactcggagctgagggacagcgactcaggcctgctgcctcgctggcacatgatggacttctttcatgccttcctcatcatcttccgcatcctctgtggagagtggatcgagaccatgtgggactgcatggaggtgtcggggcagtcattatgcctgctggtcttcttgcttgttatggtcattggcaaccttgtggtcctgaatctcttcctggccttgctgctcagctccttcagtgcagacaacctcacagcccctgatgaggacagagagatgaacaacctccagctggccctggcccgcatccagaggggcctgcgctttgtcaagcggaccacctgggatttctgctgtggtctcctgcggcagcggcctcagaagcccgcagcccttgccgcccagggccagctgcccagctgcattgccaccccctactccccgccacccccagagacggagaaggtgcctcccacccgcaaggaaacacggtttgaggaaggcgagcaaccaggccagggcacccccggggatccagagcccgtgtgtgtgcccatcgctgtggccgagtcagacacagatgaccaagaagaagatgaggagaacagcctgggcacggaggaggagtccagcaagcagcaggaatcccagcctgtgtccggtggcccagaggcccctccggattccaggacctggagccaggtgtcagcgactgcctcctctgaggccgaggccagtgcatctcaggccgactggcggcagcagtggaaagcggaaccccaggccccagggtgcggtgagaccccagaggacagttgctccgagggcagcacagcagacatgaccaacaccgctgagctcctggagcagatccctgacctcggccaggatgtcaaggacccagaggactgcttcactgaaggctgtgtccggcgctgtccctgctgtgcggtggacaccacacaggccccagggaaggtctggtggcggttgcgcaagacctgctaccacatcgtggagcacagctggttcgagacattcatcatcttcatgatcctactcagcagtggagcgctggccttcgaggacatctacctagaggagcggaagaccatcaaggttctgcttgagtatgccgacaagatgttcacatatgtcttcgtgctggagatgctgctcaagtgggtggcctacggcttcaagaagtacttcaccaatgcctggtgctggctcgacttcctcatcgtagacgtctctctggtcagcctggtggccaacaccctgggctttgccgagatgggccccatcaagtcactgcggacgctgcgtgcactccgtcctctgagagctctgtcacgatttgagggcatgagggtggtggtcaatgccctggtgggcgccatcccgtccatcatgaacgtcctcctcgtctgcctcatcttctggctcatcttcagcatcatgggcgtgaacctctttgcggggaagtttgggaggtgcatcaaccagacagagggagacttgcctttgaactacaccatcgtgaacaacaagagccagtgtgagtccttgaacttgaccggagaattgtactggaccaaggtgaaagtcaactttgacaacgtgggggccgggtacctggcccttctgcaggtgtatgaagagcagcctcagtgggaatacaacctctacatgtacatctattttgtcattttcatcatctttgggtctttcttcaccctgaacctctttattggtgtcatcattgacaacttcaaccaacagaagaaaaagttagggggccaggacatcttcatgacagaggagcagaagaagtactacaatgccatgaagaagctgggctccaagaagccccagaagcccatcccacggcccctgaacaagtaccagggcttcatattcgacattgtgaccaagcaggcctttgacgtcaccatcatgtttctgatctgcttgaatatggtgaccatgatggtggagacagatgaccaaagtcctgagaaaatcaacatcttggccaagatcaacctgctctttgtggccatcttcacaggcgagtgtattgtcaagctggctgccctgcgccactactacttcaccaacagctggaatatcttcgacttcgtggttgtcatcctctccatcgtgggcactgtgctctcggacatcatccagaagtacttcttctccccgacgctcttccgagtcatccgcctggcccgaataggccgcatcctcagactgatccgaggggccaaggggatccgcacgctgctctttgccctcatgatgtccctgcctgccctcttcaacatcgggctgctgctcttcctcgtcatgttcatctactccatctttggcatggccaacttcgcttatgtcaagtgggaggctggcatcgacgacatgttcaacttccagaccttcgccaacagcatgctgtgcctcttccagatcaccacgtcggccggctgggatggcctcctcagccccatcctcaacactgggccgccctactgcgaccccactctgcccaacagcaatggctctcggggggactgcgggagcccagccgtgggcatcctcttcttcaccacctacatcatcatctccttcctcatcgtggtcaacatgtacattgccatcatcctggagaacttcagcgtggccacggaggagagcaccgagcccctgagtgaggacgacttcgatatgttctatgagatctgggagaaatttgacccagaggccactcagtttattgagtattcggtcctgtctgactttgccgatgccctgtctgagccactccgtatcgccaagcccaaccagataagcctcatcaacatggacctgcccatggtgagtggggaccgcatccattgcatggacattctctttgccttcaccaaaagggtcctgggggagtctggggagatggacgccctgaagatccagatggaggagaagttcatggcagccaacccatccaagatctcctacgagcccatcaccaccacactccggcgcaagcacgaagaggtgtcggccatggttatccagagagccttccgcaggcacctgctgcaacgctctttgaagcatgcctccttcctcttccgtcagcaggcgggcagcggcctctccgaagaggatgcccctgagcgagagggcctcatcgcctacgtgatgagtgagaacttctcccgaccccttggcccaccctccagctcctccatctcctccacttccttcccaccctcctatgacagtgtcactagagccaccagcgataacctccaggtgcgggggtctgactacagccacagtgaagatctcgccgacttccccccttctccggacagggaccgtgagtccatcgtgtgagcctcggcctggctggccaggacacactgaaaagcagcctttttcaccatggcaaacctaaatgcagtcagtcacaaaccagcctggggccttcctggctttgggagtaagaaatgggcctcagccccgcggatcaaccaggcagagttctgtggcgccgcgtggacagccggagcagttggcctgtgcttggaggcctcagatagacctgtgacctggtctggtcaggcaatgccctgcggctctggaaagcaacttcatcccagctgctgaggcgaaatataaaactgagactgtatatgttgtgaatgggctttcataaatttattatatttgatatttttttacttgagcaaagaactaaggatttttccatggacatgggcagcaattcacgctgtctcttcttaaccctgaacaagagtgtctatggagcagccggaagtctgttctcaaagcagaagtggaatccagtgtggctcccacaggtcttcactgcccaggggtcgaatggggtccccctcccacttgacctgagatgctgggagggctgaacccccactcacacaagcacacacacacagtcctcacacacggaggccagacacaggccgtgggacccaggctcccagcctaagggagacaggcctttccctgccggccccccaaggatggggttcttgtccacggggctcactctggccccctattgtctccaaggtcccattttccccctgtgttttcacgcaggtcatattgtcagtcctacaaaaataaaaggcttccagaggagagtggcctgggtcccagggctggccctaggcactgatagttgccttttcttcccctcctgtaagagtattaacaaaaccaaaggacacaagggtgcaagccccattcacggcctggcatgcagcttgtccttgctcctggaacctggcaggccctgcccagccagccatcggaagagagggctgagccatgggggtttggggctaagaagttcaccagccctgagccatggcggcccctcagcctgcctgaagagaggaaactggcgatctcccagggctctctggaccatacgcggaggagttttctgtgtggtctccagctcctctccagacacagagacatgggagtggggagcggagcttggccctgcgccctgtgcagggaaagggatggtcaggcccagttctcgtgcccttagaggggaatgaaccatggcacctttgagagagggggcactgtggtcaggcccagcctctctggctcagcccgggatcctgatggcacccacacagaggacctctttggggcaagatccaggtggtcccataggtcttgtgaaaaggctttttcagggaaaaatattttactagtccaatcacccccaggacctcttcagctgctgacaatcctatttagcatatgcaaatcttttaacatagagaactgtcaccctgaggtaacagggtcaactggcgaagcctgagcaggcaggggcttggctgccccattccagctctcccatggagcccctccaccgggcgcatgcctcccaggccacctcagtctcacctgccggctctgggctggctgctcctaacctacctcgccgagctgtcggagggctggacatttgtggcagtgctgaagggggcattgccggcgagtaaagtattatgtttcttcttgtcaccccagttcccttggtggcaaccccagacccaacccatgcccctgacagatctagttctcttctcctgtgttccctttgagtccagtgtgggacacggtttaactgtcccagcgacatttctccaagtggaaatcctatttttgtagatctccatgctttgctctcaaggcttggagaggtatgtgcccctcctgggtgctcaccgcctgctacacaggcaggaatgcggttgggaggcaggtcgggctgccagcccagctggccggaaggagactgtggtttttgtgtgtgtggacagcccgggagctttgagacaggtgcctggggctggctgcagacggtgtggttgggggtgggaggtgagctagacccaacccttagcttttagcctggctgtcacctttttaatttccagaactgcacaatgaccagcaggagggaaggacagacatcaagtgccagatgttgtctgaactaatcgagcacttctcaccaaacttcatgtataaataaaatacatatttttaaaacaaaccaataaatggcttacatga

SEQ ID NO: 39684 - DNA, 5997 bp, Artificial Sequence
  derived and/or modified sequence
atggcaaacttccttctgccaagaggcacgagtagcttccggcggtttactagagagtctcttgcggccatagaaaaaagaatggcagaaaagcaggcacgggggtccaccacattgcaggagagtcgcgagggcctcccagaggaggaggccccccggccgcagttggacctgcaggctagcaagaaactgccagatctctatggcaaccctccccaggaactgataggggagccactggaggacttggatcctttttattccacccagaagaccttcatcgtgctgaataagggcaagaccatcttcaggttctccgcaaccaacgccttgtatgtgctgtccccattccaccccataagaagagctgccgtgaaaattctcgttcatagcctgttcaacatgttgattatgtgtaccatcttaacaaactgtgtatttatggcccaacacgaccccccaccttggacaaaatatgtggagtacacatttaccgctatttacacatttgagtcgctggtgaaaatcctcgccagaggattctgtctacatgcgtttacctttctgcgtgatccttggaactggctggacttcagcgtaatcattatggcgtatgtgagcgaaaatattaagctgggcaacctgtcagctctgaggaccttccgggtccttcgagccctgaagacgatctctgttatccctggtttaaagaccattgtgggagcactgatccagtctgtcaaaaagcttgccgacgttatggttctgactgtgttttgcctgtccgtgtttgccctgattggcttacaactttttatggggaacctgaggcataagtgtgtacgcaactttaccgcacttaacggtacaaatggaagcgtggaagcggatggactggtgtgggaaagcttagatctgtatctctctgacccggaaaattatttgctgaagaacggaacctctgacgtgctgctgtgcggcaattcatcagatgctgggacttgccctgagggttacagatgtctcaaggccggagagaacccagaccacggctatacaagcttcgattcctttgcttgggcctttctcgccctgtttcgcctcatgactcaggattgttgggagcgactttaccagcaaaccctgaggtccgctggaaaaatctacatgatcttctttatgctcgtcatctttctgggctcattttatctggtcaacctgattttagccgtcgtagccatggcctacgaggaacagaaccaagctacaatcgcagagaccgaagaaaaggaaaaacgcttccaagaggccatggagatgttgaagaaagagcacgaagccttgacgattcgtggcgtcgacactgttagtcggtcatccttggagatgtcccccctagctcccgttaattcccacgagagaagatccaaaaggagaaaacgtatgtctagcggcactgaagagtgtggcgaagatcggttaccgaagtcggattcggaggacggacctcgggccatgaaccacctgtctctaacgagaggcctcagtagaaccagcatgaagccacggagtagtagggggtccatcttcaccttcaggcgcagggatctgggatctgaggcagattttgccgatgatgagaatagcaccgccggtgagtccgagtcccatcacacaagcctacttgtgccgtggcctcttagacggaccagtgcacaagggcagccctcaccaggaactagcgccccaggccacgctctgcacggtaaaaaaaactccactgtggactgcaacggtgtcgtgtccctactgggggcaggcgacccggaagcaacatcccccgggtcccacctgcttcgccccgtgatgctcgaacacccccccgatactaccaccccgtcagaggaacctggcggcccccagatgttgacctcgcaagcaccctgcgtggatggctttgaggaacctggagcccggcaacgcgcattaagtgccgtgagcgttcttacttcagccttggaggagctagaggagagcaggcacaaatgtcctccatgttggaaccggctggctcaacggtacctaatttgggagtgctgtcccctgtggatgtccatcaaacagggagtaaaattggtagtgatggatcccttcactgacctgaccatcactatgtgtatcgtcctgaacaccctgtttatggcgttagaacattataacatgaccagcgaattcgaagagatgctacaggtgggtaatctggtgtttacagggatttttacggccgagatgacctttaagatcatcgctctggatccttactattattttcaacaggggtggaacattttcgactctatcatcgttatcctgtcccttatggagcttgggctgtctagaatgagcaatctctctgtgttacgttcctttagactgttacgcgtttttaagctagcaaagtcttggcctacattgaatacgctaatcaagattattggcaattcagtaggggccctcggcaacctgaccctggtattggccatcattgtgttcatcttcgcagtggtggggatgcagctgttcggcaaaaactacagcgaactacgggattctgattcaggacttctgccgagatggcacatgatggacttcttccatgcatttctgattatttttagaattctatgcggcgagtggatcgagactatgtgggactgcatggaggtctcaggtcagtctctttgtttgctggtgttcctgctggttatggtaattggcaacctcgtggtgctcaatctgttcttggctctccttttgtcatcattctcggccgataatctcactgcgccagatgaagacagggagatgaacaacctccagctggccttggcgcgaatccagcgtggactgaggtttgttaaacggaccacctgggacttctgctgcgggctcctgcgccagcggccacagaagcctgcagccctggcagcacaggggcagttgccatcctgcatcgccactccttattctcctcctcctccagaaaccgagaaggtgccgccaactcgcaaagagacccgttttgaggagggtgagcagcctggacagggaacacccggcgatcccgagcctgtctgtgtccctatcgctgtggccgaatcagatactgatgatcaggaggaggatgaagaaaactctctgggcacggaagaggaaagcagcaagcagcaggagtcacaacctgtctccggaggacccgaggctcctcccgactccaggacctggtcacaggtttccgccaccgcatcaagcgaggctgaggcaagcgcgagtcaagctgactggcgccagcaatggaaggcagagcctcaagcccccggatgcggtgagacacccgaagacagttgcagtgaaggatccactgcggatatgacgaataccgctgaactgctggaacagatccccgacctgggacaagacgtgaaagatcctgaagattgtttcactgaaggctgcgtcagaaggtgtccctgctgcgccgtagataccacgcaagctccggggaaagtgtggtggcgcctgaggaagacctgttaccacattgttgaacattcttggtttgaaacattcatcatcttcatgattcttctgtcatcgggagcattagccttcgaagatatctatctagaggagagaaagactattaaggttctgctagaatatgccgataagatgttcacatacgtttttgtgctggaaatgctgctgaagtgggtggcctatggattcaaaaaatacttcacaaatgcatggtgctggctggatttcctgatcgtcgacgtgtcactcgtcagtcttgttgccaatacactgggcttcgccgagatggggcccatcaaaagcctgcggacccttcgtgccctgcggcctctacgagctttgtcccggttcgaaggaatgagggttgtggtaaatgccctagtgggcgcaatcccctctattatgaacgttctcctggtctgcctcatattctggctgattttcagcatcatgggtgtgaatctgttcgcaggaaagttcggacggtgtattaaccagacagagggcgacctccccctgaattacaccattgttaataataagtctcaatgcgagagtctgaacctgaccggagagctctattggactaaggtgaaagtgaactttgataacgtgggagctggttaccttgcactcctccaggtgtatgaggagcagcctcagtgggagtacaacctctacatgtatatttacttcgtcatctttatcatctttggctcatttttcacactgaacctttttatcggtgtgataatcgacaatttcaaccagcagaagaagaagttgggcggtcaagatatatttatgactgaggaacagaaaaaatactacaatgctatgaaaaagcttggctctaagaagcctcagaagcctattccacgtccgcttaataaataccagggattcatattcgacattgtgacaaagcaagccttcgacgtgacaataatgttcctcatttgtttaaatatggtcacaatgatggtggaaactgatgatcagagccctgagaagatcaatatcctggccaagatcaaccttctatttgtcgctatttttaccggggaatgcatcgtcaaactcgcagccctccgtcattattattttacaaacagctggaacattttcgacttcgtagtagtgatcctaagcattgtgggtaccgttttaagcgatatcatccaaaagtactttttttctcctaccctgttccgggttattcgcctcgcccgtattgggcgcattctgcgcttaatccgtggcgctaaagggattaggactcttcttttcgcactgatgatgagcctgccagccctctttaatattggattactgctgtttctggtcatgttcatatactctatctttgggatggcgaacttcgcatatgtcaagtgggaagctggaatcgacgatatgttcaacttccagacctttgccaacagcatgctctgtctcttccagatcacaacatctgccggttgggatggccttctgagcccaatattaaacacgggccctccctattgcgaccccaccctacccaacagcaacgggagtcgaggcgactgcggaagtccagccgtggggattctgtttttcactacgtatataatcataagcttcctgatcgtcgtcaacatgtacatagcaattatcctcgaaaatttctctgtggccacagaggaatccaccgagcctttgtctgaggacgactttgacatgttttacgaaatctgggagaaatttgacccagaggccacacaattcattgaatatagcgtcctttcagacttcgccgacgcgctctccgaacctctgcgtatcgccaagccaaaccagatcagtctcataaacatggatctgccgatggtgtccggagataggattcattgtatggacatacttttcgcattcaccaagcgggtgctcggcgaatctggggaaatggacgcgctgaaaattcagatggaagaaaagttcatggctgccaatcccagcaaaatttcctatgaacccataactaccaccttgcggcggaaacacgaggaggtatcagccatggttattcaacgggccttcaggcgccatttgctgcagcgatcactgaaacacgcatcctttcttttcagacagcaggcaggatccggtttgtccgaagaggatgcgccagagagagagggactgatcgcctacgtgatgtccgagaacttctcccggcctctaggccctcctagctcatccagtatctcgtccacatcattcccaccatcgtatgactccgtgactcgggccacttcggacaacctgcaggtgcgcgggtccgactacagccatagcgaagatctggcggactttcccccgtccccagatagggaccgagaaagcattgtgtag

SEQ ID NO: 39685 - DNA, 5997 bp, Artificial Sequence
  derived and/or modified sequence
atggcgaacttcttgctcccacgagggacctcctcgtttaggcgttttaccagagaatcactcgcggcgatcgagaagcgcatggctgaaaagcaggcccgggggagtaccaccctgcaagaatcacgcgagggcctgcctgaggaggaagccccccgccctcagttagacctgcaggcttccaaaaagttgccggacctgtacgggaacccacctcaggagttgattggagaacctctcgaggacctggaccccttctactcaacacagaagaccttcatagttctcaataagggcaagaccatttttcggttttctgccaccaacgcgctgtacgtactgtccccatttcaccctatcaggcgcgccgctgtaaaaatcttggttcatagcctgttcaacatgcttattatgtgcaccattcttactaattgcgtgttcatggcgcagcacgacccaccaccttggacaaaatatgttgagtacacctttacagccatctacacctttgaatccctggtcaaaatcttggcccgcgggttctgtcttcatgcttttacctttttacgagatccctggaactggcttgatttcagcgtgatcattatggcctatgtgagcgagaatatcaaactgggaaacttatccgcgctacgaactttccgggtgcttcgggcgctcaagactatctccgtgattcccggtttaaaaacaatcgtgggagccctgattcagtctgtcaagaaactcgcagacgttatggtactcactgtgttctgcttatccgtgttcgcactaatcggcctgcaactattcatgggcaacctgcgccacaagtgtgtgagaaacttcacagcattaaacggcacaaacgggtcagtagaggcggatgggctggtttgggagtcattggatctctacctttctgatcctgagaattacttgctgaaaaacggtacatccgacgtgcttctctgcggaaacagctcggatgctgggacatgcccagaagggtatcggtgtctcaaagccggagaaaacccggaccacgggtacacatccttcgattccttcgcctgggcattcctcgctttatttaggctgatgacccaagactgctgggagaggctgtaccaacaaactctccgctctgcggggaagatttacatgatatttttcatgctagttatttttctgggcagcttctatttggtcaacctgatcttagctgtcgtggctatggcctacgaggagcagaatcaggctaccatcgccgagacagaagaaaaggaaaagcgcttccaggaggctatggaaatgttgaagaaggaacatgaggccctgactatcaggggggttgacacggtgagccgaagcagcctggagatgtcacccctggctcctgtgaattcccatgagcggcgttctaaaaggcggaagcgaatgtccagtggcactgaggaatgcggcgaggataggctaccgaagtcggactcagaagatggcccaagagctatgaaccatctatcactcacccgcggcttgtcacgcacttcgatgaaaccacgatcttccagaggatccatctttaccttcagaaggagagacctcggtagcgaggctgacttcgctgacgacgagaattccacagcaggagaatctgagagtcatcatacttccctcttggtaccttggcccctgcgcaggacgagcgcacagggacagcccagccccggaacctcggcacctggccacgcactgcatggaaaaaagaatagcaccgtggattgcaacggagtggtcagtctcctaggcgctggtgacccagaagctacctcaccaggatcacatctgttgaggccagtgatgctcgaacacccgcctgacacgaccacccccagcgaggagccaggcggtcctcaaatgttaacctctcaagcgccctgtgtcgacgggtttgaggaaccgggagccagacagagagcactgtctgcagtgagtgtcctgacctccgcattggaggagctggaggagtcaaggcataaatgcccaccgtgttggaaccgcctggcacagcgctacctgatctgggagtgctgcccactgtggatgtcgatcaagcagggggtgaagctcgttgtcatggacccattcacagacctcaccattactatgtgcatagtacttaatacgctgttcatggccctggagcattataatatgacaagtgaattcgaagagatgttgcaggtgggcaacctggtgttcacaggaattttcacagctgagatgaccttcaagattatcgctctcgacccatattactacttccagcagggctggaacatattcgacagtatcattgtaatcctcagccttatggagttaggcttgtcccgaatgagtaatctctccgtgttaagatcttttagactgttacgcgtgtttaagctagccaagtcatggcctaccctcaataccctgataaaaataatcggtaactctgtcggcgcgctcggcaatctaacactggtactcgcaatcatcgtattcatcttcgccgtcgtagggatgcaactgttcggtaaaaattacagtgaattaagggattccgactccggtctgttgcccaggtggcacatgatggacttcttccatgcctttctcataatcttcaggatcctctgtggcgaatggattgagacgatgtgggattgcatggaggtgtccgggcaatccctttgcctgttggtgtttcttctggtgatggtgattggcaacctagtggtgttgaacctgttcctcgctttactgctgtcctcattctccgccgataacttgacagcaccggatgaggaccgagaaatgaacaacctgcaactggcgctcgctagaattcagcggggattgcggtttgtaaagcgcaccacgtgggacttttgttgcggtcttctgcgacaaagaccccagaagcccgctgcgcttgcggcccagggccaactgccgagctgtatagccacgccttattcgcccccccccccggaaactgaaaaagtgccccctactaggaaggagacccgtttcgaggagggggaacagcccggccaggggactcccggggatcctgaacccgtttgtgttccaattgccgtcgcagaaagcgacaccgacgaccaagaggaagatgaggagaattcgctggggaccgaagaagagtccagtaagcaacaggagtcacagcccgtctcaggcggtcccgaggcgcctccggactcaaggacatggagccaggtgtccgccaccgcatcctcggaagccgaagcatccgcttcacaggctgactggcggcagcagtggaaagcagaaccacaggcccccggctgtggtgagactccagaggacagttgcagtgaaggatcgaccgcagacatgaccaacacagccgaactccttgagcagatacctgatttggggcaggatgtgaaagacccggaagactgttttactgagggatgtgtccgacggtgcccctgctgtgccgttgataccacccaagcgcctggcaaagtgtggtggcgcctacgcaagacctgctaccacatcgtcgaacactcttggttcgaaacattcatcatcttcatgatcttgctgagctctggagcattggcttttgaggacatatatctggaggaacggaagactatcaaagtattgctggaatatgccgataagatgtttacctatgtgttcgttctggagatgttactgaagtgggtagcttacggctttaagaaatatttcactaatgcctggtgttggttggatttcctcatcgttgacgtctcattagtgagtctagtagccaacactctcggcttcgctgagatggggccaattaagagcctcagaaccctgagagccctcaggcccctcagggctctgtctcgattcgagggtatgagggttgttgtgaatgctctcgtaggcgctattccatcaataatgaacgtgctgctggtgtgcctgattttctggctgatattttcaataatgggcgtgaacctgttcgcagggaaattcggccgatgcatcaaccagaccgagggggacctccctttgaattacacgatagtgaacaataagagccagtgtgagagtctcaaccttaccggcgagctctattggacgaaagtgaaagtgaatttcgacaatgtaggggccggctatctggccttgctgcaagtgtacgaggagcagcctcagtgggaatacaacttgtatatgtacatctacttcgttatcttcatcatcttcggatcatttttcaccttgaatcttttcatcggcgtcattatcgacaactttaaccagcagaagaagaaactcggaggccaggacattttcatgaccgaggaacagaaaaaatattacaacgctatgaaaaaattggggtcgaagaaaccacagaagccaatcccgcgccctctaaataagtaccagggttttatcttcgatatagtgactaagcaagctttcgacgtgaccattatgttcctgatttgtttgaacatggtcactatgatggtggagaccgacgatcaatctccagaaaaaattaacatcctggccaagattaatttattgtttgtcgcaattttcacaggcgaatgtatagtcaaactggccgcactacgccattattactttactaattcttggaacatcttcgacttcgtggtcgttatcctctcaatcgtgggcacggtgttgtccgatatcattcaaaaatacttttttagtccaaccctgtttagagttatacggctcgccagaatcgggaggattcttagactgattaggggggcgaagggtatcaggaccctgctgtttgccctgatgatgtctctacccgcactgtttaatatcggtctcctgttgttcctggtaatgttcatctattctatcttcggaatggctaactttgcctatgtaaaatgggaagccggaattgatgatatgttcaactttcaaaccttcgccaacagcatgctttgtctcttccaaattacaacctctgccggttgggacgggttgctcagccccatcctcaacactgggcctccgtactgtgaccctactctccccaatagcaatggtagtaggggcgactgcgggagtcccgccgtcgggattttgttctttacaacctatataattatttctttcctgatagtggttaacatgtacatcgcaattattttagaaaatttcagcgtcgcaactgaggaaagcactgagccgctgtccgaggatgacttcgacatgttttatgaaatatgggaaaagttcgatccagaagctacgcagttcatcgaatatagtgtcctgtctgactttgccgatgcactgtcggagccgctcaggatcgccaaacccaaccagatttccttaatcaatatggatctgccgatggtcagtggcgatcgtatacattgcatggatatccttttcgccttcaccaagagagttttgggggagagcggagagatggatgccctcaagatacagatggaggaaaaattcatggcagcaaacccttctaagatttcatacgagcccatcaccaccacactgcggcggaagcacgaagaggtgagtgccatggtaatacaaagggcatttcgcagacatctactccagcggtcgctaaagcacgcgtcttttcttttccgtcagcaggccggtagcggtctgagcgaagaggatgcgcccgagcgtgaagggctgattgcctatgttatgtccgaaaacttctcccggcctctcggtccaccttcctcgtcttctatcagtagtacatccttcccgcctagctatgattcagtaactagagcaacttcagataatctgcaggtccgtggctctgactactctcattccgaagacctggctgattttccaccttcgcctgatcgcgatagggagtccatagtatag

SEQ ID NO: 39686 - DNA, 5997 bp, Artificial Sequence
  derived and/or modified sequence
atggccaacttcctgctgccccggggcaccagcagcttccgccgcttcacccgggagagcctggccgccatcgagaagaggatggccgagaagcaggcccggggcagcaccaccctgcaggagagccgggagggcctgcctgaggaggaggccccccggccccagctggacctgcaggccagcaagaagctgcctgacctgtatggcaaccccccccaggagctgattggagagcccctggaggacctggaccccttctacagcacccagaagaccttcatcgtgctgaacaagggcaagaccatcttccgcttcagcgccaccaatgccctgtatgtgctgagccccttccaccccatcagaagagctgctgtgaagatcctggtgcacagcctcttcaacatgctgatcatgtgcaccatcctgaccaactgtgtgttcatggcccagcacgaccccccaccctggaccaagtatgtggagtacaccttcaccgccatctacacctttgagagcctggtgaagatcctggcccggggcttctgcctgcacgccttcaccttcctgcgggacccctggaactggctggacttcagcgtcatcatcatggcctacgtgtctgagaacatcaagctgggcaacctgagcgccctgcggaccttccgggtgctgcgggccctgaagaccatcagcgtcatccctggcctgaagaccatcgtgggcgccctgatccagagcgtgaagaagctggctgatgtgatggtgctgactgtgttctgcctgtctgtgtttgccctgattggcctgcagctgttcatgggcaacctgcggcacaagtgtgtgaggaacttcaccgccctgaatggcaccaatggatctgtggaggctgatggcctggtgtgggagagcctggacctgtacctgagtgaccctgagaactacctgctgaagaatggcaccagtgatgtgctgctgtgtggcaacagcagtgatgctggcacctgcccagagggctaccgctgcctgaaggccggggagaacccagaccacggctacaccagctttgacagctttgcctgggccttcctggccctcttccggctgatgacccaggactgctgggagcggctgtaccagcagaccctgcggtctgctgggaagatctacatgatcttcttcatgctggtgatcttcctgggcagcttctacctggtgaacctgatcctggccgtggtggccatggcctatgaggagcagaaccaggccaccatcgccgagacagaggagaaggagaagcgcttccaggaggccatggagatgctgaagaaggagcacgaggccctgaccatccggggcgtggacacagtgagccgcagcagcctggagatgagccccctggcccctgtgaacagccatgagcggcgcagcaagaggaggaagaggatgagcagcggcacagaggagtgtggagaagatcggctgcccaagagtgacagtgaagatggcccccgggccatgaaccacctgagcctgacccggggcctgagcaggacctccatgaagcccaggagcagccggggcagcatcttcaccttcagaagaagagacctgggcagcgaggccgactttgctgatgatgagaacagcacagctggggagagcgagagccaccacaccagcctgctggtgccctggcccctgcggaggaccagcgcccagggccagcccagccctggcaccagcgcccctggccacgccctgcacggcaagaagaacagcacagtggactgcaatggagtggtgtccctgctgggcgctggggaccctgaggccaccagccctggcagccacctgctgcggcctgtgatgctggagcaccccccagacaccaccacccccagcgaggagcccggcggcccccagatgctgaccagccaggccccctgtgtggatggctttgaggagcccggggcccggcagagggccctgtctgctgtgtctgtgctgaccagcgccctggaggagctggaggagagccgccacaagtgccccccctgctggaaccggctggcccagcgctacctgatctgggagtgctgccccctgtggatgagcatcaagcagggcgtgaagctggtggtgatggaccccttcacagacctgaccatcaccatgtgcatcgtgctgaacaccctcttcatggccctggagcactacaacatgaccagcgagtttgaggagatgctgcaggtgggcaacctggtgttcaccggcatcttcaccgctgagatgaccttcaagatcatcgccctggacccctactactacttccagcagggctggaacatctttgacagcatcatcgtcatcctgagcctgatggagctgggcctgagcaggatgagcaacctgtctgtgctgcgctccttccggctgctgcgggtcttcaagctggccaagtcctggcccaccctgaacaccctcatcaagatcatcggcaacagcgtgggcgccctgggcaacctgaccctggtgctggccatcatcgtgttcatctttgctgtggtgggcatgcagctgtttgggaagaactacagcgagctgcgggacagcgacagcggcctgctgccccgctggcacatgatggacttcttccacgccttcctgatcatcttccgcatcctgtgtggggagtggattgagaccatgtgggactgcatggaggtgtctggccagagcctgtgcctgctggtgttcctgctggtgatggtgattggcaacctggtggtgctgaacctcttcctggccctgctgctgagcagcttctctgctgacaacctgacagccccagatgaggaccgggagatgaacaacctgcagctggccctggcccgcatccagaggggcctgcgctttgtgaagaggaccacctgggacttctgctgcggcctgctgcggcagaggccccagaagccagctgccctggccgcccagggccagctgcccagctgcatcgccaccccctacagccccccacctcctgagacagagaaggtgccccccaccaggaaggagaccaggtttgaggagggggagcagcccggccagggcacccctggggaccctgagcctgtgtgtgtgcccatcgctgtggccgagagtgacacagatgaccaggaggaggatgaggagaacagcctgggcacagaggaggagagcagcaagcagcaggagagccagcctgtgtctgggggccctgaggcccccccagacagcaggacctggagccaggtgtctgccacagccagcagcgaggccgaggccagcgccagccaggccgactggaggcagcagtggaaggccgagccccaggcccctggctgtggggagaccccagaggacagctgcagcgagggcagcacagctgacatgaccaacacagctgagctgctggagcagatcccagacctgggccaggatgtgaaggaccctgaggactgcttcacagagggctgtgtgcggcgctgcccctgctgtgctgtggacaccacccaggcccctgggaaggtgtggtggaggctgaggaagacctgctaccacatcgtggagcacagctggtttgagaccttcatcatcttcatgatcctgctgagcagcggggccctggcctttgaggacatctacctggaggagaggaagaccatcaaggtgctgctggagtatgctgacaagatgttcacctacgtgtttgtgctggagatgctgctgaagtgggtggcctacggcttcaagaagtacttcaccaatgcctggtgctggctggacttcctgattgtggatgtgtccctggtgtccctggtggccaacaccctgggctttgctgagatgggccccatcaagagcctgcggaccctgcgggccctgcggcccctgcgggccctgagcagatttgagggcatgagggtggtggtgaatgccctggtgggcgccatccccagcatcatgaatgtgctgctggtgtgcctgatcttctggctgatcttcagcatcatgggcgtgaacctgtttgctgggaagtttggccgctgcatcaaccagacagaaggagacctgcccctgaactacaccatcgtgaacaacaagagccagtgtgagagcctgaacctgaccggggagctgtactggaccaaggtgaaggtgaactttgacaacgtgggcgccggctacctggccctgctgcaggtgtatgaggagcagccccagtgggagtacaacctgtacatgtacatctacttcgtcatcttcatcatcttcggcagcttcttcaccctgaacctcttcatcggggtcatcatcgacaacttcaaccagcagaagaagaagctgggcggccaggacatcttcatgacagaggagcagaagaagtactacaatgccatgaagaagctgggcagcaagaagccccagaagcccatcccccggcccctgaacaagtaccagggcttcatctttgacatcgtgaccaagcaggcctttgatgtgaccatcatgttcctgatctgcctgaacatggtgaccatgatggtggagacagatgaccagagccctgagaagatcaacatcctggccaagatcaacctgctgtttgtggccatcttcaccggggagtgcatcgtgaagctggccgccctgcggcactactacttcaccaacagctggaacatctttgattttgtggtggtgatcctgagcatcgtgggcaccgtgctgagtgacatcatccagaagtacttcttcagccccaccctcttccgggtcatccggctggcccgcatcggccgcatcctgcggctcatccggggggccaagggcatccgcaccctgctgtttgccctgatgatgagcctgcctgccctcttcaacatcggcctgctgctcttcctggtgatgttcatctacagcatcttcggcatggccaactttgcctacgtgaagtgggaggccggcattgatgacatgttcaacttccagacctttgccaacagcatgctgtgcctcttccagatcaccaccagcgctggctgggatggcctgctgagccccatcctgaacacaggccccccctactgtgaccccaccctgcccaacagcaatggcagcagaggagactgtggcagccctgctgtgggcatcctcttcttcaccacctacatcatcatctccttcctgattgtggtgaacatgtacatcgccatcatcctggagaacttctctgtggccacagaggagagcacagagcccctgtctgaagatgactttgacatgttttatgagatctgggagaagtttgatcctgaggccacccagttcatcgagtacagcgtgctgagtgactttgctgatgccctgtctgagcccctgagaattgccaagcccaaccagatcagcctcatcaacatggacctgcccatggtgtctggggaccgcatccactgcatggacatcctgtttgccttcaccaagagggtgctgggggagagcggggagatggatgccctgaagatccagatggaggagaagttcatggccgccaaccccagcaagatctcctatgagcccatcaccaccaccctgcggaggaagcatgaggaggtgtctgccatggtgatccagagggccttcagaagacacctgctgcagaggagcctgaagcacgccagcttcctgttccggcagcaggccggcagcggcctgtctgaagaagatgcccctgagcgggagggcctcatcgcctacgtgatgtctgagaacttcagccggcccctgggcccccccagcagcagcagcatcagcagcaccagcttcccccccagctatgattctgtgacccgggccaccagtgacaacctgcaggtgcggggcagtgactacagccacagcgaggacctggccgacttcccccccagcccagaccgggaccgggagagcatcgtgtag

SEQ ID NO: 39687 - DNA, 5997 bp, Artificial Sequence
  derived and/or modified sequence
atggccaacttcctgctgccccggggcaccagcagcttccggcggttcactcgggaaagcctggccgccatcgaaaaaagaatggccgaaaaacaggccaggggcagtaccaccctgcaggagagtcgggaaggattgcctgaagaagaagcaccgaggcctcagctagacctgcaagcttcaaagaagctgcctgacctgtatggcaaccctccgcaggaacttataggtgagcccctcgaggatctggatcctttttattcaacacagaagacttttattgtgctgaataagggaaaaaccatttttcgctttagtgccacaaacgccctctatgtgttatcaccctttcaccccatcaggagagccgccgtaaagatattggtgcactcactgttcaatatgttaatcatgtgtaccattctgactaattgcgtgtttatggcccagcacgaccctcctccttggaccaagtacgtggaatacacttttacagcgatttatacctttgagtctctcgtcaagattctggcacggggcttttgtctccacgcttttaccttcttgagagatccgtggaattggttagacttctccgttataataatggcctacgtcagtgagaacattaagcttggaaatttgtccgccctccgtacctttcgcgtcctgcgcgccctcaaaaccatctctgtgataccgggactgaagactattgttggagccctgattcaaagtgtgaaaaagctagcagacgtgatggtactgacggtgttctgcctcagcgtcttcgctcttattggactgcaactgtttatgggaaatctccgtcataaatgtgtgaggaattttacagctctcaacggtaccaacggcagcgtggaggcagatggtctcgtgtgggaaagtctcgatttgtatctatctgatccggagaactatctcctgaagaacggcacctctgacgtcctgctttgtggtaatagtagcgacgccggaacgtgtcccgagggttatcgatgtctgaaagctggggaaaaccccgatcatggatatacctcctttgactcattcgcctgggcattcctggctttatttcgcttgatgacgcaagactgctgggagagactctatcagcagaccttacggtccgccgggaaaatttatatgatcttctttatgctagttatattcctcggatccttctatctggtgaatctaatccttgccgtggtggctatggcctacgaggagcagaatcaagccaccatagccgagactgaagaaaaggaaaagcgttttcaagaagctatggagatgctgaagaaggaacatgaggccctgactatacgcggagtggacactgtgtcaaggagtagtctcgaaatgtctcctctcgcaccagtaaactcccacgagcgtcgcagtaaacgtagaaagcggatgtcttcggggacggaggagtgcggggaggaccgccttccgaagagtgattcagaagacggcccaagagcaatgaaccacctgtccctgaccaggggtctgagtcgaacgtctatgaagcctaggtcttcaaggggctctatattcacattcagacgcagagatttaggcagcgaggccgactttgcagacgatgagaactcaactgccggcgaatcagaaagtcatcacacaagcctgctggttccatggcccctgcgccgcacttctgcccagggacagccaagtcccggcacaagcgctccagggcatgccctgcacggaaagaagaactctacagtggactgcaatggggtggtctccctcctgggagccggtgacccagaggccacttcccccgggtcccatctgctgagaccggtgatgttggaacatccaccagacactaccactcccagcgaggagccaggtggaccccaaatgttaacatcccaagccccgtgtgtcgacggcttcgaggagcccggggcaaggcagagggcgttatctgcggtttcagttctgacgtcagcactggaggaacttgaagaaagtcggcacaaatgcccaccctgttggaaccggctagcacagagatatctgatctgggaatgttgtcccctgtggatgtccatcaaacaaggggtcaaactggtggtaatggaccccttcactgacctgaccattaccatgtgcatcgtgcttaataccctgtttatggctctggagcactataacatgacgagcgagtttgaggagatgttacaagtgggaaacctcgtctttacaggaatcttcaccgccgaaatgacattcaaaatcatcgcattagacccatattattacttccagcagggctggaacatcttcgattccattattgtgattctctccttaatggaattaggtctctcccggatgtcaaacctctccgtgctgagatccttcaggttgctcagagtatttaaactggcaaaatcctggcccacactgaacaccctaatcaagatcataggcaactctgtgggggccttgggcaacttgacattggtattggcaatcatcgtgtttatctttgccgtggtcggaatgcagctgttcgggaaaaattattccgaactcagggacagtgactctgggctattgccaaggtggcacatgatggacttttttcatgcattcctcatcatatttcgaattctgtgcggcgagtggatcgagactatgtgggattgtatggaggtgagcggtcagtcgctctgtctgctggtctttctcttagtcatggtaattggaaatctcgtggtcctgaatctgtttttagccctgcttctgtcttctttctccgccgataatctgacagcgcccgacgaggatagagagatgaacaatctgcagcttgctctggctagaattcagagaggcctgcggttcgtgaagagaactacatgggatttctgctgtggtctcctgcgacaaaggccacagaagccagccgctctggcagcccagggccaactgccgtcatgcatcgccactccctactctcccccgcctcccgagactgaaaaggtgcccccgactcgtaaggagacaagattcgaggagggggaacagcctggtcaaggaacccctggagatcctgagccggtctgtgtcccaatcgcagtggccgagtcggataccgacgaccaagaggaagacgaggaaaacagcctcggcaccgaggaggagtcttcaaagcaacaagaatctcagccagtgtccggcggcccggaagcaccacctgattcacggacgtggtcacaagtgtcagcaactgcctcgagcgaggcagaagcttccgcgtctcaagcagactggcgccagcagtggaaggccgagcctcaggctccagggtgtggggagacccctgaagattcttgttccgagggatctacggccgatatgaccaatacagccgaactgctggagcagattccggacctcggacaggacgttaaagatcctgaggactgctttacagaagggtgcgtccgccgctgtccatgttgcgcagtggatactacacaggcaccagggaaggtgtggtggcgcctgagaaaaacctgctaccatattgtggagcactcttggttcgaaaccttcatcatttttatgatcttactcagtagcggcgccctggcgtttgaggatatctacctggaggaacgaaaaacaattaaggtacttctggagtatgcggacaagatgtttacatatgtattcgtactagagatgttgctaaagtgggtggcgtacgggtttaaaaaatacttcaccaacgcgtggtgctggctagacttcttgatcgtggatgtctccttagtgtcactcgtggcgaatacgttgggttttgccgagatgggccccatcaagagcctccggactctccgtgcattgagacccttgcgtgctcttagtagatttgagggaatgcgcgttgtggtgaatgcccttgtcggggcaattccttctattatgaacgttctcctggtctgtttgatcttttggcttattttttccattatgggagttaacctgtttgcaggcaagtttggaaggtgcattaaccaaacggagggcgatctgccactaaattacaccatagtgaacaacaaatcacagtgcgagtctctgaacctgaccggagagttgtactggactaaggtcaaagtgaatttcgataatgtcggagctggttacttggctctgctccaggtctacgaagaacagccccagtgggaatacaacttgtacatgtacatatacttcgtgatttttattatcttcggttctttcttcacattaaatctgttcattggggtgattattgacaatttcaatcagcaaaaaaaaaagttgggcggacaggatattttcatgactgaagagcaaaagaagtattacaatgccatgaaaaagctgggttctaaaaagcctcagaagcctattccccggcctctgaataaatatcagggtttcatttttgacatcgtgaccaagcaggcgtttgacgtcactatcatgtttctgatctgtctgaatatggttactatgatggtggagactgacgatcagtcacccgagaagattaatattttagcaaaaatcaatctactgtttgtcgccattttcactggcgaatgtattgtgaaactggccgcccttcggcattactatttcaccaattcatggaacatctttgatttcgtggtggtgatcttatcaattgtgggcactgtactcagcgatattatccaaaaatactttttctctcccacgctttttcgggtaattagactcgccaggattggaaggattctgcgtctgatcagaggtgccaaaggcatccggaccttgctgttcgccttaatgatgagcctaccagcactttttaatatcgggctgctgctgtttttagttatgttcatatatagtatcttcggcatggctaatttcgcctacgtcaaatgggaggcggggattgacgatatgtttaatttccagaccttcgccaactccatgttatgtctcttccagatcactacctccgcaggctgggatggcttgctaagtccaatccttaacactggaccaccctactgcgatcctacactacctaactctaacgggtcccggggggactgtgggtctcccgccgttggcatccttttctttaccacgtacattataattagttttctgatcgtggttaatatgtacattgcaatcattctagagaactttagcgtcgctacggaggaaagcacagagcccctttccgaggatgattttgacatgttctacgaaatctgggaaaagtttgatccagaggcaacacagttcatcgaatattcagtgttgtcagactttgctgacgcgctgagcgaacccctccgaattgctaaacccaaccagatcagcctgatcaacatggacttgccaatggtctctggagaccggatccattgtatggacattctctttgcctttacgaagcgcgtactgggggagtccggtgaaatggacgcattgaagatacagatggaagagaaattcatggccgccaacccatccaagataagctacgaacctattaccaccaccttgagacgtaagcacgaagaggtatctgccatggtgatccagcgggcgttccggcggcatctgctgcagcggtctctgaaacacgctagcttcttattcaggcagcaggccggctcaggcctatctgaagaggatgcacccgaaagagaagggctcatagcgtatgttatgtctgagaatttctcccgaccattgggcccccctagttctagctctatctcaagcactagtttcccaccctcctacgacagcgtgacgcgcgccacaagcgacaatttacaggtgcgcggatcagactatagccattccgaggacctggccgattttccccccagtcccgatcgtgatcgagagagtatcgtctag

SEQ ID NO: 39688 - DNA, 5997 bp, Artificial Sequence
  derived and/or modified sequence
atggccaacttcctgctgccccggggcaccagcagcttccggcggtttacacgggaatccctggccgctatcgaaaagcgcatggcagagaagcaagcgagaggatctacaactctccaggagtcccgggagggcctgcctgaagaagaggccccacgcccccagcttgacctccaagcctccaagaaacttcccgatctctatggtaatccaccgcaggaactgattggggaacctctggaggacctcgaccccttttattctacacagaaaacgtttattgtcctcaataaagggaagaccatatttcgatttagtgcaacaaacgccctgtatgttctgagcccttttcatccaatacggcgggccgccgtaaagatactggtgcactctctgtttaatatgctcatcatgtgtaccattctgaccaactgcgtgttcatggcacagcatgatccaccaccttggaccaaatacgttgagtacactttcactgcaatctacacctttgaatcactggtgaagatcctcgccagggggttctgcctgcatgctttcacctttctgcgggacccttggaactggctggacttttcagtgattattatggcttacgtatcagaaaatattaagttaggaaatttatcagcactccgaacgtttcgagtgttgcgcgcacttaagacaatctcagtaattcccgggctaaagaccattgtaggagcactgattcagagtgtgaagaaattggctgacgttatggttctcaccgtgttttgcttgtccgtctttgctctgatcgggctgcaactctttatgggaaaccttcgacacaaatgcgtgcgaaactttacagcactgaacggtactaacggaagcgtggaggctgacggtttggtatgggaaagcctggatttgtacctgagcgacccagagaattatctacttaaaaatggtacttctgacgtcctgctgtgtgggaactcctcagatgccggaacctgccccgagggttacagatgcctgaaggctggggaaaatcccgatcacggctacacgagttttgacagttttgcctgggcctttctcgctttattccgccttatgacccaggactgttgggagcggctctatcagcagacgttacgtagcgccggcaagatctatatgattttctttatgttggttatctttctaggttccttttatctcgtgaatctgattctagcagtggtggcgatggcatatgaggaacagaaccaagctacaatcgcggaaaccgaggagaaagaaaagcgattccaggaggctatggaaatgcttaagaaagagcacgaagcactgaccattaggggagtggacacagtgtctagatcctccctcgagatgagccccctggccccagtcaacagccacgagcgcaggtcaaagaggagaaaacgcatgtcgtctgggaccgaagagtgcggggaggaccgcctgcctaaatctgatagtgaagacgggccaagagccatgaaccacctttcccttacccgcggactcagccgcacctcaatgaaaccaagaagttcccgtggcagtatctttactttccggaggcgcgacctgggatcggaggcagactttgctgacgatgaaaactccacggccggcgaaagcgagagtcatcacaccagcttgctagtcccttggccactgcgcaggacaagtgcacagggccaacctagccccggaacctctgcacctgggcacgctctccacggcaaaaaaaattctaccgtcgattgcaacggggtagtgtctttgctgggcgccggcgatccggaggccacgtcaccggggtcacatctgctcaggccagtcatgttagagcacccgcccgacacaaccacgcctagcgaggagcctgggggccctcagatgcttacgagtcaagccccctgtgtggatggatttgaggagcctggggctcgacaacgcgcactctccgctgtaagcgtgctgacttcagccctggaggagttggaagaatctaggcacaagtgtcctccttgctggaaccgcctcgcccagagatacctcatctgggaatgttgtccactctggatgagcattaagcagggtgtgaagctcgttgtcatggatccctttacagatctgaccataacgatgtgtatcgtgttgaatactctctttatggcgctcgaacactataatatgacttccgaattcgaggagatgttacaggtcggcaacctggtgttcaccgggatctttactgctgagatgacctttaaaattatcgcactggacccatattactactttcagcaaggctggaacattttcgacagtataatcgtgatcctgtcactgatggagttgggactgagcaggatgtccaatctatctgtgctgcggtccttccgcctgttgcgcgttttcaagttggcaaagtcttggccgacgttaaatacgttaatcaagattataggcaactctgttggtgctttaggaaatctcactctggtgctcgccattattgtctttattttcgcagtcgtaggaatgcagctgttcggaaagaattattcagaattacgggacagcgattctggcctgttgccccgctggcacatgatggatttcttccacgcatttttgattatctttcgcattctgtgcggcgagtggattgaaaccatgtgggactgtatggaggtctcgggtcagagcctgtgcctgctggtctttctactggtcatggttatcggaaacttggtggtgctgaatctcttcctggctctgctgctgagctcatttagcgctgataatctcaccgcacccgacgaagatcgagaaatgaacaacctccaacttgctcttgccaggattcagagaggcttgaggttcgtgaagagaactacatgggatttctgttgtggtctcctgcgccaaagaccgcagaaacctgccgctctcgctgcgcagggccagctgccttcctgcatcgcaaccccctactctccccctcctcccgagactgagaaggtgccccctactcggaaggaaaccaggttcgaagaaggcgaacagcccggccaaggcaccccaggtgaccctgagcctgtctgcgtgcctattgccgtcgctgagtctgacactgacgaccaggaggaagacgaggagaacagcttagggacagaagaggaaagctctaagcagcaggaatcccagcctgtgtctggtggtccagaggccccaccggacagtcggacctggtctcaggtgtcggcaactgcctcttctgaggccgaggccagcgcctctcaggccgactggcggcagcaatggaaggcagaaccacaggcccccggctgtggcgagactcctgaggacagttgctctgagggctctaccgctgacatgaccaacacagcagagctgctggagcaaatacccgatcttggacaagacgtgaaagacccagaggattgcttcactgaagggtgcgtgcgccgttgcccctgttgtgccgtcgataccacacaggcaccagggaaggtctggtggagactacgaaagacttgctatcatatcgtcgagcatagttggttcgaaacctttattatcttcatgattctcttgtccagcggtgctttggctttcgaggatatataccttgaggagcggaagacaataaaagtgcttctagagtacgctgataaaatgttcacatacgttttcgttctggaaatgttgttgaagtgggtggcctacgggttcaaaaagtacttcaccaacgcatggtgctggctcgatttcctcattgttgacgtctcactagtgtccctagtggccaacactctgggcttcgcggaaatgggccctatcaagtctcttaggaccctgcgcgccctcaggcccctgcgcgcactgtcccgcttcgaagggatgagggtcgtagtaaatgcactggtcggggccataccatctataatgaacgtgctgctggtgtgtttgatcttctggctcatattctccatcatgggtgtaaacttatttgcaggcaagttcggccgctgtataaatcagaccgaaggcgacctgccactcaattatacgatagtcaacaacaaatcacagtgcgagagtctgaatctaactggcgagctatactggacgaaagttaaggtaaatttcgacaacgtcggcgcgggctacctggccctgctgcaggtctacgaggagcagcctcagtgggaatataacctgtatatgtacatatatttcgtgatcttcattatttttggctctttttttacactcaacttgttcattggtgtgattatcgacaacttcaaccaacagaagaagaaactcggagggcaggacatctttatgacagaggaacagaagaagtactataacgcaatgaagaagttgggctccaagaaaccccagaagccaatcccgcgccctctgaataagtaccagggattcatcttcgatatagtgacgaagcaggcctttgatgtgacaatcatgtttttaatctgcctgaatatggtaaccatgatggtcgaaacggatgatcagtcccccgagaagataaacatactcgccaaaataaacctgctattcgttgccattttcacaggggagtgcatcgtcaaacttgcagccttgcgccactattacttcaccaattcatggaacatctttgacttcgtagtggtgatcttgtcaattgtgggcaccgtgctatctgacattatccaaaaatatttcttttcacccacgttgtttcgcgtgatacgcctggcccgcattggtagaattctgcggctcattcggggcgcaaaaggcatcagaacactgctgttcgcattaatgatgtcactccctgctctgttcaacattggcctcctgttatttctggtcatgttcatttactccattttcggaatggcaaacttcgcctacgtcaaatgggaagcaggcattgatgatatgttcaatttccaaaccttcgcgaatagcatgctttgtttatttcagattaccacaagtgcaggctgggacggcttgctctcgcccatactgaataccggccctccttattgcgacccgacgcttccaaattccaatgggagccgcggagactgcgggagccctgctgtggggatcctgttctttaccacctatataatcatctcttttctcatcgtagtgaacatgtatatcgcaattatcctggagaatttcagtgttgccacggaagagtctaccgagccacttagcgaggatgactttgatatgttctatgagatatgggaaaaatttgatcctgaagcaacccaattcattgaatatagtgtgctgagcgactttgctgatgccctgtctgagcctctgcggatagctaagcccaaccagatctccctcataaatatggacctccccatggttagcggagatagaatacactgcatggacatactattcgctttcactaagcgagtcctgggagaatccggcgagatggacgccctgaagatccagatggaggaaaaattcatggcggccaatccgtctaagatatcttatgaacctatcacaaccacactccgtcggaaacacgaagaagtgtcggccatggtgattcagcgcgcatttagacggcacctactgcagcgctcccttaaacacgccagcttcttgttcaggcagcaggcgggctcaggactgtccgaagaggacgccccagaaagggagggcttgattgcttacgtgatgtcagagaacttctctagacccctgggtccacccagctcctcatccatttcatctaccagttttcccccaagttacgatagtgtgacccgagcaactagcgacaacctccaagtcagagggtccgactattctcactcagaggatctcgcggatttcccaccgagccccgatagagatagggagtccatcgtgtag

SEQ ID NO: 39689 - DNA, 5996 bp, Artificial Sequence
  derived and/or modified sequence
atggccaacttcctgttacctagagggacttccagctttagacgcttcacgagggagagtctggccgcaatcgagaagaggatggctgaaaagcaggcaaggggaagcaccactctacaggaaagccgtgagggcctccctgaggaggaagccccacgtccccagctggatctacaggcctcgaaaaagctgcctgacttgtatgggaaccccccacaagagctcattggtgaaccactggaggatctagaccctttttattctacccaaaagacatttatcgtgctaaataaaggaaaaactattttccggttcagcgccacaaatgcgctgtatgtcttgagtccatttcacccgatacgccgagcggcagtcaagattcttgttcattctctgtttaatatgctgataatgtgtacaatcttgacgaactgtgtattcatggcacagcacgacccacccccatggaccaagtatgtcgagtatactttcaccgctatctatacattcgagtctctggtgaagattctagcaaggggattctgtcttcacgcatttacttttctgcgtgatccttggaattggctagacttttcagttattatcatggcttacgtgtctgagaacataaagttaggaaatttatcagcactgcggaccttccgggtcttgagggcccttaaaaccataagcgtcattcccggactgaagactattgtgggagctctgatccaaagcgtgaaaaagcttgccgacgtcatggtcctgacagtattctgtctttccgtgtttgccctcatcggactacagctttttatgggcaacttgcggcacaagtgtgtgcgaaacttcacagccctgaatggcaccaacggatccgtcgaggcagatggccttgtctgggagtccctggacctgtatcttagtgatcccgagaactacctcctgaaaaacggaacctcggatgtgctgctgtgcggaaattcaagtgacgctggaacttgccctgagggatataggtgcctcaaagcaggagagaatccggatcatgggtacacatcattcgacagctttgcatgggcgtttttagccctctttcggctaatgacacaggactgttgggaacggctctatcagcagaccctgagatccgctggcaagatctacatgatcttcttcatgctcgtgatattcctagggagcttctacctggttaaccttatccttgccgtggtagcaatggcctatgaggagcagaaccaagcaaccatcgccgagacggaggaaaaagaaaagcggttccaggaggctatggagatgctcaagaaggagcacgaagctctgacaatcaggggtgtcgacaccgtgagcagaagttcgttggagatgagtccactggcccctgtgaactcacacgagagaagaagcaaacgtcgcaagcgcatgagttctggcactgaagagtgtggcgaggaccggctgcctaaatcagactcagaggacggtcctcgggcaatgaaccatctgtcacttactcggggattgtcaagaacctcgatgaagccaaggtcatccaggggcagtatctttaccttccgcagaagagatttgggaagtgaggccgacttcgccgacgatgagaacagcacagcaggagaatcggagtctcatcacacaagcctgctggtaccttggcccctgcgtcgtaccagtgctcagggacagccgtccccgggtacttccgccccagggcacgcgcttcatggtaaaaagaacagcaccgtggattgcaacggtgtagtgagtctgctcggcgcaggagacccagaagcaactagcccaggatcacacctgctccgaccggtgatgcttgagcaccctccagacaccacgaccccatctgaggagcctggcggtccacaaatgctgacatcccaggcaccttgcgtcgacggctttgaggagcccggagctcgtcagcgcgctctctcagcagtcagcgtcctgacatccgccctggaggagctggaggagtcaaggcataaatgtccgccttgctggaacagactagcccagcgctatctgatttgggaatgttgtccactgtggatgtccatcaaacagggagtcaaattggtggtgatggatcctttcaccgacctgacaataacaatgtgtatcgttttaaacaccctcttcatggccctcgagcactataatatgacctcagagttcgaggagatgttgcaggtgggcaatctcgttttcaccggcattttcaccgctgagatgacctttaagatcatcgccctggacccctattattattttcagcagggctggaacattttcgattccatcattgtcattttaagcctgatggaactggggcttagcaggatgtcgaatctctcagttctgcggagtttccgactgttacgagtcttcaaactggctaaaagttggcccacactgaacaccctgataaaaattatcggtaactcagttggcgcacttgggaatctaacactggttttggcgatcatcgtttttatctttgctgtggtggggatgcagttgttcgggaagaactatagcgagcttagggattcggattccggtctgctgccacggtggcatatgatggactttttccacgcgttcctcatcatattccggattttgtgcggagaatggatcgagacaatgtgggactgcatggaggtcagcggtcaaagcctgtgcttattagtgttcctgttggtaatggttatcggtaaccttgtggtactgaacctgtttctcgcactcctcttaagttcattcagcgccgacaacctgaccgcaccagacgaagacagagaaatgaataacctgcagctggctttggccagaatccaacggggattacgatttgtgaagaggaccacttgggacttctgttgtggtctgttgcggcagcgtcctcagaagccggcagcgctggcagcccagggccagctgccgtcctgtattgccaccccatattcaccgcctccgccagagacagagaaggtgccacctacacggaaagagacccgattcgaagaaggcgaacagcctgggcagggaacccctggagatccagagccagtgtgtgtacctattgcagtggccgaatcggacaccgacgaccaggaggaggatgaagaaaactcactcgggactgaggaggagtcctcaaaacaacaagaatcccagcccgtctcggggggacctgaggcccctccagactcacggacatggagtcaggtgtcagccactgcgtcgagcgaagccgaggcctctgcctcacaggcagactggcggcagcagtggaaagccgaacctcaagcacctggctgcggagagacacccgaagactcgtgcagcgagggaagtactgctgatatgactaacaccgcagagctgttagagcagattccagaccttggacaggacgtaaaggaccccgaagactgcttcacggagggatgtgtcaggagatgtccgtgttgtgccgtggacaccacccaagccccaggtaaggtgtggtggcgtttacgcaaaacttgctaccacatcgtcgaacattcatggtttgagactttcataatttttatgatcttgctttcgagtggggctcttgcctttgaggacatttatctggaggagcggaagactatcaaagtcctccttgagtacgccgacaaaatgttcacatacgtgttcgtgcttgagatgctccttaaatgggtggcctacggcttcaaaaagtactttacgaatgcctggtgttggttagacttcctcattgtggatgtgtctctggtaagcctcgtagcaaacaccctgggattcgcagagatgggtcccattaaaagccttagaaccctgagagctttacgcccacttagagcactgagcaggtttgaggggatgagggtggttgtgaatgcgctggtgggggctattcctagcatcatgaacgttctgcttgtgtgcctgattttttggctgattttttctataatgggggtgaacttgtttgctgggaaatttggcaggtgtatcaaccagaccgagggagacctgccccttaactatacaatcgtcaataataagtcccagtgcgagagtctgaatttgacgggagagttgtattggacaaaagtgaaggtgaacttcgacaacgtgggcgcaggataccttgccctgttacaggtgtatgaagaacaaccccaatgggagtacaatctttatatgtacatttatttcgtcattttcattatatttggtagtttcttcaccttgaacttgtttatcggggtgattattgacaatttcaatcaacagaaaaaaaaattgggaggacaggacatttttatgaccgaggaacagaagaaatattacaacgcgatgaagaaactgggaagtaagaaacctcagaagccaatcccacgcccactgaataagtaccagggctttatttttgacatcgtcactaagcaggcgttcgacgtgacgatcatgttcctgatttgtcttaatatggtcacaatgatggtggagacagacgatcagagtcccgagaagattaacatactggccaaaatcaatttgctgtttgtggcgatctttactggcgaatgtattgttaaactagccgcactgcgtcactactacttcaccaactcatggaatatctttgactttgtcgtggtcatactctcaatcgtgggtacagtcctatcggatataatccagaagtactttttttcacctactctctttagggtgattcggctcgccaggattggacgcattctgcgactgatccgtggagctaagggcattcgcactctcctgttcgcactgatgatgagcctgccagctctttttaacatcggtttgctgctgttcctagtgatgtttatttactctatttttgggatggctaacttcgcatacgtgaaatgggaagcagggatagacgacatgttcaactttcagaccttcgcgaatagtatgttatgtctgttccaaatcacaacaagtgcaggatgggacggcctgctgtctcccattttgaacacgggacccccatactgcgatcccacgcttcccaactctaacggcagcaggggagactgcgggagcccagcagtcgggatcctctttttcacaacgtacatcatcattagtttcctgatcgtggtcaacatgtatatcgctattatcctggaaaacttctcggtagccaccgaggagtctacggaacccttgtccgaagatgattttgatatgttttacgaaatctgggagaagtttgaccccgaggcgactcagtttatcgaatacagtgtgttatccgactttgcggatgccctctcagaacccttgagaattgccaaacccaaccaaatcagtttgatcaatatggatcttccaatggtatccggcgataggatccattgcatggatattcttttcgcctttacgaagagggttctgggcgaatccggcgagatggatgcgctcaagattcagatggaggaaaagttcatggcggcaaacccttccaaaattagctacgaaccaatcaccaccaccctgaggcgcaagcacgaagaggttagtgcaatggtgattcagcgcgctttcagaaggcatctattgcagagaagcctcaagcacgcatcatttctttttaggcagcaggctggttcaggacttagtgaagaagatgccccagaacgggagggtctcattgcttacgtgatgtctgagaatttcagcaggccactcggcccacctagttcttccagcatttccagcacatctttccccccttcctatgacagcgtcactagagccacctccgacaatctccaggtgaggggcagcgactattcccattcagaagacctcgcggacttccccccatcacctgaccgtgacagagaaagtatcgtgta

SEQ ID NO: 39690 - DNA, 5996 bp, Artificial Sequence
  derived and/or modified sequence
atggccaattttctgctacccagaggtacgagttcgtttcggagatttactcgggaatctctggccgcaatcgagaaaaggatggccgagaagcaggctcggggaagcaccacacttcaggagagcagggaaggtcttccagaggaggaagcaccccgtccccagcttgatctccaggctagtaaaaagttacctgacctgtatggaaaccccccacaggagctgatcggcgaacctctggaggacctggatccattttattccacgcaaaaaaccttcatcgtgctgaacaaaggaaagaccatttttcgcttcagcgccaccaatgctctgtacgtgctaagcccattccaccccatcagaagggcagccgtgaaaatcctcgtccacagcctgtttaacatgcttattatgtgcaccatcctgactaactgcgtgtttatggcccagcacgatccccctccttggaccaaatacgtggaatatacatttacagcaatttacacatttgagagcctggtgaaaatcttagcccgaggtttttgtctccacgccttcacttttctgagagacccttggaactggctggacttctccgtcattatcatggcctatgttagcgaaaatatcaaattaggaaacctgtctgccttgaggactttccgcgtgctgagagccttgaaaaccattagcgtgattccgggtctgaagacaatcgtgggagcactgattcagagcgtgaaaaaacttgcagacgtgatggtgctgaccgtgttttgtttatccgtattcgcgctcatagggcttcaactttttatggggaatttacgacacaaatgcgtgagaaactttaccgccttaaacgggacaaacggcagtgtggaagccgatggtctggtctgggaatcccttgatctgtatctctccgatccggagaattatctgcttaaaaacggtaccagcgacgtgctcttgtgtggaaatagctctgatgctggtacctgcccagagggatatcggtgcctgaaggccggtgagaacccagatcacggctatacaagttttgattcttttgcgtgggctttcttggctctgttcagactcatgacccaagactgctgggagaggctgtaccaacagaccctcaggtcagccggaaaaatttatatgatattctttatgctggtgatctttttggggtcattctacctggttaatctgatcctggcggtggtcgctatggcctatgaagagcagaaccaggcgacaatagcggagacagaagagaaggaaaaacgcttccaggaggcgatggaaatgttaaaaaaggagcatgaagctctgaccatcaggggggtcgataccgtgagccgatcctctctggaaatgtcgcctctggcacccgtgaattctcacgaaaggagatccaagcggagaaagcgtatgtccagcgggaccgaagagtgcggggaggatagactaccaaaaagcgatagcgaggatggccctagggcaatgaatcatctttccctcactcgaggactgagtcgcacatccatgaaaccccgatcttcccggggtagcatatttacatttagaagaagggatctgggtagcgaggcagattttgctgacgatgagaattctaccgccggagaaagcgaaagccatcacacttcgctattggtcccatggcctctgagacggacgtccgcacagggacaaccatctccaggaaccagcgcgccaggccacgccttacatggaaaaaagaactccaccgtggactgcaacggtgtggtgtctctgctcggagctggcgatccagaggctacatcgccaggcagtcatcttctgagaccggtgatgcttgagcacccccctgacacaaccacaccttccgaagaacctggcggtcctcagatgttgacctcacaggccccatgcgttgacggctttgaggaacccggtgccagacagagggctctatcggccgtctcagtgttaacctcggcccttgaggagctcgaagaatcgaggcacaaatgccctccttgttggaaccggttggctcagagatatctgatttgggagtgttgccccttgtggatgtcaattaaacagggggtgaagctagtggttatggaccccttcaccgacttaaccatcactatgtgcatcgttctgaatactctgttcatggcactcgaacattacaatatgacttctgaattcgaggagatgctgcaagtgggtaatctggtctttaccggcatcttcactgcagaaatgaccttcaaaataatagctctggacccttactattattttcagcaagggtggaacatttttgattccatcattgtaatcttgtcgctgatggaactaggcttgtcacgcatgagtaatctatctgtgctaaggagtttcagattgcttcgcgtctttaaattagctaagagctggcccaccttgaatacactcatcaaaattatcggcaactctgtgggcgctctcggaaatctcaccttggtcctcgctattatcgtgttcatctttgcagtagttgggatgcagctgttcggcaaaaactactccgagttgcgcgactctgacagtgggctgttgccacggtggcacatgatggatttttttcatgccttcctcattatcttcaggatcttatgcggcgagtggatagagaccatgtgggactgcatggaggtctcaggtcagtccctctgcttacttgttttcctactggtgatggtaattggtaacctcgtcgtcctcaacctgttcctggccctcctgctctcatcattttcagccgacaatttgaccgctccagacgaagaccgggagatgaataatctgcaactggcactcgctaggattcagcgcggtctgaggttcgtcaaaagaacaacctgggatttctgctgcggactgctccgccaacgcccacagaagccagctgcccttgccgctcaggggcagttaccaagctgcatcgctactccttattctcccccaccccctgagaccgagaaggttcccccaaccaggaaggagaccagatttgaggagggagagcagccgggacaagggacaccgggagaccctgagcctgtgtgcgtacctatcgctgtggcagaaagtgacacagacgaccaggaggaggatgaggagaatagcctcggaacagaagaagaatccagtaaacagcaagagtcccagcccgtctccgggggaccagaggcccctcccgacagcagaacatggagccaggtaagcgcgaccgctagcagtgaggccgaagccagcgcgtcacaggcggactggaggcaacagtggaaagcagaacctcaggctccaggatgcggagagacaccagaagacagctgttcagaagggtcaaccgcggacatgacaaataccgcagagctgttggagcaaatacccgatctggggcaggatgtaaaggacccagaagattgcttcaccgagggatgcgtgcgcagatgcccttgttgcgcggtcgacaccacacaggcaccaggaaaagtatggtggaggctgcgtaagacttgctaccacatcgtagaacattcctggtttgagacattcatcatattcatgatcctgctttcaagtggcgcactcgccttcgaggatatctatctcgaggagcgcaagacaattaaggtgctgcttgagtacgcggacaagatgtttacttatgttttcgtcctggagatgctgttaaagtgggtggcatatgggtttaagaaatattttactaacgcatggtgttggttggactttctaatcgttgacgtcagcctggtctctctggtggcaaacaccctcgggtttgctgaaatgggcccaataaagagcttaagaacgctgagagccctccgaccgctgcgggcactcagcagattcgagggcatgcgtgttgtggtgaatgcacttgtcggcgctattccatctatcatgaatgtgctgcttgtgtgtctgattttttggctcatattctcgatcatgggcgtaaatctgtttgcaggaaagttcgggagatgcatcaaccagaccgagggagacctgccgctcaattataccatcgtaaataataaatcacagtgtgagtcactcaacctgactggggaactatactggacaaaagtcaaggtgaatttcgacaatgtaggtgctggctatctcgcgctgttgcaagtgtacgaggaacaaccacaatgggagtacaatttatacatgtatatctactttgtgatctttattatatttggaagcttctttactctgaacttatttatcggtgtgataattgacaacttcaatcagcagaagaaaaagctaggagggcaggatatttttatgaccgaggaacaaaagaagtactacaatgccatgaagaagctgggtagtaagaagccccagaaacctattccacgccctctgaacaaataccaaggcttcatcttcgacattgttaccaagcaagcatttgatgtgactatcatgtttctaatttgtctaaatatggtcaccatgatggtggaaaccgacgaccagagcccagagaagatcaatattttagcgaaaattaaccttcttttcgtcgccatctttaccggagaatgtatcgtgaagctggccgcattgaggcattactatttcaccaactcctggaacatatttgactttgttgttgtcatactgtccattgtgggcaccgttctgtcagatatcatccagaaatatttctttagcccaaccttgttccgcgttattagactggcaaggattggcagaatcctgcggctgattagaggggctaaaggcattagaacactgctgtttgcgttgatgatgtctctccccgctctctttaacatcgggcttctgttgtttcttgtcatgttcatttacagtatctttggcatggccaacttcgcctatgtgaagtgggaggcagggatagacgacatgtttaacttccaaacgtttgccaactcaatgctatgccttttccaaattactacatctgccggttgggacggcctactatcacctattcttaacacagggcctccctactgcgatcctaccctgcccaactccaatggctccaggggagattgcggatcacccgcagtcggcattcttttcttcaccacatacattatcatttccttccttattgtcgtcaatatgtatatcgctatcatcttagaaaatttctccgtcgcaacagaagaatccaccgagcctctctccgaagatgattttgatatgttttacgagatttgggaaaagttcgatccagaggccactcaattcatagagtacagtgtgttgagcgatttcgcagacgctttgagcgagcccctgcgtatcgccaaaccaaaccagatcagtttgataaacatggatttgccgatggtatcgggcgaccggattcattgcatggatatcctcttcgcattcaccaaacgcgtgctaggcgaaagtggagaaatggatgctctaaagattcaaatggaggagaaattcatggctgcgaaccccagcaaaatttcctacgaaccgataactacaacccttaggagaaaacatgaggaggtaagcgctatggtaattcaacgcgcatttagacgccacttgctacagcggtccctcaagcacgctagctttttgttccgccagcaggctggctctggcctgtccgaggaggatgcaccggagcgggagggtctcatagcctacgtcatgtcagagaactttagcagacctctggggccaccatcatccagctcaatttcctcaaccagcttcccacctagttacgattctgtcacacgtgcaacgtctgataatcttcaggtgagaggaagtgactactcacactccgaggatctggccgatttccccccatcgccagacagggatagggagagcattgtcta

SEQ ID NO: 39691 - DNA, 8303 bp, Artificial Sequence
  derived and/or modified sequence
ggcaacgtgaggagagcctgtgcccagaagcaggatgagaagatggcaaacttcctattacctcggggcaccagcagcttccgcaggttcacacgggagtccctggcagccatcgagaagcgcatggcagagaagcaagcccgcggctcaaccaccttgcaggagagccgagaggggctgcccgaggaggaggctccccggccccagctggacctgcaggcctccaaaaagctgccagatctctatggcaatccaccccaagagctcatcggagagcccctggaggacctggaccccttctatagcacccaaaagactttcatcgtactgaataaaggcaagaccatcttccggttcagtgccaccaacgccttgtatgtcctcagtcccttccaccccatccggagagcggctgtgaagattctggttcactcgctcttcaacatgctcatcatgtgcaccatcctcaccaactgcgtgttcatggcccagcacgaccctccaccctggaccaagtatgtcgagtacaccttcaccgccatttacacctttgagtctctggtcaagattctggctcgaggcttctgcctgcacgcgttcactttccttcgggacccatggaactggctggactttagtgtgattatcatggcgtatgtatcagaaaatataaaactaggcaatttgtcggctcttcgaactttcagagtcctgagagctctaaaaactatttcagttatcccagggctgaagaccatcgtgggggccctgatccagtctgtgaagaagctggctgatgtgatggtcctcacagtcttctgcctcagcgtctttgccctcatcggcctgcagctcttcatgggcaacctaaggcacaagtgcgtgcgcaacttcacagcgctcaacggcaccaacggctccgtggaggccgacggcttggtctgggaatccctggacctttacctcagtgatccagaaaattacctgctcaagaacggcacctctgatgtgttactgtgtgggaacagctctgacgctgggacatgtccggagggctaccggtgcctaaaggcaggcgagaaccccgaccacggctacaccagcttcgattcctttgcctgggcctttcttgcactcttccgcctgatgacgcaggactgctgggagcgcctctatcagcagaccctcaggtccgcagggaagatctacatgatcttcttcatgcttgtcatcttcctggggtccttctacctggtgaacctgatcctggccgtggtcgcaatggcctatgaggagcaaaaccaagccaccatcgctgagaccgaggagaaggaaaagcgcttccaggaggccatggaaatgctcaagaaagaacacgaggccctcaccatcaggggtgtggataccgtgtcccgtagctccttggagatgtcccctttggccccagtaaacagccatgagagaagaagcaagaggagaaaacggatgtcttcaggaactgaggagtgtggggaggacaggctccccaagtctgactcagaagatggtcccagagcaatgaatcatctcagcctcacccgtggcctcagcaggacttctatgaagccacgttccagccgcgggagcattttcacctttcgcaggcgagacctgggttctgaagcagattttgcagatgatgaaaacagcacagcgggggagagcgagagccaccacacatcactgctggtgccctggcccctgcgccggaccagtgcccagggacagcccagtcccggaacctcggctcctggccacgccctccatggcaaaaagaacagcactgtggactgcaatggggtggtctcattactgggggcaggcgacccagaggccacatccccaggaagccacctcctccgccctgtgatgctagagcacccgccagacacgaccacgccatcggaggagccaggcgggccccagatgctgacctcccaggctccgtgtgtagatggcttcgaggagccaggagcacggcagcgggccctcagcgcagtcagcgtcctcaccagcgcactggaagagttagaggagtctcgccacaagtgtccaccatgctggaaccgtctcgcccagcgctacctgatctgggagtgctgcccgctgtggatgtccatcaagcagggagtgaagttggtggtcatggacccgtttactgacctcaccatcactatgtgcatcgtactcaacacactcttcatggcgctggagcactacaacatgacaagtgaattcgaggagatgctgcaggtcggaaacctggtcttcacagggattttcacagcagagatgaccttcaagatcattgccctcgacccctactactacttccaacagggctggaacatcttcgacagcatcatcgtcatccttagcctcatggagctgggcctgtcccgcatgagcaacttgtcggtgctgcgctccttccgcctgctgcgggtcttcaagctggccaaatcatggcccaccctgaacacactcatcaagatcatcgggaactcagtgggggcactggggaacctgacactggtgctagccatcatcgtgttcatctttgctgtggtgggcatgcagctctttggcaagaactactcggagctgagggacagcgactcaggcctgctgcctcgctggcacatgatggacttctttcatgccttcctcatcatcttccgcatcctctgtggagagtggatcgagaccatgtgggactgcatggaggtgtcggggcagtcattatgcctgctggtcttcttgcttgttatggtcattggcaaccttgtggtcctgaatctcttcctggccttgctgctcagctccttcagtgcagacaacctcacagcccctgatgaggacagagagatgaacaacctccagctggccctggcccgcatccagaggggcctgcgctttgtcaagcggaccacctgggatttctgctgtggtctcctgcggcagcggcctcagaagcccgcagcccttgccgcccagggccagctgcccagctgcattgccaccccctactccccgccacccccagagacggagaaggtgcctcccacccgcaaggaaacacggtttgaggaaggcgagcaaccaggccagggcacccccggggatccagagcccgtgtgtgtgcccatcgctgtggccgagtcagacacagatgaccaagaagaagatgaggagaacagcctgggcacggaggaggagtccagcaagcagcaggaatcccagcctgtgtccggtggcccagaggcccctccggattccaggacctggagccaggtgtcagcgactgcctcctctgaggccgaggccagtgcatctcaggccgactggcggcagcagtggaaagcggaaccccaggccccagggtgcggtgagaccccagaggacagttgctccgagggcagcacagcagacatgaccaacaccgctgagctcctggagcagatccctgacctcggccaggatgtcaaggacccagaggactgcttcactgaaggctgtgtccggcgctgtccctgctgtgcggtggacaccacacaggccccagggaaggtctggtggcggttgcgcaagacctgctaccacatcgtggagcacagctggttcgagacattcatcatcttcatgatcctactcagcagtggagcgctggccttcgaggacatctacctagaggagcggaagaccatcaaggttctgcttgagtatgccgacaagatgttcacatatgtcttcgtgctggagatgctgctcaagtgggtggcctacggcttcaagaagtacttcaccaatgcctggtgctggctcgacttcctcatcgtagacgtctctctggtcagcctggtggccaacaccctgggctttgccgagatgggccccatcaagtcactgcggacgctgcgtgcactccgtcctctgagagctctgtcacgatttgagggcatgagggtggtggtcaatgccctggtgggcgccatcccgtccatcatgaacgtcctcctcgtctgcctcatcttctggctcatcttcagcatcatgggcgtgaacctctttgcggggaagtttgggaggtgcatcaaccagacagagggagacttgcctttgaactacaccatcgtgaacaacaagagccagtgtgagtccttgaacttgaccggagaattgtactggaccaaggtgaaagtcaactttgacaacgtgggggccgggtacctggcccttctgcaggtgtatgaagagcagcctcagtgggaatacaacctctacatgtacatctattttgtcattttcatcatctttgggtctttcttcaccctgaacctctttattggtgtcatcattgacaacttcaaccaacagaagaaaaagttagggggccaggacatcttcatgacagaggagcagaagaagtactacaatgccatgaagaagctgggctccaagaagccccagaagcccatcccacggcccctgaacaagtaccagggcttcatattcgacattgtgaccaagcaggcctttgacgtcaccatcatgtttctgatctgcttgaatatggtgaccatgatggtggagacagatgaccaaagtcctgagaaaatcaacatcttggccaagatcaacctgctctttgtggccatcttcacaggcgagtgtattgtcaagctggctgccctgcgccactactacttcaccaacagctggaatatcttcgacttcgtggttgtcatcctctccatcgtgggcactgtgctctcggacatcatccagaagtacttcttctccccgacgctcttccgagtcatccgcctggcccgaataggccgcatcctcagactgatccgaggggccaaggggatccgcacgctgctctttgccctcatgatgtccctgcctgccctcttcaacatcgggctgctgctcttcctcgtcatgttcatctactccatctttggcatggccaacttcgcttatgtcaagtgggaggctggcatcgacgacatgttcaacttccagaccttcgccaacagcatgctgtgcctcttccagatcaccacgtcggccggctgggatggcctcctcagccccatcctcaacactgggccgccctactgcgaccccactctgcccaacagcaatggctctcggggggactgcgggagcccagccgtgggcatcctcttcttcaccacctacatcatcatctccttcctcatcgtggtcaacatgtacattgccatcatcctggagaacttcagcgtggccacggaggagagcaccgagcccctgagtgaggacgacttcgatatgttctatgagatctgggagaaatttgacccagaggccactcagtttattgagtattcggtcctgtctgactttgccgatgccctgtctgagccactccgtatcgccaagcccaaccagataagcctcatcaacatggacctgcccatggtgagtggggaccgcatccattgcatggacattctctttgccttcaccaaaagggtcctgggggagtctggggagatggacgccctgaagatccagatggaggagaagttcatggcagccaacccatccaagatctcctacgagcccatcaccaccacactccggcgcaagcacgaagaggtgtcggccatggttatccagagagccttccgcaggcacctgctgcaacgctctttgaagcatgcctccttcctcttccgtcagcaggcgggcagcggcctctccgaagaggatgcccctgagcgagagggcctcatcgcctacgtgatgagtgagaacttctcccgaccccttggcccaccctccagctcctccatctcctccacttccttcccaccctcctatgacagtgtcactagagccaccagcgataacctccaggtgcgggggtctgactacagccacagtgaagatctcgccgacttccccccttctccggacagggaccgtgagtccatcgtgtgagcctcggcctggctggccaggacacactgaaaagcagcctttttcaccatggcaaacctaaatgcagtcagtcacaaaccagcctggggccttcctggctttgggagtaagaaatgggcctcagccccgcggatcaaccaggcagagttctgtggcgccgcgtggacagccggagcagttggcctgtgcttggaggcctcagatagacctgtgacctggtctggtcaggcaatgccctgcggctctggaaagcaacttcatcccagctgctgaggcgaaatataaaactgagactgtatatgttgtgaatgggctttcataaatttattatatttgatatttttttacttgagcaaagaactaaggatttttccatggacatgggcagcaattcacgctgtctcttcttaaccctgaacaagagtgtctatggagcagccggaagtctgttctcaaagcagaagtggaatccagtgtggctcccacaggtcttcactgcccaggggtcgaatggggtccccctcccacttgacctgagatgctgggagggctgaacccccactcacacaagcacacacacacagtcctcacacacggaggccagacacaggccgtgggacccaggctcccagcctaagggagacaggcctttccctgccggccccccaaggatggggttcttgtccacggggctcactctggccccctattgtctccaaggtcccattttccccctgtgttttcacgcaggtcatattgtcagtcctacaaaaataaaaggcttccagaggagagtggcctgggtcccagggctggccctaggcactgatagttgccttttcttcccctcctgtaagagtattaacaaaaccaaaggacacaagggtgcaagccccattcacggcctggcatgcagcttgtccttgctcctggaacctggcaggccctgcccagccagccatcggaagagagggctgagccatgggggtttggggctaagaagttcaccagccctgagccatggcggcccctcagcctgcctgaagagaggaaactggcgatctcccagggctctctggaccatacgcggaggagttttctgtgtggtctccagctcctctccagacacagagacatgggagtggggagcggagcttggccctgcgccctgtgcagggaaagggatggtcaggcccagttctcgtgcccttagaggggaatgaaccatggcacctttgagagagggggcactgtggtcaggcccagcctctctggctcagcccgggatcctgatggcacccacacagaggacctctttggggcaagatccaggtggtcccataggtcttgtgaaaaggctttttcagggaaaaatattttactagtccaatcacccccaggacctcttcagctgctgacaatcctatttagcatatgcaaatcttttaacatagagaactgtcaccctgaggtaacagggtcaactggcgaagcctgagcaggcaggggcttggctgccccattccagctctcccatggagcccctccaccgggcgcatgcctcccaggccacctcagtctcacctgccggctctgggctggctgctcctaacctacctcgccgagctgtcggagggctggacatttgtggcagtgctgaagggggcattgccggcgagtaaagtattatgtttcttcttgtcaccccagttcccttggtggcaaccccagacccaacccatgcccctgacagatctagttctcttctcctgtgttccctttgagtccagtgtgggacacggtttaactgtcccagcgacatttctccaagtggaaatcctatttttgtagatctccatgctttgctctcaaggcttggagaggtatgtgcccctcctgggtgctcaccgcctgctacacaggcaggaatgcggttgggaggcaggtcgggctgccagcccagctggccggaaggagactgtggtttttgtgtgtgtggacagcccgggagctttgagacaggtgcctggggctggctgcagacggtgtggttgggggtgggaggtgagctagacccaacccttagcttttagcctggctgtcacctttttaatttccagaactgcacaatgaccagcaggagggaaggacagacatcaagtgccagatgttgtctgaactaatcgagcacttctcaccaaacttcatgtataaataaaatacatatttttaaaacaaaccaataaatggcttacatgacctgg

SEQ ID NO: 39692 - DNA, 5997 bp, Artificial Sequence
  derived and/or modified sequence
atggccaacttcctgctgcccagaggcaccagcagcttcagaagattcaccagagagagcctggccgccatcgagaagagaatggccgagaagcaggccagaggcagcaccaccctgcaggagagcagagagggcctgcccgaggaggaggcccccagaccccagctggacctgcaggccagcaagaagctgcccgacctgtacggcaaccccccccaggagctgatcggcgagcccctggaggacctggaccccttctacagcacccagaagaccttcatcgtgctgaacaagggcaagaccatcttcagattcagcgccaccaacgccctgtacgtgctgagccccttccaccccatcagaagagccgccgtgaagatcctggtgcacagcctgttcaacatgctgatcatgtgcaccatcctgaccaactgcgtgttcatggcccagcacgacccccccccctggaccaagtacgtggagtacaccttcaccgccatctacaccttcgagagcctggtgaagatcctggccagaggcttctgcctgcacgccttcaccttcctgagagacccctggaactggctggacttcagcgtgatcatcatggcctacgtgagcgagaacatcaagctgggcaacctgagcgccctgagaaccttcagagtgctgagagccctgaagaccatcagcgtgatccccggcctgaagaccatcgtgggcgccctgatccagagcgtgaagaagctggccgacgtgatggtgctgaccgtgttctgcctgagcgtgttcgccctgatcggcctgcagctgttcatgggcaacctgagacacaagtgcgtgagaaacttcaccgccctgaacggcaccaacggcagcgtggaggccgacggcctggtgtgggagagcctggacctgtacctgagcgaccccgagaactacctgctgaagaacggcaccagcgacgtgctgctgtgcggcaacagcagcgacgccggcacctgccccgagggctacagatgcctgaaggccggcgagaaccccgaccacggctacaccagcttcgacagcttcgcctgggccttcctggccctgttcagactgatgacccaggactgctgggagagactgtaccagcagaccctgagaagcgccggcaagatctacatgatcttcttcatgctggtgatcttcctgggcagcttctacctggtgaacctgatcctggccgtggtggccatggcctacgaggagcagaaccaggccaccatcgccgagaccgaggagaaggagaagagattccaggaggccatggagatgctgaagaaggagcacgaggccctgaccatcagaggcgtggacaccgtgagcagaagcagcctggagatgagccccctggcccccgtgaacagccacgagagaagaagcaagagaagaaagagaatgagcagcggcaccgaggagtgcggcgaggacagactgcccaagagcgacagcgaggacggccccagagccatgaaccacctgagcctgaccagaggcctgagcagaaccagcatgaagcccagaagcagcagaggcagcatcttcaccttcagaagaagagacctgggcagcgaggccgacttcgccgacgacgagaacagcaccgccggcgagagcgagagccaccacaccagcctgctggtgccctggcccctgagaagaaccagcgcccagggccagcccagccccggcaccagcgcccccggccacgccctgcacggcaagaagaacagcaccgtggactgcaacggcgtggtgagcctgctgggcgccggcgaccccgaggccaccagccccggcagccacctgctgagacccgtgatgctggagcacccccccgacaccaccacccccagcgaggagcccggcggcccccagatgctgaccagccaggccccctgcgtggacggcttcgaggagcccggcgccagacagagagccctgagcgccgtgagcgtgctgaccagcgccctggaggagctggaggagagcagacacaagtgccccccctgctggaacagactggcccagagatacctgatctgggagtgctgccccctgtggatgagcatcaagcagggcgtgaagctggtggtgatggaccccttcaccgacctgaccatcaccatgtgcatcgtgctgaacaccctgttcatggccctggagcactacaacatgaccagcgagttcgaggagatgctgcaggtgggcaacctggtgttcaccggcatcttcaccgccgagatgaccttcaagatcatcgccctggacccctactactacttccagcagggctggaacatcttcgacagcatcatcgtgatcctgagcctgatggagctgggcctgagcagaatgagcaacctgagcgtgctgagaagcttcagactgctgagagtgttcaagctggccaagagctggcccaccctgaacaccctgatcaagatcatcggcaacagcgtgggcgccctgggcaacctgaccctggtgctggccatcatcgtgttcatcttcgccgtggtgggcatgcagctgttcggcaagaactacagcgagctgagagacagcgacagcggcctgctgcccagatggcacatgatggacttcttccacgccttcctgatcatcttcagaatcctgtgcggcgagtggatcgagaccatgtgggactgcatggaggtgagcggccagagcctgtgcctgctggtgttcctgctggtgatggtgatcggcaacctggtggtgctgaacctgttcctggccctgctgctgagcagcttcagcgccgacaacctgaccgcccccgacgaggacagagagatgaacaacctgcagctggccctggccagaatccagagaggcctgagattcgtgaagagaaccacctgggacttctgctgcggcctgctgagacagagaccccagaagcccgccgccctggccgcccagggccagctgcccagctgcatcgccaccccctacagcccccccccccccgagaccgagaaggtgccccccaccagaaaggagaccagattcgaggagggcgagcagcccggccagggcacccccggcgaccccgagcccgtgtgcgtgcccatcgccgtggccgagagcgacaccgacgaccaggaggaggacgaggagaacagcctgggcaccgaggaggagagcagcaagcagcaggagagccagcccgtgagcggcggccccgaggccccccccgacagcagaacctggagccaggtgagcgccaccgccagcagcgaggccgaggccagcgccagccaggccgactggagacagcagtggaaggccgagccccaggcccccggctgcggcgagacccccgaggacagctgcagcgagggcagcaccgccgacatgaccaacaccgccgagctgctggagcagatccccgacctgggccaggacgtgaaggaccccgaggactgcttcaccgagggctgcgtgagaagatgcccctgctgcgccgtggacaccacccaggcccccggcaaggtgtggtggagactgagaaagacctgctaccacatcgtggagcacagctggttcgagaccttcatcatcttcatgatcctgctgagcagcggcgccctggccttcgaggacatctacctggaggagagaaagaccatcaaggtgctgctggagtacgccgacaagatgttcacctacgtgttcgtgctggagatgctgctgaagtgggtggcctacggcttcaagaagtacttcaccaacgcctggtgctggctggacttcctgatcgtggacgtgagcctggtgagcctggtggccaacaccctgggcttcgccgagatgggccccatcaagagcctgagaaccctgagagccctgagacccctgagagccctgagcagattcgagggcatgagagtggtggtgaacgccctggtgggcgccatccccagcatcatgaacgtgctgctggtgtgcctgatcttctggctgatcttcagcatcatgggcgtgaacctgttcgccggcaagttcggcagatgcatcaaccagaccgagggcgacctgcccctgaactacaccatcgtgaacaacaagagccagtgcgagagcctgaacctgaccggcgagctgtactggaccaaggtgaaggtgaacttcgacaacgtgggcgccggctacctggccctgctgcaggtgtacgaggagcagccccagtgggagtacaacctgtacatgtacatctacttcgtgatcttcatcatcttcggcagcttcttcaccctgaacctgttcatcggcgtgatcatcgacaacttcaaccagcagaagaagaagctgggcggccaggacatcttcatgaccgaggagcagaagaagtactacaacgccatgaagaagctgggcagcaagaagccccagaagcccatccccagacccctgaacaagtaccagggcttcatcttcgacatcgtgaccaagcaggccttcgacgtgaccatcatgttcctgatctgcctgaacatggtgaccatgatggtggagaccgacgaccagagccccgagaagatcaacatcctggccaagatcaacctgctgttcgtggccatcttcaccggcgagtgcatcgtgaagctggccgccctgagacactactacttcaccaacagctggaacatcttcgacttcgtggtggtgatcctgagcatcgtgggcaccgtgctgagcgacatcatccagaagtacttcttcagccccaccctgttcagagtgatcagactggccagaatcggcagaatcctgagactgatcagaggcgccaagggcatcagaaccctgctgttcgccctgatgatgagcctgcccgccctgttcaacatcggcctgctgctgttcctggtgatgttcatctacagcatcttcggcatggccaacttcgcctacgtgaagtgggaggccggcatcgacgacatgttcaacttccagaccttcgccaacagcatgctgtgcctgttccagatcaccaccagcgccggctgggacggcctgctgagccccatcctgaacaccggccccccctactgcgaccccaccctgcccaacagcaacggcagcagaggcgactgcggcagccccgccgtgggcatcctgttcttcaccacctacatcatcatcagcttcctgatcgtggtgaacatgtacatcgccatcatcctggagaacttcagcgtggccaccgaggagagcaccgagcccctgagcgaggacgacttcgacatgttctacgagatctgggagaagttcgaccccgaggccacccagttcatcgagtacagcgtgctgagcgacttcgccgacgccctgagcgagcccctgagaatcgccaagcccaaccagatcagcctgatcaacatggacctgcccatggtgagcggcgacagaatccactgcatggacatcctgttcgccttcaccaagagagtgctgggcgagagcggcgagatggacgccctgaagatccagatggaggagaagttcatggccgccaaccccagcaagatcagctacgagcccatcaccaccaccctgagaagaaagcacgaggaggtgagcgccatggtgatccagagagccttcagaagacacctgctgcagagaagcctgaagcacgccagcttcctgttcagacagcaggccggcagcggcctgagcgaggaggacgcccccgagagagagggcctgatcgcctacgtgatgagcgagaacttcagcagacccctgggcccccccagcagcagcagcatcagcagcaccagcttcccccccagctacgacagcgtgaccagagccaccagcgacaacctgcaggtgagaggcagcgactacagccacagcgaggacctggccgacttcccccccagccccgacagagacagagagagcatcgtgtag

SEQ ID NO: 39693 - protein, 433 aa, Artificial Sequence
  derived and/or modified sequence
MGIQVPLNATEFNYLCPAIINQIDARSCLIHTSEKKAEIPPKTYSLQIAWVGGFIAISIISFLSLLGVILVPLMNRVFFKFLLSFLVALAVGTLSGDAFLHLLPHSHASHHHSHSHEEPAMEMKRGPLFSHLSSQNIEESAYFDSTWKGLTALGGLYFMFLVEHVLTLIKQFKDKKKKNQKKPENDDDVEIKKQLSKYESQLSTNEEKVDTDDRTEGYLRADSQEPSHFDSQQPAVLEEEEVMIAHAHPQEVYNEYVPRGCKNKCHSHFHDTLGQSDDLIHHHHDYHHILHHHHHQNHHPHSHSQRYSREELKDAGVATLAWMVIMGDGLHNFSDGLAIGAAFTEGLSSGLSTSVAVFCHELPHELGDFAVLLKAGMTVKQAVLYNALSAMLAYLGMATGIFIGHYAENVSMWIFALTAGLFMYVALVDMVSF

SEQ ID NO: 39694 - protein, 410 aa, Artificial Sequence
  derived and/or modified sequence
MGIQVPLNATEFNYLCPAIINQIDARSCLIHTSEKKAEIPPKTYSLQIAWVGGFIAISIISFLSLLGVILVPLMNRVFFKFLLSFLVALAVGTLSGDAFLHLLPHSHASHHHSHSHEEPAMEMKRGPLFSHLSSQNIEESAYFDSTWKGLTALGGLYFMFLVEHVLTLIKQFKDKKKKNQKKPENDDDVEIKKQLSKYESQLSTNEEKVDTDDRTEGYLRADSQEPSHFDSQQPAVLEEEEVMIAHAHPQEVYNEYVPRGCKNKCHSHFHDTLGQSDDLIHHHHDYHHILHHHHHQNHHPHSHSQRYSREELKDAGVATLAWMVIMGDGLHNFSDGLAIGAAFTEGLSSGLSTSVALVDMVPEMLHNDASDHGCSRWGYFFLQNAGMLLGFGIMLLISIFEHKIVFRINF

SEQ ID NO: 39695 - DNA, 1302 bp, Artificial Sequence
  derived and/or modified sequence
atgggcatccaggtgcccctgaacgccaccgagttcaactacctgtgccccgccatcatcaaccagatcgacgccagaagctgcctgatccacaccagcgagaagaaggccgagatcccccccaagacctacagcctgcagatcgcctgggtgggcggcttcatcgccatcagcatcatcagcttcctgagcctgctgggcgtgatcctggtgcccctgatgaacagagtgttcttcaagttcctgctgagcttcctggtggccctggccgtgggcaccctgagcggcgacgccttcctgcacctgctgccccacagccacgccagccaccaccacagccacagccacgaggagcccgccatggagatgaagagaggccccctgttcagccacctgagcagccagaacatcgaggagagcgcctacttcgacagcacctggaagggcctgaccgccctgggcggcctgtacttcatgttcctggtggagcacgtgctgaccctgatcaagcagttcaaggacaagaagaagaagaaccagaagaagcccgagaacgacgacgacgtggagatcaagaagcagctgagcaagtacgagagccagctgagcaccaacgaggagaaggtggacaccgacgacagaaccgagggctacctgagagccgacagccaggagcccagccacttcgacagccagcagcccgccgtgctggaggaggaggaggtgatgatcgcccacgcccacccccaggaggtgtacaacgagtacgtgcccagaggctgcaagaacaagtgccacagccacttccacgacaccctgggccagagcgacgacctgatccaccaccaccacgactaccaccacatcctgcaccaccaccaccaccagaaccaccacccccacagccacagccagagatacagcagagaggagctgaaggacgccggcgtggccaccctggcctggatggtgatcatgggcgacggcctgcacaacttcagcgacggcctggccatcggcgccgccttcaccgagggcctgagcagcggcctgagcaccagcgtggccgtgttctgccacgagctgccccacgagctgggcgacttcgccgtgctgctgaaggccggcatgaccgtgaagcaggccgtgctgtacaacgccctgagcgccatgctggcctacctgggcatggccaccggcatcttcatcggccactacgccgagaacgtgagcatgtggatcttcgccctgaccgccggcctgttcatgtacgtggccctggtggacatggtgagcttctag

SEQ ID NO: 39696 - DNA, 1233 bp, Artificial Sequence
  derived and/or modified sequence
atgggcatccaggtgcccctgaacgccaccgagttcaactacctgtgccccgccatcatcaaccagatcgacgccagaagctgcctgatccacaccagcgagaagaaggccgagatcccccccaagacctacagcctgcagatcgcctgggtgggcggcttcatcgccatcagcatcatcagcttcctgagcctgctgggcgtgatcctggtgcccctgatgaacagagtgttcttcaagttcctgctgagcttcctggtggccctggccgtgggcaccctgagcggcgacgccttcctgcacctgctgccccacagccacgccagccaccaccacagccacagccacgaggagcccgccatggagatgaagagaggccccctgttcagccacctgagcagccagaacatcgaggagagcgcctacttcgacagcacctggaagggcctgaccgccctgggcggcctgtacttcatgttcctggtggagcacgtgctgaccctgatcaagcagttcaaggacaagaagaagaagaaccagaagaagcccgagaacgacgacgacgtggagatcaagaagcagctgagcaagtacgagagccagctgagcaccaacgaggagaaggtggacaccgacgacagaaccgagggctacctgagagccgacagccaggagcccagccacttcgacagccagcagcccgccgtgctggaggaggaggaggtgatgatcgcccacgcccacccccaggaggtgtacaacgagtacgtgcccagaggctgcaagaacaagtgccacagccacttccacgacaccctgggccagagcgacgacctgatccaccaccaccacgactaccaccacatcctgcaccaccaccaccaccagaaccaccacccccacagccacagccagagatacagcagagaggagctgaaggacgccggcgtggccaccctggcctggatggtgatcatgggcgacggcctgcacaacttcagcgacggcctggccatcggcgccgccttcaccgagggcctgagcagcggcctgagcaccagcgtggccctggtggacatggtgcccgagatgctgcacaacgacgccagcgaccacggctgcagcagatggggctacttcttcctgcagaacgccggcatgctgctgggcttcggcatcatgctgctgatcagcatcttcgagcacaagatcgtgttcagaatcaacttctag

SEQ ID NO: 39697 - DNA, 1302 bp, Artificial Sequence
  derived and/or modified sequence
atgggcattcaggtgcccctgaatgccactgagtttaattatctgtgtccggctattatcaaccagatcgacgccagaagctgtctgattcacacctctgagaaaaaagccgaaatcccaccaaagacttactccctgcagatagcctgggtgggaggctttattgcaatcagcattatatcttttttgagtctgctgggggttattctcgtgccactcatgaaccgcgttttcttcaagtttcttcttagctttctagtagccctggccgtcggtacgctctccggcgatgccttcctccatcttctcccacattcccatgcctctcaccatcactcccacagtcatgaagagcccgccatggaaatgaaacggggccctctgtttagtcatctcagctctcaaaatattgaggaatctgcgtacttcgactctacatggaagggcttaacagccctcgggggcctgtattttatgttcctggtcgagcatgtccttactctcataaaacagtttaaggataaaaaaaaaaagaaccagaagaaacccgagaatgatgacgacgtggaaatcaagaagcagctcagcaagtacgagtcccagttatccacaaatgaagagaaagtggatactgatgataggaccgaggggtatctcagagccgactctcaggaaccatcccacttcgacagtcaacagccagctgtcctggaagaagaggaagtcatgatagcccacgctcacccacaggaggtatataacgagtacgtgcctcgagggtgcaagaacaagtgccacagtcatttccatgacacattgggccagagtgacgacctcatacatcaccatcatgattatcatcacatcctccaccatcaccaccaccagaaccatcacccccactcgcattcccagagatactccagagaggagctgaaggatgcaggtgttgcaacccttgcttggatggtcataatgggtgacggactacacaacttttcagatgggttggctattggtgctgctttcactgagggactgtcttcaggactcagtactagtgtcgctgtgttctgtcacgagttgcctcacgagctgggggacttcgccgttcttttaaaagccggcatgaccgttaaacaagctgtcctgtacaacgcactgagcgccatgcttgcttacctgggcatggccaccgggatcttcataggacactatgccgaaaacgtgtccatgtggatcttcgccttaactgctggtctgtttatgtatgtggctctggtagatatggtctctttctag

SEQ ID NO: 39698 - DNA, 1233 bp, Artificial Sequence
  derived and/or modified sequence
atgggcatccaggtccccctgaacgctaccgagttcaattacctctgccccgctatcatcaatcaaatagacgctagatcatgtcttatccatacgagtgagaagaaggcggaaattccgccaaaaacgtactcgctccagatagcctgggtcggagggtttattgccatttctattatctcgttcctaagtctcttgggcgtaattctcgttccattgatgaatagggtcttttttaagtttctgctatctttcctggtggccctcgccgtgggtaccctaagtggcgatgcattccttcacctgctgccccatagtcacgccagccaccatcattcccatagccatgaagagcctgcaatggaaatgaaacgcggaccccttttcagtcacctgtcctctcagaacatagaagagtcagcctacttcgatagcacgtggaagggcctgactgcacttgggggactgtatttcatgttcttggtggagcacgtgctcacattaatcaaacagttcaaggataagaagaagaagaaccagaaaaaacccgagaatgatgacgatgttgagattaaaaagcagctgtcaaagtatgaatctcagctgagtacaaacgaagaaaaagtggacaccgatgataggaccgaaggttacctgagggctgactctcaggaaccgtcacacttcgacagtcagcagccagcagtgctcgaagaggaggaggtcatgatcgctcacgcccacccgcaagaggtctataatgaatacgtgccgcgcggatgtaagaacaagtgccactcacactttcacgatacattaggccagagtgatgatctgatccaccaccaccatgactatcaccatattctccaccaccaccaccaccagaatcatcacccacattctcactctcagaggtattcgcgcgaggagttgaaggacgccggagtggctacattggcttggatggtgattatgggcgacggcttgcacaatttctccgatggcctggctatcggagccgcgtttacagagggcctctctagcggcctgtctacctctgtagccctcgttgacatggtcccagagatgttacataatgacgccagcgaccacggttgttcacgttgggggtatttcttcctgcagaacgcaggcatgctgctgggctttggcattatgctactaatttctatattcgagcataaaatcgtcttcagaatcaacttttag

SEQ ID NO: 39699 - DNA, 1302 bp, Artificial Sequence
  derived and/or modified sequence
atgggcatccaggtgcccctgaatgccacagagttcaactacctgtgcccagccatcatcaaccagattgatgcccggagctgcctgatccacaccagcgagaagaaggccgagatcccccccaagacctacagcctgcagatcgcctgggtgggcggcttcatcgccatcagcatcatctccttcctgagcctgctgggcgtcatcctggtgcccctgatgaacagagtcttcttcaagttcctgctgtccttcctggtggccctggccgtgggcaccctgtctggagatgccttcctgcacctgctgccccacagccacgccagccaccaccacagccacagccatgaggagcccgccatggagatgaagaggggccccctcttcagccacctgagcagccagaacatcgaggagagcgcctactttgacagcacctggaagggcctgacagccctgggcggcctgtacttcatgttcctggtggagcacgtgctgaccctcatcaagcagttcaaggacaagaagaagaagaaccagaagaagccagaaaatgatgatgatgtggagatcaagaagcagctgagcaaatatgagagccagctgagcaccaatgaggagaaggtggacacagatgacagaacagagggctacctgcgggctgacagccaggagcccagccactttgacagccagcagcctgctgtgctggaggaggaggaggtgatgattgcccacgcccacccccaggaggtgtacaatgaatatgtgccccggggctgcaagaacaagtgccacagccacttccatgacaccctgggccagagtgatgacctgatccaccaccaccacgactaccaccacatcctgcaccaccaccaccaccagaaccaccacccccacagccacagccagcgctacagccgggaggagctgaaggatgctggggtggccaccctggcctggatggtgatcatgggagatggcctgcacaacttcagtgatggcctggccatcggggccgccttcacagagggcctgagcagcggcctgagcacctctgtggccgtgttctgccacgagctgccccatgagctgggggactttgctgtgctgctgaaggccggcatgacagtgaagcaggccgtgctgtacaatgccctgagcgccatgctggcctacctgggcatggccaccggcatcttcatcggccactatgcagaaaatgtgtccatgtggatctttgccctgacagctggcctcttcatgtatgtggccctggtggacatggtgtccttctag

SEQ ID NO: 39700 - DNA, 1233 bp, Artificial Sequence
  derived and/or modified sequence
atgggcatccaggtgcccctgaatgccacagagttcaactacctgtgcccagccatcatcaaccagattgatgcccggagctgcctgatccacaccagcgagaagaaggccgagatcccccccaagacctacagcctgcagatcgcctgggtgggcggcttcatcgccatcagcatcatctccttcctgagcctgctgggcgtcatcctggtgcccctgatgaacagagtcttcttcaagttcctgctgtccttcctggtggccctggccgtgggcaccctgtctggagatgccttcctgcacctgctgccccacagccacgccagccaccaccacagccacagccatgaggagcccgccatggagatgaagaggggccccctcttcagccacctgagcagccagaacatcgaggagagcgcctactttgacagcacctggaagggcctgacagccctgggcggcctgtacttcatgttcctggtggagcacgtgctgaccctcatcaagcagttcaaggacaagaagaagaagaaccagaagaagccagaaaatgatgatgatgtggagatcaagaagcagctgagcaaatatgagagccagctgagcaccaatgaggagaaggtggacacagatgacagaacagagggctacctgcgggctgacagccaggagcccagccactttgacagccagcagcctgctgtgctggaggaggaggaggtgatgattgcccacgcccacccccaggaggtgtacaatgaatatgtgccccggggctgcaagaacaagtgccacagccacttccatgacaccctgggccagagtgatgacctgatccaccaccaccacgactaccaccacatcctgcaccaccaccaccaccagaaccaccacccccacagccacagccagcgctacagccgggaggagctgaaggatgctggggtggccaccctggcctggatggtgatcatgggagatggcctgcacaacttcagtgatggcctggccatcggggccgccttcacagagggcctgagcagcggcctgagcacctctgtggccctggtggacatggtgcctgagatgctgcacaatgatgccagtgaccacggctgcagccgctggggctacttcttcctgcagaatgccggcatgctgctgggcttcggcatcatgctgctgatcagcatctttgagcacaagatcgtgttccgcatcaacttctag

SEQ ID NO: 39701 - DNA, 1302 bp, Artificial Sequence
  derived and/or modified sequence
atgggcatccaggtgcccctgaacgccaccgagttcaactacctgtgtccggctatcataaaccagatcgatgctcgctcctgtttaatacacactagcgagaagaaagcagagatcccaccaaaaacgtattctcttcaaattgcttgggtaggtgggtttatcgccatttctattattagttttctttcgctcttgggcgtgatattggtgcccctgatgaaccgtgtattttttaagtttctgctcagctttctggttgcactcgctgtggggacactgtctggggacgcatttctccatctgctgccacatagtcacgcctcccaccaccacagtcacagtcatgaggaaccagcgatggaaatgaaacggggtcccttattttcgcatctgtcgagtcagaacattgaggagtccgcttattttgactcaacttggaagggcttgactgcactgggaggcctgtacttcatgttcctcgtggagcacgtcctgactctcatcaaacaatttaaagacaagaagaagaaaaatcagaagaagccagaaaacgacgacgacgtggagataaagaagcagctgagcaaatacgagtcacagctttccacgaatgaggaaaaagtggataccgacgataggacggaaggctacctcagggctgatagccaggagccctctcactttgactcacagcagccggccgtattagaggaggaggaagtaatgatcgctcatgcacatcctcaggaggtgtataacgaatatgtgcctcgaggatgtaagaataaatgtcactcccacttccacgacacactcggacagtctgacgatctgatccaccatcaccacgactatcaccatatcctccatcaccaccaccaccaaaaccaccacccacattcccactctcaaaggtatagccgagaggaactaaaagatgcaggagtcgcaaccctggcttggatggtaatcatgggcgatggcctgcacaatttcagcgacggactcgccatcggggctgccttcacggagggactgtcctccgggctgtccacaagtgtagctgtgttttgtcatgagctcccacacgagctgggggatttcgccgtcttgctgaaagctggaatgacagtgaagcaggcagtcctgtacaatgctctgtctgccatgctggcatatctcgggatggccacaggcattttcattggacattacgcagagaatgtcagcatgtggatttttgccctgaccgctggattgttcatgtatgtggcccttgtagatatggtctctttttag

SEQ ID NO: 39702 - DNA, 1233 bp, Artificial Sequence
  derived and/or modified sequence
atgggcatccaggtgcccctgaacgccaccgagttcaactacctgtgcccagctatcatcaaccaaatcgatgccaggtcttgtctcatacacacttccgagaaaaaagcggaaattccgcctaagacctactctttgcagatagcatgggtgggcggcttcattgcaataagtattattagcttcttgagcctcctcggtgtgatcttagttcctttgatgaaccgggtcttttttaagtttcttctgagtttcctagtggcactggcagtggggaccctatctggcgacgcctttctccatttacttccgcatagccacgcaagtcatcaccattcacactcccatgaagaaccagccatggagatgaaacgcggcccgctgttctcacacctctcctctcagaatattgaggaatcagcctattttgacagtacctggaagggcctcaccgccctgggcggcctgtactttatgttccttgtggaacacgtgctgacgttgattaaacagtttaaagataagaaaaaaaagaatcagaaaaaacccgaaaatgatgacgacgtagaaatcaaaaagcagctgtctaaatatgagagccaactgtcaacgaacgaggagaaggtggataccgacgaccgcaccgagggataccttcgcgcagactctcaggaaccaagccactttgactctcagcagccagccgtgctggaagaggaggaagtcatgatagcccacgctcatcctcaggaggtctataacgaatacgtgccaaggggctgcaaaaacaaatgccacagccacttccatgatactctcggacagtccgatgacttgatccatcatcaccacgattaccaccacatcctgcaccaccaccatcaccaaaaccaccatccacattcccatagtcagaggtacagcagggaggaactgaaggatgcaggtgtggcaactttagcctggatggtgataatgggagacggactgcataacttcagtgacggtcttgcaattggcgctgcctttaccgagggcctgagcagtgggctgagcacaagtgttgctttggtggacatggttccagaaatgctgcacaacgatgcttctgatcatggctgcagccgatggggctatttctttttgcaaaatgccggtatgcttctcggctttgggataatgctgttgattagtatcttcgagcacaagatcgttttcaggatcaacttctag

SEQ ID NO: 39703 - DNA, 1302 bp, Artificial Sequence
  derived and/or modified sequence
atgggtattcaggtgcctttgaacgccaccgagttcaattacctgtgtcccgcaattatcaatcagatcgatgcccgatcctgcttaattcatacgtccgaaaaaaaggccgagatccccccaaaaacttacagcctacagatcgcatgggttggcggatttatcgctatctctatcatctcttttctgtccctgttaggcgtgattctggtgcctctcatgaaccgggtcttttttaaatttctactctcctttctcgttgcattggccgtcggcacgctgagcggggatgcttttcttcatttgttgcctcactcacatgcaagccaccaccacagccatagccacgaagaaccggctatggaaatgaaacgcggaccgctgttttcgcatctgtcaagccaaaacatcgaggaaagcgcctattttgacagcacatggaaaggcctgactgctctgggaggtctgtactttatgtttctggttgaacacgtgctgaccctgataaaacagttcaaggataaaaaaaagaagaaccagaagaagcccgaaaacgacgacgatgtggaaatcaaaaaacagctctctaaatacgagtcgcagttatctacgaacgaggagaaggtggacacggacgacagaaccgagggttacttgcgcgcagattcacaagagccctctcactttgattctcagcagcctgccgtgcttgaggaggaagaagtcatgatagcccacgcccatcctcaagaagtttataatgaatatgtgccgagaggttgtaagaataagtgtcactctcacttccatgatacactggggcagagcgacgaccttatccatcaccaccacgactatcatcacatattacatcatcaccaccaccagaaccatcaccctcactctcactcccagcgttatagccgagaagagctgaaagacgcgggagtcgccactttggcatggatggttatcatgggcgatggacttcacaatttcagcgacgggctcgcaatcggcgcagcctttacggaggggttgtctagtggcttgagtacttcggttgcagtcttttgccacgaattgcctcatgagctcggagactttgctgttttattaaaagcaggcatgacagtgaagcaggccgtgctgtataatgcccttagtgccatgctggcctatcttggcatggccactggcatttttataggacactacgcagagaacgtgtctatgtggatcttcgcgctaacagctgggttgtttatgtacgtggcgttagtggatatggtctcattctag

SEQ ID NO: 39704 - DNA, 1233 bp, Artificial Sequence
  derived and/or modified sequence
atgggtatccaggtgcccctgaacgcaacagaattcaactatttatgtccagccataatcaatcagatcgatgccagaagttgtttgattcacacctccgaaaagaaagcagagatcccgcctaagacctatagccttcagatcgcctgggtgggcggatttattgccattagtatcattagctttctctctttgctcggcgtaattttggtcccactgatgaaccgcgtctttttcaagttcttgctgagctttttggtcgccttggccgtgggcactctgagtggggatgcatttctgcacttgttacctcactctcatgcgtctcatcatcactcccacagtcacgaagaaccagctatggaaatgaaacgtggaccattgttttcccatctctcttcccagaacattgaagaatcagcctattttgattcaacctggaagggactgactgcactgggcggtctgtactttatgttccttgtcgagcacgtgctgacactcatcaaacagttcaaagacaaaaagaagaaaaaccagaaaaaacccgagaacgatgatgatgtcgagataaagaagcagctgtcaaagtatgaatcccagttgtccaccaacgaggaaaaggtggataccgacgatagaaccgaaggatacttgagagccgattctcaggagccaagccacttcgactcacagcagccagccgtcctcgaagaggaagaagtgatgatcgcacatgcgcatccccaggaagtatataacgagtacgtgcctcggggttgtaagaacaaatgtcactcccactttcacgacaccctgggtcaaagcgatgacctgatacaccatcaccacgattatcatcatattctgcatcatcatcatcaccagaaccatcatccgcatagtcattcgcagaggtatagtagagaggagctgaaggacgctggggtcgccacactggcttggatggtgatcatgggcgatggtcttcataactttagcgacgggttagctataggtgccgcatttaccgaaggactcagctcaggactgagcacaagcgtggctctcgttgatatggtgccggaaatgctccataacgacgcaagtgatcatggttgtagtagatggggctactttttcctgcaaaatgctggtatgctgcttggcttcggcatcatgctacttatttcaatcttcgaacataaaatagtgttccgcattaacttctag

SEQ ID NO: 39705 - protein, 1395 aa, Artificial Sequence
  derived and/or modified sequence
MTGAEIESGAQVKPEKKPGEEVVGGAEIENDVPLVVRPKVRTQAQIMPGARPKNKSKVMPGASTKVETSAVGGARPKSKAKAIPVSRFKEEAQMWAQPRFGAERLSKTERNSQTNIIASPLVSTDSVLVAKTKYLSEDRELVNTDTESFPRRKAHYQAGFQPSFRSKEETNMGSWCCPRPTSKQEASPNSDFKWVDKSVSSLFWSGDEVTAKFHPGNRVKDSNRSMHMANQEANTMSRSQTNQELYIASSSGSEDESVKTPWFWARDKTNTWSGPREDPNSRSRFRSKKEVYVESSSGSEHEDHLESWFGAGKEAKFRSKMRAGKEANNRARHRAKREACIDFMPGSIDVIKKESCFWPEENANTFSRPMIKKEARARAMTKEEAKTKARARAKQEARSEEEALIGTWFWATDESSMADEASIESSLQVEDESIIGSWFWTEEEASMGTGASSKSRPRTDGERIGDSLFGAREKTSMKTGAEATSESILAADDEQVIIGSWFWAGEEVNQEAEEETIFGSWFWVIDAASVESGVGVSCESRTRSEEEEVIGPWFWSGEQVDIEAGIGEEARPGAEEETIFGSWFWAENQTYMDCRAETSCDTMQGAEEEEPIIGSWFWTRVEACVEGDVNSKSSLEDKEEAMIPCFGAKEEVSMKHGTGVRCRFMAGAEETNNKSCFWAEKEPCMYPAGGGSWKSRPEEEEDIVNSWFWSRKYTKPEAIIGSWLWATEESNIDGTGEKAKLLTEEETIINSWFWKEDEAISEATDREESRPEAEEGDIIGSWFWAGEEDRLEPAAETREEDRLAAEKEGIVGSWFGAREETIRREAGSCSKSSPKAEEEEVIIGSWFWEEEASPEAVAGVGFESKPGTEEEEITVGSWFWPEEEASIQAGSQAVEEMESETEEETIFGSWFWDGKEVSEEAGPCCVSKPEDDEEMIVESWFWSRDKAIKETGTVATCESKPENEEGAIVGSWFEAEDEVDNRTDNGSNCGSRTLADEDEAIVGSWFWAGDEAHFESNPSPVFRAICRSTCSVEQEPDPSRRPQSWEEVTVQFKPGPWGRVGFPSISPFRFPKEAASLFCEMFGGKPRNMVLSPEGEDQESLLQPDQPSPEFPFQYDPSYRSVQEIREHLRAKESTEPESSSCNCIQCELKIGSEEFEELLLLMEKIRDPFIHEISKIAMGMRSASQFTRDFIRDSGVVSLIETLLNYPSSRVRTSFLENMIRMAPPYPNLNIIQTYICKVCEETLAYSVDSPEQLSGIRMIRHLTTTTDYHTLVANYMSGFLSLLATGNAKTRFHVLKMLLNLSENLFMTKELLSAEAVSEFIGLFNREETNDNIQIVLAIFENIGNNIKKETVFSDDDFNIEPLISAFHKVEKFAKELQGKTDNQNDPEGDQEN

SEQ ID NO: 39706 - DNA, 5322 bp, Artificial Sequence
  derived and/or modified sequence
gccccccttcccgacaccctcgcggagagcggttcttgccgcatcctgcgcagcccctgcccagtttggtgcagaggcgtggggggcgggactcgtctttgccattcggatcgctgggaaagcggtgggaatccaactgaagagcagccagaggagagctgaagagaggagggggaggccgatgacctgggctctgggcctctgaaggtctggcgtattctgacaggacacagtgagcatctgtagaggagaggcttgaaataaaggaggagcacgaatattccctggatttctggaggcctgctttaaggctggccagttctgcaagaaaggcaaggaggaggagactggctcacacctctggaggacccccttctgtcagctgtggggcttgacactacttgaacaagaaaaggagggggaaactgcaccacataagtgaagatccacctccagtggctgctctgctggtggtggggttgctgctgacaaccaccctcaacgggtctgcacccatccaggaaatctctgtcttcctcaagcttggttgtgcctgttctacactctatctgtattattgaattactgactgagactgtgtttgggaaggaggctgagtgactactggactggatattgactctaactcttgtttccaagcttatatcctcaatcacctaaagatcagagtgtgaagaaacaaacctgtgacagatctgtggttgaggtttagactgggggaggagtatagtactggactttctttgtaacttgtaccatgactggggcagagattgagtctggtgcccaggtcaagcctgaaaagaagcctggggaagaggttgtaggtggggctgagatagagaatgatgtccctctggtggtcagacccaaggttaggacccaggcccagataatgcctggggcaaggcccaagaataagtccaaggttatgcctggagcaagcaccaaagttgagacaagtgcagtgggtggggcacgccctaagagtaaggccaaggcaatacctgtttcacgatttaaggaagaagcccagatgtgggctcagcccaggtttggtgctgaaagattgtctaagacagagagaaactcccagaccaatatcatagcctctccacttgtcagtactgattctgtcttggttgctaaaacaaagtacctgtctgaggatagagaactggttaatacagacactgagagctttcctagaaggaaggcccattaccaagcaggattccagccttcttttaggtcaaaggaggagaccaatatggggtcctggtgctgtcctaggcctacatccaaacaagaagcctctcctaattctgatttcaaatgggtagacaaatctgtgagttccttgttctggagtggagatgaggtcactgcaaaatttcatcctgggaatagggtaaaagacagtaacagatccatgcacatggccaatcaagaggctaataccatgtctaggtcccaaactaaccaggagctctatattgcatctagttctggttctgaggatgagtctgttaagacaccctggttctgggccagagataaaaccaatacctggtctgggcccagggaagatcccaatagcaggtccaggtttaggtctaagaaagaagtctatgttgaatcaagttctggatctgagcatgaagaccatttggagtcctggtttggggctggaaaggaggccaaattcaggtccaaaatgagagctgggaaggaggccaataacagggccaggcacagggccaagcgagaagcttgcattgatttcatgcctgggtctatagatgtaattaaaaaagagtcctgtttctggcctgaagaaaatgctaataccttttcaaggcccatgatcaagaaagaggccagggccagagcaatgacaaaggaagaggccaaaaccaaggcccgagccagggccaagcaagaagccaggtcagaggaggaagccctcattgggacctggttctgggctacagacgagtccagcatggcagatgaagccagcatagagtccagtctacaagtggaggatgagtccataattgggagttggttctggactgaagaagaggccagtatggggactggggctagcagtaaatccagaccaaggactgatggggagcgtattggtgattccttatttggggctagggaaaagaccagtatgaaaactggggctgaggccacctctgaatctatactagcagctgatgatgaacaggtcattattggttcctggttctgggctggtgaagaggtcaaccaagaggctgaggaagagaccatttttgggtcgtggttctgggtcattgatgcggccagtgtggaatctggtgttggggtcagctgtgagtccaggacaaggtctgaggaagaagaggtcattggtccctggttttggtctggagaacaagttgatatagaggctggaatcggagaagaggccaggccaggagctgaagaagagacaatattcgggtcctggttttgggctgaaaaccagacctatatggattgtagggctgaaactagctgtgacaccatgcaaggggctgaggaggaggagcccattattgggtcctggttttggaccagagtagaagcttgtgtggagggtgatgtcaacagcaagtctagcctggaggacaaggaagaggccatgataccatgttttggagccaaagaagaggtcagtatgaagcatgggactggtgtcagatgcagatttatggcaggggctgaggagaccaataataagtcttgcttctgggcagaaaaagaaccctgtatgtatcctgccggtggaggaagttggaagtctaggccagaggaggaagaggacattgtcaattcgtggttctggtccagaaaatacacaaagccagaggccattatagggtcctggttatgggctacagaagagagtaatatagatgggactggagaaaaggccaagttactgactgaagaggagaccataatcaattcctggttctggaaagaagatgaagccatttcagaggctactgacagagaagagtccaggccagaagctgaggagggggacattattggttcttggttctgggctggagaagaggacagactagagccagctgctgagactagagaagaagacaggctagcagctgagaaagaaggtattgttgggtcctggtttggggccagagaagagaccattagaagagaggctgggtcttgcagcaaatccagtcctaaagctgaagaggaagaagtcattattgggtcctggttctgggaagaagaggccagtccggaggcagtggcaggagtcggctttgagtcaaagcctgggactgaggaggaagaaatcactgttgggtcctggttctggcctgaagaagaagccagtatacaggctggatctcaggcagtagaggaaatggagtcagagactgaagaggaaaccatttttgggtcctggttctgggatggaaaagaagtcagtgaagaagcaggaccatgctgtgtatccaagccagaggatgatgaagagatgattgttgagtcctggttctggtctagagacaaagccattaaggaaactggaactgtggccacctgtgagtccaagccagaaaatgaggaaggggccattgttgggtcttggtttgaggctgaagatgaggtagataacaggactgacaatggaagcaactgtgggtccaggacattagctgatgaagatgaggccatagtggggtcctggttctgggcaggagatgaggcccattttgaatcaaatcctagccccgtgttcagggccatttgcaggtccacgtgttcagttgaacaggagcctgatccttcacgcaggcctcagagttgggaggaggtcactgttcagttcaagcctggtccatggggtagggtcggcttcccatctataagcccctttagatttccgaaagaggcagcatctttattctgtgaaatgtttgggggcaaacccaggaacatggtacttagcccagaaggggaagatcaggaatctttgcttcagcctgatcagcctagtcctgagttcccatttcagtatgatccttcctacaggtcagtccaggaaattcgagagcatcttagggccaaggagagtacagagcctgagagttcatcctgtaactgcatacaatgtgagctgaaaattggttctgaagagtttgaagaactccttttattaatggaaaaaattcgggatccttttattcatgaaatatctaaaatcgcaatgggtatgagaagtgcttctcaatttacccgagatttcattcgagattcaggtgttgtctcacttattgaaaccttgcttaattatccgtcctcccgagttagaacaagttttttggaaaatatgattcgcatggccccaccttatccgaatctaaacataattcagacatacatatgtaaagtgtgtgaggaaacccttgcttatagcgtggattccccggaacagctgtctggaataaggatgattagacatctcactactactactgactatcacacactggttgccaattatatgtctgggtttctctccttattagctacaggcaatgccaaaacaaggtttcatgttttgaaaatgctactgaatttgtctgaaaatcttttcatgacaaaagaactactcagtgctgaagcagtgtcagaatttataggcctctttaacagggaagagacaaatgacaatattcaaattgttcttgcaatatttgagaatattggcaacaatatcaaaaaagaaacagtgttctctgatgatgatttcaatattgagccgcttatttctgcattccacaaagttgagaaatttgctaaggaactgcaaggcaaaacagacaatcaaaatgaccctgaaggggaccaagaaaattagtaatggttaattgctggcctcagattgtccttatgttcctgagttatgatccttgagtaatgctttgattttaatagttggttctgtgttgcaacatatatctttagtgctgacactaactttgtccaactctgtctgtaagctggagcatttttctgatgccagctgaatattagagctgaaaacacatttgttgatatttgtcttgtccacattgtgatgttcagtatttgagcttatagtgaactgagcaatcataaataagccacccttctgattgtcgttctactgtatatatatatatatttgagtgttgtttgtgtttcaataaagtcctatgttaaagttggcagaaa

SEQ ID NO: 39707 - DNA, 5877 bp, Artificial Sequence
  derived and/or modified sequence
gcactttcgcgccgtatccctccgccccccttcccgacaccctcgcggagagcggttcttgccgcatcctgcgcagcccctgcccagtttggtgcagaggcgtggggggcgggactcgtctttgccattcggatcgctgggaaagcggtgggaatccaactgaagagcagccagaggagagctgaagagaggagggggaggccgatgacctgggctctgggcctctgaaggcctgctttaaggctggccagttctgcaagaaaggcaaggaggaggagactggctcacacctctggaggacccccttctgtcagctgtggggcttgacactacttgaacaagaaaaggagggggaaactgcaccacataagtgaagatccacctccagtggctgctctgctggtggtggggttgctgctgacaaccaccctcaacgggtctgcacccatccaggaaatctctgtcttcctcaagcttggttgtgcctgttctacactctatctgtattattgaattactgactgagactgtgtttgggaaggaggctgagtgactactggactggatattgactctaactcttgtttccaagcttatatcctcaatcacctaaagatcagagtgtgaagaaacaaacctgtgacagatctgtggttgaggtttagactgggggaggagtatagtactggactttctttgtaacttgtaccatgactggggcagagattgagtctggtgcccaggtcaagcctgaaaagaagcctggggaagaggttgtaggtggggctgagatagagaatgatgtccctctggtggtcagacccaaggttaggacccaggcccagataatgcctggggcaaggcccaagaataagtccaaggttatgcctggagcaagcaccaaagttgagacaagtgcagtgggtggggcacgccctaagagtaaggccaaggcaatacctgtttcacgatttaaggaagaagcccagatgtgggctcagcccaggtttggtgctgaaagattgtctaagacagagagaaactcccagaccaatatcatagcctctccacttgtcagtactgattctgtcttggttgctaaaacaaagtacctgtctgaggatagagaactggttaatacagacactgagagctttcctagaaggaaggcccattaccaagcaggattccagccttcttttaggtcaaaggaggagaccaatatggggtcctggtgctgtcctaggcctacatccaaacaagaagcctctcctaattctgatttcaaatgggtagacaaatctgtgagttccttgttctggagtggagatgaggtcactgcaaaatttcatcctgggaatagggtaaaagacagtaacagatccatgcacatggccaatcaagaggctaataccatgtctaggtcccaaactaaccaggagctctatattgcatctagttctggttctgaggatgagtctgttaagacaccctggttctgggccagagataaaaccaatacctggtctgggcccagggaagatcccaatagcaggtccaggtttaggtctaagaaagaagtctatgttgaatcaagttctggatctgagcatgaagaccatttggagtcctggtttggggctggaaaggaggccaaattcaggtccaaaatgagagctgggaaggaggccaataacagggccaggcacagggccaagcgagaagcttgcattgatttcatgcctgggtctatagatgtaattaaaaaagagtcctgtttctggcctgaagaaaatgctaataccttttcaaggcccatgatcaagaaagaggccagggccagagcaatgacaaaggaagaggccaaaaccaaggcccgagccagggccaagcaagaagccaggtcagaggaggaagccctcattgggacctggttctgggctacagacgagtccagcatggcagatgaagccagcatagagtccagtctacaagtggaggatgagtccataattgggagttggttctggactgaagaagaggccagtatggggactggggctagcagtaaatccagaccaaggactgatggggagcgtattggtgattccttatttggggctagggaaaagaccagtatgaaaactggggctgaggccacctctgaatctatactagcagctgatgatgaacaggtcattattggttcctggttctgggctggtgaagaggtcaaccaagaggctgaggaagagaccatttttgggtcgtggttctgggtcattgatgcggccagtgtggaatctggtgttggggtcagctgtgagtccaggacaaggtctgaggaagaagaggtcattggtccctggttttggtctggagaacaagttgatatagaggctggaatcggagaagaggccaggccaggagctgaagaagagacaatattcgggtcctggttttgggctgaaaaccagacctatatggattgtagggctgaaactagctgtgacaccatgcaaggggctgaggaggaggagcccattattgggtcctggttttggaccagagtagaagcttgtgtggagggtgatgtcaacagcaagtctagcctggaggacaaggaagaggccatgataccatgttttggagccaaagaagaggtcagtatgaagcatgggactggtgtcagatgcagatttatggcaggggctgaggagaccaataataagtcttgcttctgggcagaaaaagaaccctgtatgtatcctgccggtggaggaagttggaagtctaggccagaggaggaagaggacattgtcaattcgtggttctggtccagaaaatacacaaagccagaggccattatagggtcctggttatgggctacagaagagagtaatatagatgggactggagaaaaggccaagttactgactgaagaggagaccataatcaattcctggttctggaaagaagatgaagccatttcagaggctactgacagagaagagtccaggccagaagctgaggagggggacattattggttcttggttctgggctggagaagaggacagactagagccagctgctgagactagagaagaagacaggctagcagctgagaaagaaggtattgttgggtcctggtttggggccagagaagagaccattagaagagaggctgggtcttgcagcaaatccagtcctaaagctgaagaggaagaagtcattattgggtcctggttctgggaagaagaggccagtccggaggcagtggcaggagtcggctttgagtcaaagcctgggactgaggaggaagaaatcactgttgggtcctggttctggcctgaagaagaagccagtatacaggctggatctcaggcagtagaggaaatggagtcagagactgaagaggaaaccatttttgggtcctggttctgggatggaaaagaagtcagtgaagaagcaggaccatgctgtgtatccaagccagaggatgatgaagagatgattgttgagtcctggttctggtctagagacaaagccattaaggaaactggaactgtggccacctgtgagtccaagccagaaaatgaggaaggggccattgttgggtcttggtttgaggctgaagatgaggtagataacaggactgacaatggaagcaactgtgggtccaggacattagctgatgaagatgaggccatagtggggtcctggttctgggcaggagatgaggcccattttgaatcaaatcctagccccgtgttcagggccatttgcaggtccacgtgttcagttgaacaggagcctgatccttcacgcaggcctcagagttgggaggaggtcactgttcagttcaagcctggtccatggggtagggtcggcttcccatctataagcccctttagatttccgaaagaggcagcatctttattctgtgaaatgtttgggggcaaacccaggaacatggtacttagcccagaaggggaagatcaggaatctttgcttcagcctgatcagcctagtcctgagttcccatttcagtatgatccttcctacaggtcagtccaggaaattcgagagcatcttagggccaaggagagtacagagcctgagagttcatcctgtaactgcatacaatgtgagctgaaaattggttctgaagagtttgaagaactccttttattaatggaaaaaattcgggatccttttattcatgaaatatctaaaatcgcaatgggtatgagaagtgcttctcaatttacccgagatttcattcgagattcaggtgttgtctcacttattgaaaccttgcttaattatccgtcctcccgagttagaacaagttttttggaaaatatgattcgcatggccccaccttatccgaatctaaacataattcagacatacatatgtaaagtgtgtgaggaaacccttgcttatagcgtggattccccggaacagctgtctggaataaggatgattagacatctcactactactactgactatcacacactggttgccaattatatgtctgggtttctctccttattagctacaggcaatgccaaaacaaggtttcatgttttgaaaatgctactgaatttgtctgaaaatcttttcatgacaaaagaactactcagtgctgaagcagtgtcagaatttataggcctctttaacagggaagagacaaatgacaatattcaaattgttcttgcaatatttgagaatattggcaacaatatcaaaaaagaaacagtgttctctgatgatgatttcaatattgagccgcttatttctgcattccacaaagttgagaaatttgctaaggaactgcaaggcaaaacagacaatcaaaatgaccctgaaggggaccaagaaaattagtaatggttaattgctggcctcagattgtccttatgttcctgagttatgatccttgagtaatgctttgattttaatagttggttctgtgttgcaacatatatctttagtgctgacactaactttgtccaactctgtctgtaagctggagcatttttctgatgccagctgaatattagagctgaaaacacatttgttgatatttgtcttgtccacattgtgatgttcagtatttgagcttatagtgaactgagcaatcataaataagccacccttctgattgtcgttctactgtatatatatatatatttgagtgttgtttgtgtttcaataaagtcctatgttaaagttggcagaaatcacccttcttcttgaaattaaaatacagacccaatgataacacatgaacacacatagagataattaatatatgaataatatgttcctttcaaaagtttttttctcagctttaaacgcaaaaattaccaggggctgctatgtagggcatacttcagagaaaaagtagctacttcggttggactctgaagtttgggaaagatattggtggtgtaaaaaaaaaaaaaagcatggagttaggaaaaattttcctatgggagtgaggtatcctgtttgcctagagtgagtgagaggaatatattgagcaacatagaggatgacataagttttaaagagctgaggatttgcattttacagctcaaagtacaactgctgcttccatactacctaaagggcaaaagaataagacaggaaagcatagggatttgattgagtcaggaagacaatttaatcatgatggtaccatggtaagtgttaaggcaacatcatacagccattaaacatgatgatgtatagggttttaggaaaagccctgacatttttgatatttcatataatagagaacactggtgtcatacatgggaagtatgatcccatttgaaaaataaatgtgaataaattgacc

SEQ ID NO: 39708 - DNA, 5809 bp, Artificial Sequence
  derived and/or modified sequence
gcactttcgcgccgtatccctccgccccccttcccgacaccctcgcggagagcggttcttgccgcatcctgcgcagcccctgcccagtttggtgcagaggcgtggggggcgggactcgtctttgccattcggatcgctgggaaagcggtgggaatccaactgaagagcagccagaggagagctgaagagaggagggggaggccgatgacctgggctctgggcctctgaaggacccccttctgtcagctgtggggcttgacactacttgaacaagaaaaggagggggaaactgcaccacataagtgaagatccacctccagtggctgctctgctggtggtggggttgctgctgacaaccaccctcaacgggtctgcacccatccaggaaatctctgtcttcctcaagcttggttgtgcctgttctacactctatctgtattattgaattactgactgagactgtgtttgggaaggaggctgagtgactactggactggatattgactctaactcttgtttccaagcttatatcctcaatcacctaaagatcagagtgtgaagaaacaaacctgtgacagatctgtggttgaggtttagactgggggaggagtatagtactggactttctttgtaacttgtaccatgactggggcagagattgagtctggtgcccaggtcaagcctgaaaagaagcctggggaagaggttgtaggtggggctgagatagagaatgatgtccctctggtggtcagacccaaggttaggacccaggcccagataatgcctggggcaaggcccaagaataagtccaaggttatgcctggagcaagcaccaaagttgagacaagtgcagtgggtggggcacgccctaagagtaaggccaaggcaatacctgtttcacgatttaaggaagaagcccagatgtgggctcagcccaggtttggtgctgaaagattgtctaagacagagagaaactcccagaccaatatcatagcctctccacttgtcagtactgattctgtcttggttgctaaaacaaagtacctgtctgaggatagagaactggttaatacagacactgagagctttcctagaaggaaggcccattaccaagcaggattccagccttcttttaggtcaaaggaggagaccaatatggggtcctggtgctgtcctaggcctacatccaaacaagaagcctctcctaattctgatttcaaatgggtagacaaatctgtgagttccttgttctggagtggagatgaggtcactgcaaaatttcatcctgggaatagggtaaaagacagtaacagatccatgcacatggccaatcaagaggctaataccatgtctaggtcccaaactaaccaggagctctatattgcatctagttctggttctgaggatgagtctgttaagacaccctggttctgggccagagataaaaccaatacctggtctgggcccagggaagatcccaatagcaggtccaggtttaggtctaagaaagaagtctatgttgaatcaagttctggatctgagcatgaagaccatttggagtcctggtttggggctggaaaggaggccaaattcaggtccaaaatgagagctgggaaggaggccaataacagggccaggcacagggccaagcgagaagcttgcattgatttcatgcctgggtctatagatgtaattaaaaaagagtcctgtttctggcctgaagaaaatgctaataccttttcaaggcccatgatcaagaaagaggccagggccagagcaatgacaaaggaagaggccaaaaccaaggcccgagccagggccaagcaagaagccaggtcagaggaggaagccctcattgggacctggttctgggctacagacgagtccagcatggcagatgaagccagcatagagtccagtctacaagtggaggatgagtccataattgggagttggttctggactgaagaagaggccagtatggggactggggctagcagtaaatccagaccaaggactgatggggagcgtattggtgattccttatttggggctagggaaaagaccagtatgaaaactggggctgaggccacctctgaatctatactagcagctgatgatgaacaggtcattattggttcctggttctgggctggtgaagaggtcaaccaagaggctgaggaagagaccatttttgggtcgtggttctgggtcattgatgcggccagtgtggaatctggtgttggggtcagctgtgagtccaggacaaggtctgaggaagaagaggtcattggtccctggttttggtctggagaacaagttgatatagaggctggaatcggagaagaggccaggccaggagctgaagaagagacaatattcgggtcctggttttgggctgaaaaccagacctatatggattgtagggctgaaactagctgtgacaccatgcaaggggctgaggaggaggagcccattattgggtcctggttttggaccagagtagaagcttgtgtggagggtgatgtcaacagcaagtctagcctggaggacaaggaagaggccatgataccatgttttggagccaaagaagaggtcagtatgaagcatgggactggtgtcagatgcagatttatggcaggggctgaggagaccaataataagtcttgcttctgggcagaaaaagaaccctgtatgtatcctgccggtggaggaagttggaagtctaggccagaggaggaagaggacattgtcaattcgtggttctggtccagaaaatacacaaagccagaggccattatagggtcctggttatgggctacagaagagagtaatatagatgggactggagaaaaggccaagttactgactgaagaggagaccataatcaattcctggttctggaaagaagatgaagccatttcagaggctactgacagagaagagtccaggccagaagctgaggagggggacattattggttcttggttctgggctggagaagaggacagactagagccagctgctgagactagagaagaagacaggctagcagctgagaaagaaggtattgttgggtcctggtttggggccagagaagagaccattagaagagaggctgggtcttgcagcaaatccagtcctaaagctgaagaggaagaagtcattattgggtcctggttctgggaagaagaggccagtccggaggcagtggcaggagtcggctttgagtcaaagcctgggactgaggaggaagaaatcactgttgggtcctggttctggcctgaagaagaagccagtatacaggctggatctcaggcagtagaggaaatggagtcagagactgaagaggaaaccatttttgggtcctggttctgggatggaaaagaagtcagtgaagaagcaggaccatgctgtgtatccaagccagaggatgatgaagagatgattgttgagtcctggttctggtctagagacaaagccattaaggaaactggaactgtggccacctgtgagtccaagccagaaaatgaggaaggggccattgttgggtcttggtttgaggctgaagatgaggtagataacaggactgacaatggaagcaactgtgggtccaggacattagctgatgaagatgaggccatagtggggtcctggttctgggcaggagatgaggcccattttgaatcaaatcctagccccgtgttcagggccatttgcaggtccacgtgttcagttgaacaggagcctgatccttcacgcaggcctcagagttgggaggaggtcactgttcagttcaagcctggtccatggggtagggtcggcttcccatctataagcccctttagatttccgaaagaggcagcatctttattctgtgaaatgtttgggggcaaacccaggaacatggtacttagcccagaaggggaagatcaggaatctttgcttcagcctgatcagcctagtcctgagttcccatttcagtatgatccttcctacaggtcagtccaggaaattcgagagcatcttagggccaaggagagtacagagcctgagagttcatcctgtaactgcatacaatgtgagctgaaaattggttctgaagagtttgaagaactccttttattaatggaaaaaattcgggatccttttattcatgaaatatctaaaatcgcaatgggtatgagaagtgcttctcaatttacccgagatttcattcgagattcaggtgttgtctcacttattgaaaccttgcttaattatccgtcctcccgagttagaacaagttttttggaaaatatgattcgcatggccccaccttatccgaatctaaacataattcagacatacatatgtaaagtgtgtgaggaaacccttgcttatagcgtggattccccggaacagctgtctggaataaggatgattagacatctcactactactactgactatcacacactggttgccaattatatgtctgggtttctctccttattagctacaggcaatgccaaaacaaggtttcatgttttgaaaatgctactgaatttgtctgaaaatcttttcatgacaaaagaactactcagtgctgaagcagtgtcagaatttataggcctctttaacagggaagagacaaatgacaatattcaaattgttcttgcaatatttgagaatattggcaacaatatcaaaaaagaaacagtgttctctgatgatgatttcaatattgagccgcttatttctgcattccacaaagttgagaaatttgctaaggaactgcaaggcaaaacagacaatcaaaatgaccctgaaggggaccaagaaaattagtaatggttaattgctggcctcagattgtccttatgttcctgagttatgatccttgagtaatgctttgattttaatagttggttctgtgttgcaacatatatctttagtgctgacactaactttgtccaactctgtctgtaagctggagcatttttctgatgccagctgaatattagagctgaaaacacatttgttgatatttgtcttgtccacattgtgatgttcagtatttgagcttatagtgaactgagcaatcataaataagccacccttctgattgtcgttctactgtatatatatatatatttgagtgttgtttgtgtttcaataaagtcctatgttaaagttggcagaaatcacccttcttcttgaaattaaaatacagacccaatgataacacatgaacacacatagagataattaatatatgaataatatgttcctttcaaaagtttttttctcagctttaaacgcaaaaattaccaggggctgctatgtagggcatacttcagagaaaaagtagctacttcggttggactctgaagtttgggaaagatattggtggtgtaaaaaaaaaaaaaagcatggagttaggaaaaattttcctatgggagtgaggtatcctgtttgcctagagtgagtgagaggaatatattgagcaacatagaggatgacataagttttaaagagctgaggatttgcattttacagctcaaagtacaactgctgcttccatactacctaaagggcaaaagaataagacaggaaagcatagggatttgattgagtcaggaagacaatttaatcatgatggtaccatggtaagtgttaaggcaacatcatacagccattaaacatgatgatgtatagggttttaggaaaagccctgacatttttgatatttcatataatagagaacactggtgtcatacatgggaagtatgatcccatttgaaaaataaatgtgaataaattgacc

SEQ ID NO: 39709 - DNA, 5980 bp, Artificial Sequence
  derived and/or modified sequence
gacaccctcgcggagagcggttcttgccgcatcctgcgcagcccctgcccagtttggtgcagaggcgtggggggcgggactcgtctttgccattcggatcgctgggaaagcggtgggaatccaactgaagagcagccagaggagagctgaagagaggagggggaggccgatgacctgggctctgggcctctgaagcctggcaacgaggagacgatccgttcggagccgggcgctagagagaggtctggcgtattctgacaggacacagtgagcatctgtagaggagaggcttgaaataaaggaggagcacgaatattccctggatttctggaggcctgctttaaggctggccagttctgcaagaaaggcaaggaggaggagactggctcacacctctggaggacccccttctgtcagctgtggggcttgacactacttgaacaagaaaaggagggggaaactgcaccacataagtgaagatccacctccagtggctgctctgctggtggtggggttgctgctgacaaccaccctcaacgggtctgcacccatccaggaaatctctgtcttcctcaagcttggttgtgcctgttctacactctatctgtattattgaattactgactgagactgtgtttgggaaggaggctgagtgactactggactggatattgactctaactcttgtttccaagcttatatcctcaatcacctaaagatcagagtgtgaagaaacaaacctgtgacagatctgtggttgaggtttagactgggggaggagtatagtactggactttctttgtaacttgtaccatgactggggcagagattgagtctggtgcccaggtcaagcctgaaaagaagcctggggaagaggttgtaggtggggctgagatagagaatgatgtccctctggtggtcagacccaaggttaggacccaggcccagataatgcctggggcaaggcccaagaataagtccaaggttatgcctggagcaagcaccaaagttgagacaagtgcagtgggtggggcacgccctaagagtaaggccaaggcaatacctgtttcacgatttaaggaagaagcccagatgtgggctcagcccaggtttggtgctgaaagattgtctaagacagagagaaactcccagaccaatatcatagcctctccacttgtcagtactgattctgtcttggttgctaaaacaaagtacctgtctgaggatagagaactggttaatacagacactgagagctttcctagaaggaaggcccattaccaagcaggattccagccttcttttaggtcaaaggaggagaccaatatggggtcctggtgctgtcctaggcctacatccaaacaagaagcctctcctaattctgatttcaaatgggtagacaaatctgtgagttccttgttctggagtggagatgaggtcactgcaaaatttcatcctgggaatagggtaaaagacagtaacagatccatgcacatggccaatcaagaggctaataccatgtctaggtcccaaactaaccaggagctctatattgcatctagttctggttctgaggatgagtctgttaagacaccctggttctgggccagagataaaaccaatacctggtctgggcccagggaagatcccaatagcaggtccaggtttaggtctaagaaagaagtctatgttgaatcaagttctggatctgagcatgaagaccatttggagtcctggtttggggctggaaaggaggccaaattcaggtccaaaatgagagctgggaaggaggccaataacagggccaggcacagggccaagcgagaagcttgcattgatttcatgcctgggtctatagatgtaattaaaaaagagtcctgtttctggcctgaagaaaatgctaataccttttcaaggcccatgatcaagaaagaggccagggccagagcaatgacaaaggaagaggccaaaaccaaggcccgagccagggccaagcaagaagccaggtcagaggaggaagccctcattgggacctggttctgggctacagacgagtccagcatggcagatgaagccagcatagagtccagtctacaagtggaggatgagtccataattgggagttggttctggactgaagaagaggccagtatggggactggggctagcagtaaatccagaccaaggactgatggggagcgtattggtgattccttatttggggctagggaaaagaccagtatgaaaactggggctgaggccacctctgaatctatactagcagctgatgatgaacaggtcattattggttcctggttctgggctggtgaagaggtcaaccaagaggctgaggaagagaccatttttgggtcgtggttctgggtcattgatgcggccagtgtggaatctggtgttggggtcagctgtgagtccaggacaaggtctgaggaagaagaggtcattggtccctggttttggtctggagaacaagttgatatagaggctggaatcggagaagaggccaggccaggagctgaagaagagacaatattcgggtcctggttttgggctgaaaaccagacctatatggattgtagggctgaaactagctgtgacaccatgcaaggggctgaggaggaggagcccattattgggtcctggttttggaccagagtagaagcttgtgtggagggtgatgtcaacagcaagtctagcctggaggacaaggaagaggccatgataccatgttttggagccaaagaagaggtcagtatgaagcatgggactggtgtcagatgcagatttatggcaggggctgaggagaccaataataagtcttgcttctgggcagaaaaagaaccctgtatgtatcctgccggtggaggaagttggaagtctaggccagaggaggaagaggacattgtcaattcgtggttctggtccagaaaatacacaaagccagaggccattatagggtcctggttatgggctacagaagagagtaatatagatgggactggagaaaaggccaagttactgactgaagaggagaccataatcaattcctggttctggaaagaagatgaagccatttcagaggctactgacagagaagagtccaggccagaagctgaggagggggacattattggttcttggttctgggctggagaagaggacagactagagccagctgctgagactagagaagaagacaggctagcagctgagaaagaaggtattgttgggtcctggtttggggccagagaagagaccattagaagagaggctgggtcttgcagcaaatccagtcctaaagctgaagaggaagaagtcattattgggtcctggttctgggaagaagaggccagtccggaggcagtggcaggagtcggctttgagtcaaagcctgggactgaggaggaagaaatcactgttgggtcctggttctggcctgaagaagaagccagtatacaggctggatctcaggcagtagaggaaatggagtcagagactgaagaggaaaccatttttgggtcctggttctgggatggaaaagaagtcagtgaagaagcaggaccatgctgtgtatccaagccagaggatgatgaagagatgattgttgagtcctggttctggtctagagacaaagccattaaggaaactggaactgtggccacctgtgagtccaagccagaaaatgaggaaggggccattgttgggtcttggtttgaggctgaagatgaggtagataacaggactgacaatggaagcaactgtgggtccaggacattagctgatgaagatgaggccatagtggggtcctggttctgggcaggagatgaggcccattttgaatcaaatcctagccccgtgttcagggccatttgcaggtccacgtgttcagttgaacaggagcctgatccttcacgcaggcctcagagttgggaggaggtcactgttcagttcaagcctggtccatggggtagggtcggcttcccatctataagcccctttagatttccgaaagaggcagcatctttattctgtgaaatgtttgggggcaaacccaggaacatggtacttagcccagaaggggaagatcaggaatctttgcttcagcctgatcagcctagtcctgagttcccatttcagtatgatccttcctacaggtcagtccaggaaattcgagagcatcttagggccaaggagagtacagagcctgagagttcatcctgtaactgcatacaatgtgagctgaaaattggttctgaagagtttgaagaactccttttattaatggaaaaaattcgggatccttttattcatgaaatatctaaaatcgcaatgggtatgagaagtgcttctcaatttacccgagatttcattcgagattcaggtgttgtctcacttattgaaaccttgcttaattatccgtcctcccgagttagaacaagttttttggaaaatatgattcgcatggccccaccttatccgaatctaaacataattcagacatacatatgtaaagtgtgtgaggaaacccttgcttatagcgtggattccccggaacagctgtctggaataaggatgattagacatctcactactactactgactatcacacactggttgccaattatatgtctgggtttctctccttattagctacaggcaatgccaaaacaaggtttcatgttttgaaaatgctactgaatttgtctgaaaatcttttcatgacaaaagaactactcagtgctgaagcagtgtcagaatttataggcctctttaacagggaagagacaaatgacaatattcaaattgttcttgcaatatttgagaatattggcaacaatatcaaaaaagaaacagtgttctctgatgatgatttcaatattgagccgcttatttctgcattccacaaagttgagaaatttgctaaggaactgcaaggcaaaacagacaatcaaaatgaccctgaaggggaccaagaaaattagtaatggttaattgctggcctcagattgtccttatgttcctgagttatgatccttgagtaatgctttgattttaatagttggttctgtgttgcaacatatatctttagtgctgacactaactttgtccaactctgtctgtaagctggagcatttttctgatgccagctgaatattagagctgaaaacacatttgttgatatttgtcttgtccacattgtgatgttcagtatttgagcttatagtgaactgagcaatcataaataagccacccttctgattgtcgttctactgtatatatatatatatttgagtgttgtttgtgtttcaataaagtcctatgttaaagttggcagaaatcacccttcttcttgaaattaaaatacagacccaatgataacacatgaacacacatagagataattaatatatgaataatatgttcctttcaaaagtttttttctcagctttaaacgcaaaaattaccaggggctgctatgtagggcatacttcagagaaaaagtagctacttcggttggactctgaagtttgggaaagatattggtggtgtaaaaaaaaaaaaaagcatggagttaggaaaaattttcctatgggagtgaggtatcctgtttgcctagagtgagtgagaggaatatattgagcaacatagaggatgacataagttttaaagagctgaggatttgcattttacagctcaaagtacaactgctgcttccatactacctaaagggcaaaagaataagacaggaaagcatagggatttgattgagtcaggaagacaatttaatcatgatggtaccatggtaagtgttaaggcaacatcatacagccattaaacatgatgatgtatagggttttaggaaaagccctgacatttttgatatttcatataatagagaacactggtgtcatacatgggaagtatgatcccatttgaaaaataaatgtgaataaattgacc

SEQ ID NO: 39710 - DNA, 4188 bp, Artificial Sequence
  derived and/or modified sequence
atgactggcgcggagatagagagtggagctcaggtgaaacccgaaaaaaaaccaggagaagaggttgtcgggggagccgagattgaaaacgacgtgccactggttgtcaggcccaaggtgcgcacacaagcccagattatgccaggtgccaggcccaagaacaaaagtaaggtaatgcccggcgcctcaacaaaagtggagactagcgcagtcggaggcgctagacctaagtccaaggccaaggctatccccgtgtcccgatttaaagaggaggcccagatgtgggctcagcccagattcggggctgaacggcttagcaagacagagaggaattcccagaccaacattatcgccagtcctctggtctcaacagactccgtgctcgtggcaaaaactaagtatttgagcgaagacagggaactcgtgaacaccgatacggagtctttcccgaggcgcaaggcacactatcaagctgggtttcagccatcatttagaagcaaggaggagactaacatgggttcctggtgttgtccccgtcccacctccaagcaagaagcctctccaaactcagactttaagtgggtcgacaagtctgtgagctccttattttggtcaggcgacgaggtcacagctaaattccaccccggcaatagggtgaaggattcgaaccgatcaatgcacatggccaaccaggaggctaatacgatgagcaggtcccaaacaaaccaagagctatatattgccagtagttccgggagtgaagacgagtccgtcaagacgccatggttttgggcccgcgacaagaccaacacatggagcggtcctagagaggaccctaattcacgctccagatttcgcagcaagaaggaggtgtatgttgaatcaagttcagggtctgaacacgaggaccatctggaatcctggttcggcgcaggaaaggaagcgaagttccgcagcaaaatgagagctgggaaggaggctaacaatagggcccggcatcgggcaaaacgcgaggcttgtatcgatttcatgccggggtccattgatgtgatcaagaaggagtcctgtttctggcccgaagaaaacgccaacacgttctcccggcctatgattaaaaaagaggcccgagcgcgagcaatgacaaaggaggaggccaaaacaaaggcacgtgcccgagctaagcaagaggcccgaagcgaggaggaagccttgattggaacctggttctgggctaccgacgagtcaagtatggcagatgaagctagcatagaatcctctctgcaagtggaggatgaaagtataatcggctcatggttctggaccgaggaagaggcttcaatgggtaccggagcctcctcgaagagccggccccgcacggatggggaacgcatcggagactctctcttcggggcccgcgagaagacatctatgaaaacaggggcggaagcaactagcgaatcaattttggccgcagatgacgaacaagtgattattgggtcatggttttgggccggggaggaggttaatcaagaagctgaggaagagaccattttcgggtcatggttctgggtgatcgatgccgcctcagtggagagcggcgtgggcgtaagctgcgagtctcgcactaggtctgaggaggaagaagttattggaccctggttctggagcggggagcaggttgatattgaggcaggcataggggaggaagcgcgccctggagcagaagaagagacgattttcggatcttggttctgggccgagaatcagacgtatatggattgccgggccgagacaagctgtgatacaatgcagggagcagaggaagaggaaccgattatcggatcctggttctggacgagagtggaagcatgtgttgaaggagatgtcaattctaaatcttcgttggaagacaaagaggaagccatgattccctgtttcggcgccaaagaagaagtaagtatgaaacacggaaccggggtccgttgtagatttatggctggcgccgaggagacaaataacaaatcctgtttttgggccgagaaggagccatgcatgtacccagcggggggcgggagttggaagagccggccggaggaagaagaggatatcgtgaactcttggttttggtccaggaaatataccaagcccgaagccataatcggatcctggttatgggccacggaagaatctaacatcgacgggactggggagaaggccaagctgctgacagaggaggaaaccattattaacagctggttttggaaagaagatgaggccataagcgaggcaacagaccgggaagagtctagaccagaggccgaggaaggcgacattattgggagctggttttgggctggagaagaagaccggctggagcccgctgcagaaacacgcgaggaggaccgtctcgccgcagaaaaggaggggattgttgggtcttggtttggcgcccgagaagaaaccatccgtagagaagcaggttcatgttccaaatcttcccccaaggccgaggaagaggaggttataatcgggtcatggttttgggaggaagaggctagccctgaggccgtggccggggtggggtttgagagcaaacccgggacagaggaggaggaaattacagtcggatcttggttctggcctgaggaggaagcatctatccaggctggttcccaggcagtcgaggaaatggagtccgaaacagaagaggagactattttcggaagctggttctgggatggaaaagaagtgtccgaggaagcaggcccatgctgtgtgtctaaacccgaagacgatgaggagatgatcgtcgagtcatggttttggtcccgagataaagctataaaggaaaccggcaccgtagcaacatgtgagtccaaaccggaaaacgaagagggggccatcgtgggcagttggttcgaagcagaagatgaagttgacaaccggaccgataatggaagcaactgcgggtcccggacacttgctgacgaagatgaagcaatcgtggggtcttggttctgggccggtgacgaagcccacttcgagagcaacccgtcacctgtctttagggccatttgccggagcacctgcagcgtcgagcaggagcccgatcccagccgacggccacagagctgggaggaggtgacagttcagttcaaaccaggtccttggggaagggtggggttcccttctatatcccccttcagatttcctaaagaagctgcgtccctcttttgtgaaatgtttggcggcaagccaaggaatatggtgcttagcccagagggcgaggatcaggagagcttgttacagccagatcagccaagccccgaattcccgttccagtacgacccttcttatagatctgtccaagagatcagggagcacctgcgagccaaagagagtaccgaaccagagagttccagctgcaactgcattcagtgtgaactcaagataggctctgaggaattcgaggagctgttgcttctgatggagaagatcagggacccatttattcatgaaatatccaagatagccatgggcatgcgcagtgcctctcaatttacgcgcgacttcattagggattcgggggtcgtctccttgatcgagaccctcctgaattatccaagtagtagagttcgaacgtccttcttggaaaacatgattaggatggcaccgccctaccctaatctgaacatcatccaaacatacatctgcaaggtgtgtgaagagacgttggcatattcagtcgatagtcccgagcagctgtcgggcattagaatgatccgccatctgacaactaccactgactatcatactttagttgctaactatatgtcaggctttttgtcactcttggcaacaggcaacgccaagacacggtttcatgtcctgaagatgctgctgaacttatcagagaatctcttcatgaccaaggaactgttgtccgctgaggctgtgtccgaatttatcgggctcttcaacagagaggagactaatgataatatacagatagtcctagcgatctttgagaacattggcaacaacataaagaaagagacagttttttcagacgatgactttaatatagaaccactgatttctgcgtttcataaagtggaaaaattcgccaaggagctacaaggtaagacagacaatcagaatgaccctgagggcgaccaggaaaactag

SEQ ID NO: 39711 - DNA, 4188 bp, Artificial Sequence
  derived and/or modified sequence
atgactggtgccgaaatcgaatcaggagcccaggtcaaaccagagaagaagcccggagaagaagttgtggggggggcggagattgaaaacgacgttccgctagtggtgaggccaaaagttcggacgcaggcccagatcatgccaggggctcgccccaagaataagagtaaagttatgccaggcgcgtccaccaaggtcgagaccagtgctgtggggggagcacgcccaaaatctaaggcaaaagccatccctgtgtcaaggtttaaggaagaggcgcagatgtgggcccagccccggttcggcgccgaacgcttgagcaagacggaaagaaattctcagacaaatataatcgcatcacccctggtctccactgattccgtcctggtcgccaaaaccaaatacctgtctgaggacagagaactcgtgaacaccgacactgagtcattcccacggagaaaagcgcactatcaggccggatttcagccaagcttccgcagcaaggaggaaaccaacatggggagttggtgctgtcctcggcccacatcaaagcaggaggcctccccaaattccgacttcaaatgggtggataagtccgtcagcagcctcttctggtctggagatgaggtgactgccaagttccaccctggtaatagagtgaaggatagtaataggagtatgcacatggcaaatcaagaggcgaatactatgtcgcgatcccagactaaccaggagctgtacatcgcatcgagcagtgggtccgaagatgagagcgttaagaccccatggttttgggcccgagataagaccaatacctggtctgggcccagagaagaccccaattcgagatcccgcttcaggtctaaaaaagaggtgtacgtcgagtcttcttctgggtcagaacatgaggaccacctggaatcatggttcggagctgggaaggaagctaagtttcgaagtaaaatgagggcagggaaagaagcaaataaccgcgcaagacaccgcgcaaaacgtgaggcttgtatcgactttatgccaggatcgatcgatgtgatcaaaaaagaaagctgcttctggcccgaggagaatgctaacactttctcgcggccaatgatcaagaaagaagcccgcgcaagagccatgactaaggaggaagccaagaccaaggcaagagcgagagcgaaacaggaggcacgttctgaggaggaggccctgatcgggacctggttttgggcaaccgacgaatcttcgatggcagacgaggccagcatcgaatctagtctgcaggtggaagatgagagtatcatcggatcgtggttttggactgaggaagaggctagcatgggaacgggggccagctccaagagtcgtccacggactgacggggaaaggataggcgactcacttttcggggcgagagagaaaacgtccatgaagacgggcgctgaagcgacatctgagtcaattctggctgcggatgacgagcaagtcatcatcgggtcctggttctgggctggggaggaggttaatcaagaagctgaagaggagactatcttcgggtcatggttctgggtgatcgatgctgcatccgtcgagagtggtgtaggggtgtcgtgtgaatcccgcaccagatccgaggaggaggaagtaatcgggccctggttctggagtggggagcaagtggatatcgaggcaggcatcggggaagaggccagacctggtgcagaggaagagaccatcttcggatcctggttttgggccgagaatcagacatacatggattgccgtgcagagaccagttgcgacaccatgcagggtgcggaggaagaggaaccaatcatagggtcctggttttggaccagagtagaggcttgcgtggagggagacgtgaattctaaatcctcactggaagacaaggaggaggcgatgattccttgctttggggcaaaggaagaagtcagcatgaaacacggaacaggtgtacgctgtagatttatggctggagccgaagagaccaacaataagtcatgtttctgggctgaaaaagaaccttgcatgtatccggctgggggagggagttggaagagcaggccagaggaagaagaggatatcgtgaacagttggttttggtcccgcaagtacacgaagcccgaagctatcatcggctcgtggctctgggcgaccgaagagtctaacatcgacggcactggcgagaaggccaaattacttacagaagaagaaacgatcatcaattcatggttctggaaagaggacgaggccatttccgaagccactgatagagaggagtcgagaccagaagcagaagaaggtgacatcattgggagctggttttgggcaggggaagaggatcggttagagcctgctgcggagactcgcgaggaggataggctcgctgccgaaaaagagggcatcgtcggatcctggttcggggccagggaggaaaccattcgtcgggaagccggtagttgttccaaaagtagtcccaaagccgaggaggaggaggtgattattgggtcctggttctgggaagaggaagccagccccgaggcagtggccggtgttgggttcgaatccaaacccggcactgaagaagaggaaatcaccgtgggttcctggttctggcccgaagaggaagcctcaatacaggctggcagccaggctgtggaagaaatggagagtgagacagaagaagagaccatcttcggttcatggttctgggacggaaaagaagtttctgaagaggccggtccttgctgcgtgtcaaaacccgaagacgatgaggaaatgattgttgagtcctggttctggtctcgggacaaggctatcaaagaaaccggcacagtcgccacctgcgagtcaaagccggaaaacgaggaaggggccatagtcgggtcttggttcgaggcggaggacgaggtcgacaaccggacggataacgggtccaattgtggttctcggacacttgccgacgaggacgaggctatagtggggtcttggttctgggccggtgacgaggcccatttcgagtcaaatccttcgcctgttttccgggccatctgcagatcaacttgtagtgttgaacaggagcccgacccgtcgagaagacctcagagttgggaggaggtcaccgtgcagttcaaacccggcccctggggcagggtcgggtttccctccattagtccctttaggttccccaaggaggccgcgagtctgttctgtgagatgttcggcggcaagcccagaaacatggtgttgagtccggaaggcgaagatcaggagagtctcttgcagcccgaccagccttcgcccgagtttccgttccagtatgacccttcgtatcggtcagtacaggaaatcagagagcacctgcgggcaaaagagagcacagaacccgaatcgagcagttgtaactgtattcagtgtgagctaaagataggctccgaggaattcgaggagctccttctgttgatggagaagatacgagatccctttatccacgaaatatccaaaatagcaatgggaatgcggtccgcctctcaattcacccgggattttattagggactctggcgtagtgtccctgattgaaacactgctcaactatccgtctagcagagtcaggacatccttcttggaaaatatgatcaggatggcacccccttaccctaacctgaatatcatccagacctacatttgcaaggtgtgtgaggaaacgctcgcctacagtgttgactcgccagagcaactgtctggcatcaggatgatcagacatctaacaactaccacagattaccatacattagtggccaattatatgtcaggctttctatctttgttggctacaggcaacgcgaagacaagatttcacgtcctgaagatgcttttgaatctgtctgagaacctctttatgactaaggaactattgtccgccgaagccgttagtgaatttataggcctttttaatagagaggaaaccaacgacaacatccagattgtcctggctatcttcgagaacataggaaacaacatcaaaaaggaaacagtgttcagcgacgatgactttaacatagagccactgatctctgcatttcataaagtggagaaatttgctaaggagttgcaaggaaagactgataatcagaatgaccccgaaggggatcaggagaactag

SEQ ID NO: 39712 - DNA, 4188 bp, Artificial Sequence
  derived and/or modified sequence
atgactggcgctgagatcgagtcaggcgcacaggtgaagccagagaagaagccaggggaggaggtcgttgggggtgccgagatagagaatgatgttcccctggtggtccgtcccaaagtcagaacgcaagcgcagatcatgccaggtgccaggccgaagaataagtccaaagtgatgccgggggccagtactaaagtggagacatctgccgttggtggggcccggcccaagtcaaaggctaaggctatccccgtttcaagatttaaggaggaggcacagatgtgggctcagccccgctttggcgctgaaagactctctaagacggagagaaactcccaaactaatatcatagcctcccctctcgttagtactgattccgttctcgtcgccaaaacgaaatatctgtctgaagacagggagctggtgaatactgacacggaatcatttcccagaaggaaggcccactatcaggccggtttccaaccatctttccgcagcaaggaagagaccaacatgggctcgtggtgctgtccaagacccacatctaagcaagaagccagccccaactccgactttaagtgggtcgacaaatccgtgtcgagcctcttctggtccggagacgaagtgacggccaagtttcacccagggaatcgggtaaaggacagcaatagatcaatgcatatggcaaaccaggaagcaaacacgatgagccggtcccaaactaatcaggaactctacatcgcctcctcatcgggctccgaagacgaatccgttaaaactccttggttctgggcgcgagataaaacaaacacctggagcggacccagggaagaccccaattcgagaagtcgctttcgatcaaagaaggaagtctatgtcgaaagctcttccgggagcgagcatgaggatcatctcgagtcatggttcggggctgggaaagaggctaagttccgttccaagatgcgagcgggtaaagaggccaataatcgtgccaggcatcgcgccaaaagggaggcctgtatcgactttatgcccggctctatagacgtaattaaaaaagaaagttgtttttggcccgaggagaacgccaacactttttctcggccaatgattaagaaagaggccagagctagagcaatgactaaggaggaagccaagacaaaagctagagctcgtgctaagcaggaagctaggtccgaggaagaggcgctgattggcacatggttttgggcaaccgacgaatcctccatggctgacgaggcgtccattgaatcttccctccaggtcgaggacgagtccattattggttcttggttttggacggaggaagaggcctcaatgggaaccggcgcatctagcaaaagcagacctcgcactgacggcgagcggatcggtgactctctgtttggggctagagagaagacatcaatgaagaccggcgctgaagctacatccgaaagtattctggcagccgacgatgaacaggtgattatcggatcctggttttgggccggggaagaggttaatcaggaggctgaagaggagaccatttttggtagttggttttgggttattgatgccgcctcggtggagtctggtgtgggggtctcatgcgaatctaggaccaggtctgaggaggaggaggtaatcggtccttggttctggtcaggcgaacaggttgatattgaagcggggatcggcgaggaagcaagacccggcgctgaggaagagactatctttgggtcttggttctgggcagaaaaccagacttatatggattgccgcgccgagacctcctgtgacactatgcagggagccgaggaggaagagccaatcatcggtagctggttttggacccgggtcgaagcatgcgtagagggagatgtgaatagtaaatctagcctggaagacaaagaagaggccatgattccatgcttcggcgcaaaagaagaagtgtcaatgaaacacggaacgggagtgcgttgtagatttatggctggcgcagaggaaacaaataataagtcttgcttctgggctgaaaaagaaccctgcatgtaccctgctgggggaggcagctggaagtcacggcccgaagaggaggaggatatcgtcaattcttggttttggagccgtaaatacacaaagcccgaggctatcattggcagctggctgtgggccactgaagagtccaatattgatggcaccggggaaaaggccaagctattgaccgaggaagagacaatcatcaactcctggttctggaaagaggatgaggccatttctgaggccaccgatagagaagagagccgcccggaagctgaagagggtgatataataggctcctggttttgggcgggggaggaggaccgcttggagcctgccgcggaaacaagagaggaagaccggctcgccgccgaaaaggaaggaatcgtgggaagctggtttggcgccagagaagagaccatccggcgcgaagctggctcgtgcagcaaatcttcacctaaagccgaggaagaggaagttataattggctcttggttctgggaagaagaggcatcgccagaggcagttgcgggggtgggctttgaaagtaagcccgggacagaggaggaggagattacagtcggcagctggttctggccggaggaggaagcgtccatacaggcgggtagccaggctgtggaggaaatggagagcgaaactgaggaggagaccatcttcggttcatggttttgggacggtaaagaggtgagtgaagaagctggaccgtgctgcgtctcaaagcccgaggacgatgaagagatgatcgtcgagtcatggttctggagcagagataaggccattaaagagactggaactgtggccacttgcgagtccaagccagaaaatgaagaaggcgctattgtgggatcttggtttgaagccgaggatgaggtcgataatcgcaccgacaatggatcaaactgtgggtcacgtacgcttgcagatgaagatgaggccatcgtgggtagttggttctgggctggcgacgaggctcactttgaatcaaacccttcacccgttttccgtgccatttgccgcagcacctgcagtgtggagcaagagcctgatcccagccgcagacctcagtcatgggaagaggtgaccgtccaatttaagcctgggccgtggggacgcgttggattcccctccatcagtcccttcagattccccaaggaagctgcatcattgttttgtgagatgttcggcggtaaaccgcggaacatggtgctttctcctgagggcgaagaccaggaaagtcttctgcagccagaccaaccgtcacccgagttcccattccaatatgatccgtcgtaccggtctgtacaggaaattagggaacacctccgggcaaaggagtcaaccgagccagagtcttctagctgcaattgcatccaatgcgagctgaagataggtagcgaggagttcgaggagttactgttacttatggagaagattagggatcctttcatacatgagatctcaaaaattgctatgggaatgcgctctgcttcgcagttcacccgggactttatccgggacagtggggttgtgagcctcattgaaaccttgttgaattatccctcaagtagggtcagaacgagcttccttgaaaacatgattagaatggccccgccttatcccaacctgaacatcatccaaacttacatctgtaaggtgtgtgaggagaccctggcatattccgtggacagccccgagcaactctcaggcattaggatgattcgtcacttgaccacaactaccgactatcatacgctggtagccaactatatgtcgggattcttgtccctgttggccacagggaatgccaagacgaggttccacgttctcaagatgctgctcaatctgtctgaaaacttattcatgactaaagaacttctttccgctgaggctgtctcagagtttataggactgttcaatcgcgaggagacaaacgacaacatccagatcgttctggccatattcgaaaacatagggaacaacataaaaaaagaaactgttttctccgatgacgactttaacattgaacctcttatcagcgcatttcataaggttgagaagttcgccaaggagcttcaaggcaagacggataatcagaacgacccagaaggtgaccaggagaattag

SEQ ID NO: 39713 - DNA, 4188 bp, Artificial Sequence
  derived and/or modified sequence
atgacgggggctgagatagagtccggtgcgcaggttaagccagagaagaagccaggcgaagaggtagtggggggcgctgagatcgagaacgacgtcccgcttgtggtcaggcctaaggtacggacccaggctcagataatgccaggggcacgacccaaaaataaaagtaaggttatgccgggtgccagtaccaaggtggagacatctgctgtcggaggggcacggcctaagtccaaggccaaagccattccagtgagccgcttcaaggaagaagcgcagatgtgggcccagccacggtttggtgcagaaaggctgtctaaaactgagcgtaactcacaaacgaatattatcgcttctccccttgtgagcacagactccgtcctggtcgccaaaaccaaatacctgtcagaagatagagagctggttaatacggacacagaatctttccctcgtagaaaagcccattaccaggccggattccagcccagcttcaggtccaaagaagaaacaaacatgggctcgtggtgttgccctcgaccgacaagcaagcaggaggctagcccgaattccgactttaagtgggttgacaagtctgttagttcactcttctggagtggcgacgaagtgactgcaaagttccaccccggcaaccgcgtcaaggactcaaatcgcagtatgcacatggccaaccaggaggcaaatacaatgtcaagatctcaaacaaatcaagaactttatatcgctagctcttcaggctctgaagacgaaagcgtcaaaaccccctggttctgggccagggataaaaccaacacatggagcggcccacgtgaagatccaaacagtaggtcacggttccgcagcaaaaaagaagtctacgtcgagtcctccagcggcagcgaacacgaagaccatctggagtcttggtttggcgcaggcaaagaggctaaatttagaagcaagatgcgggctggaaaggaagctaacaaccgggctcgtcatcgtgccaagcgggaagcatgtatagattttatgcccgggtccatagacgttattaaaaaagaaagttgcttttggcccgaggaaaacgccaacacattttcccgcccaatgatcaagaaagaggctcgggcgagagcgatgaccaaagaagaagcaaagacaaaggccagggcacgggccaagcaggaagcacgaagcgaagaggaggcactcattggtacatggttctgggcaaccgatgaaagtagcatggcagatgaagcgtccattgagagttccctacaggtggaggatgagtcgattatcggatcgtggttttggactgaagaggaagccagtatgggaaccggcgcctccagtaagtctagaccaagaacagacggagaaagaattggggattctctattcggcgcccgtgagaagacatctatgaagacaggtgctgaagccacgtcagagagtatcttggccgctgacgacgagcaggtgattattggaagctggttctgggccggcgaagaggttaatcaggaagcagaagaggaaactatttttggctcatggttttgggtcattgacgcagcttcggttgaatccggtgttggcgtaagctgtgaaagtaggacccgatccgaggaagaagaggtaattggaccctggttttggtccggagaacaagtggacatcgaagctgggatcggtgaggaggccagaccgggagcggaagaggagaccatctttggatcatggttctgggcagaaaatcagacatacatggactgccgggctgagacgagctgtgacacgatgcagggtgccgaagaggaggagccgattatcggttcgtggttttggacccgggttgaagcctgtgtagagggcgatgtgaattcaaagagcagtctggaggacaaggaggaagccatgatcccatgtttcggggccaaagaggaggtaagcatgaagcatggcacaggcgtccggtgtcgattcatggcaggagccgaggagaccaataataagtcttgtttttgggcggagaaagaaccctgcatgtaccccgccgggggggggtcttggaaaagtagaccagaagaagaggaggatatagttaactcttggttctggtcacgcaagtataccaagccggaggcaattattggtagctggctctgggctacagaagaatccaacatcgatggcaccggtgagaaggccaaactgctgacggaggaggagacaatcattaatagttggttttggaaggaggatgaagctatttccgaagcaactgaccgcgaggagtcacggcctgaggcggaggagggtgatataattgggagttggttctgggccggggaagaagacaggctcgagccagctgcggagaccagagaggaggaccggttagctgctgaaaaagagggcattgtaggatcctggtttggtgcaagagaagaaacgataagacgtgaagcaggttcttgtagcaagagttcacccaaggccgaggaagaggaagtaattattggctcgtggttctgggaggaagaagcaagcccagaagctgtcgcgggagtaggtttcgagtctaagcccggaacagaggaggaagagattaccgtgggtagctggttttggcccgaagaggaagctagcatacaggctggctcacaagccgttgaggaaatggagtccgagactgaagaagagactatattcggtagttggttttgggacggcaaggaggtgagcgaagaagcagggccttgttgcgtttccaaacctgaagacgacgaggaaatgatcgttgaatcctggttttggagccgtgataaggcaatcaaggaaacaggcaccgtagccacctgcgagtctaaaccggaaaacgaagagggggcaattgtcggcagctggtttgaagcagaggacgaggtggataatcggaccgacaatggcagcaattgcgggtctaggactctggccgatgaagatgaggctattgttggatcatggttttgggccggagacgaggcgcatttcgaatccaatccctcacccgttttcagggccatttgcagatcaacctgctccgtcgaacaggaaccagatccatctagaagaccacagagttgggaggaggtgacagtgcagtttaaaccaggaccatggggacgagtcggttttcctagtatttccccctttagatttccaaaggaggccgcctctctgttctgtgagatgttcggaggcaaaccaagaaatatggttctgagcccagaaggagaggatcaagagtcactgctgcaaccagaccaaccttcaccagagtttcccttccagtatgacccaagttacagatcagtgcaggagattcgggaacatctgagggcaaaggagtcaactgagccggaaagctctagttgcaattgcatccagtgtgaattgaaaatcggatccgaagaatttgaagaattgttgctccttatggagaagatccgtgacccattcattcacgagatcagtaaaattgccatggggatgcgaagcgcctctcagttcacacgggacttcataagggattccggtgtggtgagtctgattgagaccctgcttaactacccttcctcacgagtccggacttcgtttcttgagaatatgattagaatggcacctccctacccaaacctgaacataattcagacgtacatctgcaaggtttgtgaggagacactggcctacagcgtagacagccctgaacagctgtctggtattaggatgattagacacttaaccacaactaccgactaccatacacttgtcgcaaattacatgagcggctttctctcgctcctggccacaggaaatgccaagactcggtttcacgttttaaaaatgttgctaaatctgagtgaaaatttgtttatgactaaagagctgctgagtgcagaagctgtttcagagtttatcggcctctttaatcgcgaagaaacaaacgataatatccagatcgtgttggccattttcgagaatattgggaacaatattaaaaaagagactgttttttcggatgacgacttcaacattgaacctctgatctccgcttttcacaaggtggaaaagtttgcaaaggaactccagggtaagaccgacaaccagaatgacccggaaggagatcaggagaactag

SEQ ID NO: 39714 - DNA, 4188 bp, Artificial Sequence
  derived and/or modified sequence
atgaccggggctgagattgagagcggggcccaggtgaagccagagaagaagccaggagaggaggtggtgggcggcgctgagattgaaaatgatgtgcccctggtggtgcggcccaaggtgaggacccaggcccagatcatgcctggggcccggcccaagaacaagagcaaggtgatgcctggggccagcaccaaggtggagaccagcgctgtgggcggggcccggcccaagagcaaggccaaggccatccctgtgagccgcttcaaggaggaggcccagatgtgggcccagcccaggtttggagctgagcggctgagcaagacagagaggaacagccagaccaacatcatcgccagccccctggtgtccacagacagcgtgctggtggccaagaccaagtacctgtctgaagatcgggagctggtgaacacagacacagagagcttccccaggaggaaggcccactaccaggccggcttccagcccagcttccgcagcaaggaggagaccaacatgggctcctggtgctgcccccggcccaccagcaagcaggaggccagccccaacagcgacttcaagtgggtggacaagtctgtgagcagcctcttctggagcggagatgaggtgacagccaagttccaccctggcaacagagtgaaggacagcaacagatccatgcacatggccaaccaggaggccaacaccatgagccgcagccagaccaaccaggagctgtacatcgccagcagcagcggctctgaagatgaatctgtgaagaccccctggttctgggcccgggacaagaccaacacctggagcggcccccgggaggaccccaacagccgcagccgcttccgcagcaagaaggaggtgtatgtggagagcagcagcggcagcgagcacgaggaccacctggagagctggtttggagctgggaaggaggccaagttccgcagcaagatgagagctgggaaggaggccaacaacagagcccggcaccgggccaagcgggaggcctgcatcgacttcatgcctggcagcattgatgtgatcaagaaggagagctgcttctggccagaagaaaatgccaacaccttcagccggcccatgatcaagaaggaggcccgggcccgggccatgaccaaggaggaggccaagaccaaggcccgggcccgggccaagcaggaggcccggtctgaggaggaggccctgattggcacctggttctgggccacagatgagagctccatggctgatgaggccagcattgagagcagcctgcaggtggaggatgagagcatcatcggctcctggttctggacagaggaggaggcctccatgggcactggagccagcagcaagagccggcccaggacagatggagagcgcatcggggacagcctgtttggagcccgggagaagacctccatgaagacaggagctgaggccaccagcgagagcatcctggccgcagatgatgagcaggtgatcatcggctcctggttctgggccggggaggaggtgaaccaggaggccgaggaggagaccatcttcggctcctggttctgggtgattgatgctgcctctgtggagagcggcgtgggcgtgtcctgtgagagcaggaccaggtctgaggaggaggaggtgattggcccctggttctggagcggggagcaggtggacatcgaggccggcatcggggaggaggcccggcctggagctgaggaggagaccatcttcggctcctggttctgggccgagaaccagacctacatggactgcagagctgagaccagctgtgacaccatgcagggcgctgaggaggaggagcccatcatcggctcctggttctggaccagggtggaggcctgtgtggagggagatgtgaacagcaagagcagcctggaggacaaggaggaggccatgatcccctgcttcggggccaaggaggaggtgtccatgaagcacggcaccggggtgcgctgccgcttcatggccggggctgaggagaccaacaacaagagctgcttctgggccgagaaggagccctgcatgtacccagctgggggcggctcctggaagagcaggcctgaggaggaggaggacatcgtgaacagctggttctggagcaggaagtacaccaagccagaggccatcatcggctcctggctgtgggccacagaggagagcaacattgatggcactggagagaaggccaagctgctgacagaggaggagaccatcatcaacagctggttctggaaggaggatgaggccatcagcgaggccacagaccgggaggagagcaggcctgaggccgaggagggggacatcatcggctcctggttctgggccggggaggaggaccggctggagcctgctgctgagacccgggaggaggaccggctggccgctgagaaggagggcatcgtgggctcctggtttggagcccgggaggagaccatcagaagagaggccggcagctgcagcaagagcagccccaaggccgaggaggaggaggtgatcatcggctcctggttctgggaggaggaggccagccctgaggccgtggccggcgtgggctttgagagcaagccaggcacagaggaggaggagatcaccgtgggctcctggttctggccagaggaggaggccagcatccaggccggcagccaggccgtggaggagatggagagcgagacagaggaggagaccatcttcggctcctggttctgggatggcaaggaggtgtctgaggaggccggcccctgctgcgtgtccaagccagaagatgatgaggagatgattgtggagagctggttctggagccgggacaaggccatcaaggagactggaacagtggccacctgtgagagcaagccagaaaatgaggagggcgccatcgtgggctcctggtttgaagcagaagatgaggtggacaacagaacagacaatggcagcaactgtggcagcaggaccctggctgatgaagatgaggccatcgtgggctcctggttctgggccggagatgaggcccactttgagagcaaccccagccctgtgttccgggccatctgccgcagcacctgcagcgtggagcaggagccagaccccagccggcggccccagagctgggaggaggtgacagtgcagttcaagccaggcccctggggccgggtgggcttccccagcatcagccccttccgcttccccaaggaggccgccagcctcttctgtgagatgtttggaggcaagcccaggaacatggtgctgagccctgagggggaggaccaggagagcctgctgcagcctgaccagcccagccctgagttccccttccagtatgaccccagctacagatctgtgcaggagatccgggagcacctgcgggccaaggagagcacagagcctgagagcagcagctgcaactgcatccagtgtgagctgaagattggcagcgaggagtttgaggagctgctgctgctgatggagaagatccgggaccccttcatccacgagatcagcaagatcgccatgggcatgaggtctgccagccagttcacccgggacttcatccgggacagcggcgtggtgtccctgattgagaccctgctgaactaccccagcagccgggtgaggaccagcttcctggagaacatgatccgcatggccccaccctaccccaacctgaacatcatccagacctacatctgcaaggtgtgtgaggagaccctggcctacagcgtggacagccctgagcagctgagcggcatccgcatgatccgccacctgaccaccaccacagactaccacaccctggtggccaactacatgagcggcttcctgagcctgctggccactggaaatgccaagacccgcttccacgtgctgaagatgctgctgaacctgtctgaaaatctcttcatgaccaaggagctgctgtctgctgaggccgtgtctgagttcatcggcctcttcaaccgggaggagaccaatgacaacatccagatcgtgctggccatctttgaaaatattggcaacaacatcaagaaggagaccgtcttcagtgatgatgacttcaacatcgagcccctcatcagcgccttccacaaggtggagaagtttgccaaggagctgcagggcaagacagacaaccagaatgaccctgagggggaccaggagaactag

SEQ ID NO: 39715 - DNA, 4188 bp, Artificial Sequence
  derived and/or modified sequence
atgaccggcgccgagatcgagagcggcgcccaggtgaagcccgagaagaagccaggagaggaggtcgtcggcggcgccgagatcgaaaatgacgtaccactggttgtgcgccccaaagtccggactcaagcacagattatgccaggcgctaggccgaagaacaagtcaaaggtgatgcctggcgctagcactaaagtagagaccagcgccgtgggtggggcacggccgaagtccaaggcgaaagcaattccagtgtctaggtttaaggaggaggcccagatgtgggctcagcctaggttcggggccgaaagactttctaagacagagagaaacagccagaccaatatcatagcctcccctcttgtctcgacagacagcgtgctggtggcgaagacaaagtacttgagtgaggatagggagttggtcaacactgatacagaatccttccctagaaggaaagcccattaccaggccggctttcagccttcctttagatctaaggaggagacgaacatgggaagctggtgctgcccccgacccacctccaagcaggaagcgagtccgaattctgatttcaaatgggtcgataaatcggttagcagcctgttttggtcaggcgatgaagtcacagctaaattccaccctggaaacagagtaaaagattccaatcggagtatgcatatggctaatcaggaagccaacacaatgtccaggtctcagaccaatcaggaactgtatattgcatcttctagcggcagcgaggatgaatcagtgaagacaccgtggttctgggctagggacaaaacgaatacctggagtgggcctcgcgaagacccaaacagtcggtctcggttcagatccaagaaggaggtttacgtggagtccagctcagggtccgaacatgaggatcacctagagtcctggttcggcgctgggaaagaggccaaatttaggagtaagatgcgagccggcaaagaggcgaataacagggcgaggcacagggccaagagagaggcctgtattgacttcatgcccggatctatcgacgtgatcaaaaaagagtcatgcttttggcccgaagagaatgctaacaccttttccagacctatgataaagaaagaggcgcgagctcgcgctatgacaaaggaggaggctaaaaccaaagcaagagctagggccaaacaggaagcccgatctgaagaagaagcattgatcggcacatggttttgggctacagacgaatcatctatggccgatgaggcttccattgaaagcagtttacaggttgaggacgagagtatcataggctcctggttctggactgaggaagaagccagcatgggtactggcgcgtcttctaagagcagacccaggaccgacggggagaggataggggatagcctcttcggcgcccgggaaaaaacgtctatgaaaacaggagcagaggctacatcagaatccatccttgcagctgatgatgagcaagtaattataggctcctggttctgggccggcgaagaggtgaaccaggaagctgaagaagaaactatttttggatcttggttctgggttatcgatgctgcatcggtggagagtggcgttggcgtatcatgtgagagtcggactcgcagtgaagaagaggaggttataggaccctggttttggtctggcgaacaggtggacatcgaggcgggaattggcgaggaggctaggcctggagcggaggaagagactatctttggctcttggttttgggcagagaaccaaacctacatggattgcagagcggaaacatcctgcgacacaatgcagggggccgaggaggaggagcccattatcggcagttggttctggacacgagtggaggcctgtgtcgagggcgacgtgaattcaaaatcttctctggaggataaagaggaagccatgataccttgctttggggcgaaagaagaggtgtcgatgaaacatggcaccggggtcagatgcagattcatggcaggcgcagaagaaacaaacaataagtcctgcttttgggccgagaaagaaccatgcatgtaccccgccggcgggggctcctggaagtctagacctgaggaggaagaagatatcgttaactcctggttttggtcccggaaatacacaaagccagaggccatcatcggttcctggctgtgggctactgaggagtctaacattgacggcaccggggaaaaagctaagttgctgacagaagaagagacaataatcaacagctggttctggaaggaagacgaggctatatccgaagccaccgatagagaggagagccgtcccgaagccgaggagggagacataattggcagttggttctgggcaggggaagaggatagactcgagcccgcagcagagacaagagaggaggaccggctcgccgccgagaaagagggcatcgtggggtcctggttcggtgctcgcgaggagaccattcggcgagaagctggctcatgtagcaagtcctctccaaaggcggaggaagaagaggtcatcataggttcatggttttgggaagaggaagccagccccgaagccgttgctggagtaggattcgaaagcaagccagggactgaggaggaagagataactgttggtagttggttctggcctgaggaggaggctagtatccaggccgggtctcaggccgtcgaggaaatggaatcggaaacagaggaggagacaatatttggctcctggttctgggacggaaaggaagtttcagaagaggccggcccctgttgcgtaagcaaaccggaagacgatgaggaaatgattgtggaatcctggttctggtcacgtgacaaagccattaaagagactggcaccgtggccacatgcgagtccaagccagagaatgaggagggagctatagtcggctcctggttcgaggccgaggacgaggtcgacaaccggactgacaatggaagcaattgcggctctaggaccctcgctgacgaggacgaggcaattgtcgggagctggttttgggcaggcgacgaggctcactttgagtccaatcctagtcctgtcttccgagcaatatgccgtagcacgtgctccgtggaacaggagcccgacccctcccgcagaccccaatcatgggaagaagtgactgtacaattcaaacctgggccatggggacgagtggggttcccgagcatttcccccttcaggttccctaaggaagctgcgagcctgttctgtgagatgttcggaggaaagccgcggaacatggtcctgagcccagagggagaggatcaggagtccctcctacagcctgaccagcctagtcccgaatttccattccaatacgaccctagttatagatccgttcaagaaattcgtgagcatctcagagcgaaagagtcaactgagccagagtccagcagttgtaactgtatccaatgcgagctaaagatcggcagtgaggagtttgaagagcttctcctcctgatggaaaagattcgggacccattcatccacgagatttctaaaattgccatgggtatgagatctgcttctcagttcacacgtgatttcatcagggattctggtgttgtatcgcttattgaaaccctcctcaattacccttcatccagggtccgtacttcattcctggagaacatgatccgcatggcgcccccatacccaaatctcaatatcattcagacatatatctgcaaagtgtgcgaggaaaccctagcctatagcgtggatagtccagaacagctgtccggcatacgcatgattaggcacctgacaactaccacagattatcacactttggtcgctaattacatgagtgggttcctgagtctgctagcaactgggaatgcgaaaacaagattccacgtgctcaaaatgctcttgaaccttagcgagaatttgtttatgacaaaagagctgctcagcgctgaggccgtgtctgaattcatcgggctgtttaaccgggaggagacgaatgacaatatacagatcgttcttgcaatctttgagaacattggaaacaatattaagaaagaaacagtcttttcggacgacgacttcaatatcgagcctttgatctctgcctttcacaaggtggaaaaattcgccaaggaactgcagggcaaaaccgataatcaaaatgaccccgaaggggaccaagaaaactag

SEQ ID NO: 39716 - DNA, 4188 bp, Artificial Sequence
  derived and/or modified sequence
atgaccggcgccgagatcgagagcggcgcccaggtgaagcccgagaagaagccaggtgaggaggttgtcggtggcgccgaaattgagaacgacgtgcctttggtcgtaaggcccaaggtacggacgcaagctcaaattatgcctggagccagacctaaaaacaagtctaaggtgatgcctggtgctagtactaaggtggagacatccgctgtggggggggcacgcccaaagtctaaagccaaggcaatccccgtatcacgttttaaagaggaggctcagatgtgggcccaaccccgattcggagcagagagattatctaagaccgagaggaatagccagaccaatattattgctagtcctttggtgtccacggactcagtcctggtggctaaaactaaatacctttctgaagacagagagctggtgaacaccgataccgaaagtttcccccggaggaaagctcactatcaggccggtttccaaccctcctttaggtctaaggaggagaccaatatgggtagttggtgttgtccaagaccgacctctaagcaggaagccagtcctaattctgacttcaagtgggtagataaaagcgtatctagccttttttggtctggagacgaagtgaccgctaagttccatccaggaaacagggtgaaagactctaacagatcaatgcacatggcgaaccaagaggcgaacactatgagccgaagccagaccaaccaggaactctacatcgctagttccagtggtagcgaggacgaaagtgtcaagacaccatggttctgggctcgcgataagacgaatacttggtcaggcccccgggaggatcccaattccaggagcaggtttagatcaaagaaagaagtatacgttgagagtagtagtggatccgagcacgaggatcacctggagagctggttcggcgcaggcaaggaagccaagttccgctcaaaaatgcgggccggaaaggaagcaaataaccgggctaggcatcgcgcaaaacgggaagcctgtatagactttatgccaggaagtatagatgtcatcaaaaaggagagctgcttctggcctgaggaaaatgcaaacaccttcagccgccctatgatcaaaaaagaggccagagcaagagcgatgacgaaagaagaggccaagaccaaagctagggcaagggcaaagcaggaggcccgctctgaagaggaagcacttataggaacatggttctgggctaccgacgagtccagcatggccgatgaagcctctatcgagtcttcccttcaggtcgaggacgagtctatcattggctcctggttttggaccgaagaagaggcatcaatggggaccggggcctcatcaaagtcaagaccccgaacagatggtgaacgcatcggggactccctctttggggctagagaaaaaacctcgatgaagaccggcgcagaggctacatccgagtccatactggccgcagatgacgagcaggtaatcatcgggtcttggttctgggctggggaagaagtaaaccaggaagcagaagaggagacaatctttggatcatggttctgggtcattgacgcagcttctgtggaatctggcgtaggagtttcctgcgaatcaagaactcgcagtgaagaggaagaagtgatcggcccttggttttggagcggtgagcaggttgatatcgaagccggaatcggagaagaggcgaggcctggcgcagaggaagagacaatattcggcagctggttctgggccgagaaccagacatatatggattgccgcgccgaaacttcctgcgacactatgcaaggtgcagaagaagaggagccaataattggcagctggttctggacacgggttgaggcctgcgtcgagggagatgtcaacagtaagtccagcttagaggataaggaggaggccatgattccttgttttggggccaaggaagaagtctcaatgaagcacggcaccggcgttagatgccggtttatggctggagccgaggagactaacaataagtcttgcttctgggctgagaaagagccctgcatgtatccggccggcggtggatcttggaagtctaggcccgaagaagaggaggatatagttaatagctggttctggagtagaaagtacacaaagccagaggccatcatcggttcatggctgtgggctacggaagagtctaacattgatgggaccggcgagaaggcaaaattactaacggaggaggaaacaatcatcaactcgtggttctggaaagaggatgaggcaattagcgaggctacggaccgagaggagtccaggcccgaagccgaggagggggacatcatcggcagttggttctgggcgggggaagaagaccgtctggagccagccgcagagaccagagaggaagatagacttgctgctgagaaagaaggcatcgtgggttcctggttcggtgcacgtgaagaaaccatcagacgggaagcaggctcatgctctaagtctagtcccaaggcagaggaggaagaggtgataataggatcatggttttgggaggaagaagctagccctgaggccgtcgctggagtgggattcgagagcaaaccaggaactgaggaggaagagattactgtcggttcctggttctggcccgaggaggaggctagtatacaggcaggctcccaggcagttgaagaaatggagagcgagaccgaggaggagaccatttttggcagctggttctgggacggcaaagaggtctctgaagaagctgggccctgctgcgttagcaagcccgaggacgatgaggaaatgatagtcgagagctggttttggagccgggacaaggccatcaaggagacaggaactgtggccacctgcgagagcaagcccgagaacgaggagggggcaattgtcggttcctggttcgaggcagaagatgaagtggacaataggaccgataatgggagcaattgcggatctcgtacactcgccgacgaagatgaggcgattgtgggtagctggttctgggcaggggatgaagcccattttgagtccaacccttcaccagtattccgggcgatttgccggagcacatgctctgtcgagcaggagccagatccctcgcgacgcccacagagttgggaggaggtcactgtgcaattcaaaccaggaccatggggccgagtgggcttccccagcatttccccattccgatttccaaaagaggctgcatccctattttgcgagatgtttgggggcaagccacgaaacatggtgctgtcaccagagggtgaggaccaagagagcttattgcagcccgaccagccctcccccgaatttcccttccagtatgacccatcttaccgctctgtccaggaaatccgcgaacatcttagagccaaggagtccaccgagcctgagagctcaagttgcaattgcattcagtgcgagctgaaaattggatcagaggaatttgaggagctgctgctcctgatggagaagatcagggacccattcatccacgagatcagcaagatcgccatgggcatgagatctgcatcccagtttacaagagatttcatacgggactctggcgtggttagcttgatagaaacccttctgaactatcctagcagtagagtccgaacgtcctttctagagaatatgatccgaatggcccctccgtaccctaatctgaacatcatccagacctatatttgtaaggtgtgcgaggagaccctcgcatattctgtggattcccctgaacagcttagcggtatccggatgatcagacacctgaccaccaccaccgattaccacaccctggtcgcaaattacatgtccggattcctgtccctgctggctacaggcaacgccaaaacccggttccatgttttaaaaatgttgctgaatctgagcgagaacctcttcatgacgaaggagctgctgtcagcagaggccgtgtccgaatttatcggactcttcaatcgagaggaaacaaacgataacattcagatcgtccttgctatttttgagaatatagggaacaatatcaagaaggagaccgtgttttcagatgatgatttcaacattgaaccgttaattagcgcattccataaagtcgagaagtttgcgaaggaattacagggcaagaccgacaaccagaacgacccagagggcgatcaggagaactag

SEQ ID NO: 39717 - DNA, 4188 bp, Artificial Sequence
  derived and/or modified sequence
atgaccggcgccgagatcgagagcggcgcccaggtgaagcccgagaaaaaacctggcgaggaggtagttgggggggccgaaattgagaacgatgtgcctttagttgtgaggcccaaagtgcgcactcaggcccagatcatgcccggcgctagacccaaaaacaagagcaaggtgatgccgggtgcctcaaccaaggttgaaacgtcagcagtcggaggggctcgccccaagtccaaggctaaagctatcccagtctctagattcaaagaggaggctcagatgtgggcacaaccacgcttcggtgcagagagattaagcaagacagaacgcaattcccaaactaacattatcgcctctcctttggtgagtactgacagcgttctagtcgccaagacaaaatatctatccgaggacagggagctggtgaatacagacacagagagtttcccccgacgcaaagcacactaccaggccgggttccagcccagcttcagaagcaaggaggagacgaacatgggctcatggtgttgtccccgaccaacaagtaaacaggaagcgtcacctaactcggattttaagtgggttgacaagtcggtgagttcattgttttggtccggcgacgaagtgacagccaagtttcatcccggcaatagggtgaaagactcaaacaggtcgatgcacatggccaatcaggaggcaaacacaatgagtcgatcacaaacgaatcaggagttgtacattgcttcatccagtggcagcgaggatgaatcggtgaagacaccatggttttgggcaagagacaagactaatacctggtctggccccagggaggaccccaactccagatcaaggtttcggagcaagaaggaagtgtacgtggaatcgtcttccggaagtgagcacgaggatcatttggaaagctggttcggtgcgggcaaagaggcaaaatttagatctaagatgagagctgggaaggaagcaaacaatagggctaggcatcgggccaaacgcgaggcttgtatcgactttatgcctggatccattgacgtgatcaaaaaagaaagctgcttctggccggaggagaacgctaatacatttagtcgtccaatgatcaagaaagaggctcgggctagggctatgacaaaagaggaggctaagacaaaggccagggcgagagctaagcaggaagccagaagtgaagaagaagctttgattggcacatggttttgggcgaccgacgaatcatctatggctgatgaagcctctattgaatcttccctgcaggtagaggatgaatccattatcggcagctggttctggacagaggaggaggcgagcatgggcaccggcgcttcttccaagtcacggcccaggaccgacggagagaggatcggagattccctgttcggggctagagagaaaactagtatgaaaaccggggctgaggcgacatccgaatccattttagccgcagatgacgaacaagtcattataggttcttggttctgggccggtgaggaggtaaaccaggaggctgaggaagagacgatctttggatcatggttttgggttattgacgcagcttcagttgaatccggtgtgggcgtatcgtgcgagagccgcacaagatctgaggaggaagaggtaatcggaccatggttttggtctggtgaacaagtagatatcgaagctggcataggcgaagaagcgcggcccggcgctgaggaagagaccatctttggctcatggttttgggcagagaaccaaacctatatggattgccgggcagaaacttcctgtgataccatgcaaggggccgaggaagaggaaccgattattgggagctggttttggacacgggttgaggcgtgcgttgagggggatgtgaatagcaagagcagtctggaggacaaggaggaggccatgattccttgcttcggtgcgaaagaggaagtttccatgaagcacggcaccggtgtgagatgtcggtttatggccggcgctgaggagaccaataataagtcttgtttctgggccgagaaagaaccctgcatgtatcccgccgggggggggagctggaagagtaggcccgaagaagaagaggacatagttaattcctggttttggagcagaaaatacaccaagcccgaagcgatcattggttcctggttatgggcaacggaggagtctaacattgacggcactggtgaaaaagccaaactgttaacggaagaagaaacaatcattaatagctggttctggaaggaagatgaggctatttcggaggcgacagatcgtgaggaatcgagaccagaagccgaagaaggcgacataatcggatcttggttttgggcgggcgaggaggatagacttgaaccagccgccgagaccagggaggaagacaggctggcagccgaaaaggagggcatcgtaggatcatggttcggcgcccgggaagaaactataaggcgtgaagccggtagctgcagtaaaagcagtcctaaagccgaagaagaggaggtcataatcggcagttggttttgggaggaggaggccagccccgaggcagtcgcaggagtaggctttgaatcaaagccaggaaccgaagaggaggagatcactgtcggatcctggttctggcctgaagaggaggccagcattcaggccggaagccaagctgtggaggaaatggagtcagaaaccgaggaagagacgatctttggctcttggttctgggatggtaaagaagtgagcgaagaggctggaccttgttgcgtctccaagcccgaagacgatgaggaaatgatcgttgaaagttggttctggtctcgggataaggcgatcaaggagacgggcaccgtggctacttgcgaatccaaacctgaaaatgaagagggcgccatcgttggctcctggtttgaagccgaagacgaggtcgacaatcggacagacaatggaagtaattgcggtagccgcacattggctgacgaggacgaggcgatcgtgggttcctggttttgggcaggagatgaggcacactttgaatctaatccaagccctgtatttcgcgcgatttgccgctccacttgctctgttgagcaggagcccgatccaagtcggaggccacagtcatgggaagaagtgaccgtacagttcaagcctgggccctggggcagagtgggatttccctccatctcccctttccgcttcccaaaggaggcagcatctctgttctgtgagatgtttggaggtaagccccgcaatatggtgctctcgccagagggagaggaccaggaaagcctgctgcagcctgaccagccaagtcctgaatttccttttcagtatgacccttcatataggagcgtgcaggaaatacgggagcatcttagggcaaaggagtcgactgaacccgagagcagctcctgtaactgtattcaatgtgagctgaaaattggctcggaagagttcgaagagcttctgctgctcatggaaaaaatccgggatccattcatccacgagatctctaagatcgccatgggcatgagatccgcatcacagtttacacgggacttcatccgtgatagtggagtggtgtccctcattgaaacactgctgaactacccatcttcccgagtcagaacctcctttttggagaacatgatacgaatggccccaccctacccaaacctgaacattattcaaacctatatctgcaaagtgtgcgaggagaccctcgcgtatagcgtggattcaccggagcagttgagtggtatcagaatgattagacacctgaccaccaccactgattatcacaccctcgttgcaaactatatgtctggattcctgtccttgttggccaccggcaatgcaaaaactaggttccacgtcctcaagatgttactgaatctctctgaaaacttattcatgactaaagaacttctttccgccgaggctgtgtcggagttcatcggtttatttaaccgtgaggagacaaacgacaatatccagatagtcctggccatatttgagaacatcgggaacaacatcaagaaggagacggtattttcggatgacgacttcaacatagaacctttgatttccgcatttcataaggttgaaaagtttgctaaagaattacaaggcaagacagacaaccagaacgaccctgagggggatcaggagaattag

SEQ ID NO: 39718 - DNA, 4188 bp, Artificial Sequence
  derived and/or modified sequence
atgaccggcgccgagatcgagagcggcgcccaggtgaagcccgagaagaagcccggagaagaggttgtgggcggtgcagagattgagaacgacgtgcctctcgtggtccggcccaaggttaggacccaggcccagattatgcccggagcccgacccaagaacaaaagtaaggtgatgcctggggctagcacaaaagtggaaaccagcgctgtcgggggcgcccgccctaagtccaaggctaaggctataccagtttcacggtttaaagaggaggctcagatgtgggcacaacccagatttggggccgaaagactgtcaaaaaccgagagaaattcacagacaaatattatcgcttcacctttagtctccaccgattctgtgcttgtcgccaagacaaagtacctctccgaggaccgggaactggtgaacacagataccgaatccttcccccgcaggaaggcgcattaccaggccgggtttcagccttcctttcgatctaaagaggaaaccaacatgggcagctggtgttgcccaaggcctacaagcaaacaggaggcatcacctaactccgatttcaagtgggtggataagtctgttagctctctcttttggagcggagacgaagtcaccgccaagtttcatccaggaaatcgagtgaaggactccaaccgcagtatgcacatggccaaccaggaggcaaacaccatgtccaggagccagacaaaccaggagctgtacattgccagctcctcaggatcagaggatgagagcgtgaagacaccatggttctgggcccgggacaaaactaacacctggagcggcccccgagaagaccccaattctcgttcgaggtttcgttcaaaaaaagaggtgtatgtagaaagtagtagcgggagtgaacacgaggaccatttagaaagctggttcggcgccggaaaagaagccaaattcaggagtaaaatgagagccggtaaagaggccaataacagggcaagacatcgggcgaagagggaagcatgcatcgatttcatgccgggcagtatagacgtaatcaagaaggagtcttgcttttggccagaagagaatgctaatacctttagtaggcctatgataaaaaaggaggcaagagcccgcgctatgaccaaggaagaagcaaagacaaaggcccgagctcgggcgaaacaggaggcccggagtgaagaagaggcccttattgggacctggttctgggctaccgatgaaagtagcatggctgatgaggcctctatagagtcttctttgcaggttgaagacgaatctattatcggcagctggttctggactgaggaggaggcctctatgggcacgggcgctagctccaagtcacggcccagaacagacggcgaacggatcggagacagcctgtttggtgcgcgcgagaagacctctatgaagacgggcgcagaggccacaagcgagagcattctagccgcagacgatgaacaggtgatcatcggctcttggttctgggccggcgaggaagtaaatcaggaagctgaagaagaaactattttcggcagttggttttgggtcatagacgccgccagcgttgaaagcggcgtgggcgtcagctgcgagtccagaacgcgctctgaggaagaggaggtcattggaccatggttttggtctggagaacaagtggacatcgaggccggaatcggagaggaggcaagacctggcgccgaagaggagactatcttcgggtcttggttttgggccgagaaccagacttacatggactgcagggcggaaaccagctgtgacaccatgcaaggagccgaggaggaagaaccgatcattggatcttggttttggacccgcgttgaggcctgtgtggaaggtgatgtaaactccaaatcatcccttgaagacaaggaagaggccatgataccttgcttcggggcaaaagaggaagtgtcgatgaagcatggcacaggcgtgagatgccggttcatggccggcgctgaagaaactaacaataagtcttgcttttgggcagagaaagagccgtgtatgtatccagccggggggggctcttggaaatcacggcctgaggaggaggaggacatcgtcaattcttggttttggtccaggaagtacacaaagcccgaggcaataatagggtcatggctttgggctaccgaggagtcaaatatcgacggtaccggcgagaaagccaaactactgactgaggaggaaaccattatcaacagctggttctggaaagaggatgaggccatctctgaggccactgatcgggaagaatcgagacctgaggctgaggaaggggacatcattggctcctggttctgggctggagaggaggatagactggaaccagcagcagagactcgagaagaagatcgcctcgccgcagaaaaggaaggcatcgtggggtcatggtttggtgcgcgggaggaaacaatcagacgtgaagctggctcatgctcaaagtcgtctccaaaggcagaagaggaggaggtcataatcggctcctggttctgggaggaggaagcctccccagaggcagtggccggagtcggtttcgaaagcaagccaggcactgaggaagaagagatcacagtgggatcatggttctggccagaggaagaggcatccatccaagcagggtcacaggctgtcgaagagatggaatccgagactgaggaagagactatctttggaagttggttctgggatggcaaggaggtttctgaggaagctggcccatgctgcgtgtccaaacctgaggacgacgaagagatgatcgtggaatcatggttctggtctagagacaaggccattaaggagactggcaccgtagcgacctgtgaatcaaagccagaaaacgaggagggcgcgatcgtcggttcttggtttgaggctgaagatgaggtcgataacagaactgacaatggatccaactgcggcagtcgtaccctggccgacgaagacgaagccattgtgggttcatggttttgggctggagatgaggctcacttcgaatcgaatccgagcccggtcttccgcgctatttgtaggtccacgtgtagtgtggagcaagagccagacccttccagaaggcctcagtcatgggaggaggtgacagtgcagtttaaacccggtccctgggggcgcgtaggctttccatcgatttcccccttccgatttcccaaggaggctgccagcttgttctgtgaaatgttcggaggcaaaccccgcaatatggtgctttctcccgagggcgaggatcaggagtccctcttgcagcctgatcagccatcccccgagtttcctttccagtatgacccctcctataggtctgtccaagagatccgggaacaccttagggcgaaagagagcacagaacctgaaagtagctcttgtaactgtattcaatgcgagctaaagatagggagcgaagaattcgaggaactgctgctgctcatggagaaaatccgggatccgttcattcacgagatctccaaaatcgcaatgggtatgcggagtgcctcacagtttactcgcgatttcatcagagattctggcgtcgtgtcactcatagaaactcttctaaattatccgtcaagtagggtcagaacgtctttcctagagaatatgatacgcatggcaccaccctatcccaatttaaacatcatccaaacatacatctgcaaggtatgtgaagagactcttgcctactcagttgatagccccgagcagctatccgggatcagaatgatccggcatctgacaaccacaactgactatcatacattagttgccaattacatgagcggattcctttccttactggcaacaggcaacgctaaaacacgattccatgtactgaaaatgctgctcaacctgtccgaaaatttatttatgacgaaagaactgttgagtgccgaggctgtctccgagtttatcggactattcaaccgggaggagactaacgacaacatccagatcgtgctggctattttcgagaatattggaaataatatcaagaaggagaccgttttctctgacgatgactttaatatagaaccgcttatctccgcttttcacaaggtggaaaagttcgcaaaggaattgcagggcaagacagacaaccagaacgacccagagggagatcaggaaaactag

SEQ ID NO: 39719 - DNA, 4188 bp, Artificial Sequence
  derived and/or modified sequence
atgactggagctgagatcgagtcgggcgctcaggtgaagcctgaaaagaagcctggggaagaagtagtgggcggtgccgagatcgagaacgacgtcccccttgtcgtccgccctaaggtgaggactcaagcacagataatgcctggagctagacctaaaaacaagagcaaggtgatgcccggagcttcaactaaagtggaaactagcgctgtaggcggtgctcgaccgaaatctaaagctaaggcgattcctgtgtcaaggttcaaggaagaagctcaaatgtgggcacagccccgatttggcgctgagcgcctcagcaaaacggagaggaatagccaaacgaacatcattgcctcacccctggtatccactgatagtgtgttggtggcgaagactaaatatctgtctgaggatagggagctggtcaatacagacacagaatcttttcctcgccgaaaggctcactatcaggccggtttccagccctcctttcgcagcaaagaggagaccaacatgggttcctggtgctgtcccaggcccactagtaagcaggaggcatctcccaatagcgacttcaaatgggttgataagtcagtttcctcccttttctggtccggtgacgaagtaactgccaaatttcaccccggtaaccgcgtaaaggactccaacagatcaatgcacatggcaaaccaggaggccaatacaatgtcgaggagtcagacaaatcaggagctttacatcgcctccagctcgggatcagaagatgaaagtgtgaagactccatggttttgggctagggacaagactaatacatggtctgggcctcgagaggaccctaatagccgatcacgattccgcagtaagaaggaggtgtacgttgagagttcctcaggctccgagcacgaagaccacctcgagagctggttcggtgccggaaaggaggcaaagtttagatccaagatgagagctggaaaggaggccaacaatcgtgcacggcaccgggcaaagcgcgaagcctgtattgatttcatgccgggatctatcgacgtcatcaaaaaggagagttgcttctggccagaggagaacgctaacaccttcagcaggccgatgataaagaaggaggccagagccagggcaatgactaaggaggaagctaaaactaaggcacgggcaagggccaaacaagaggccagatccgaagaagaggcgcttataggtacttggttctgggcgacagacgagtcctcaatggccgatgaagcttccattgagagctccctgcaggttgaggacgaatccataatcgggagctggttctggaccgaagaagaggcaagtatgggtacaggagcctcaagtaaatcaaggccaaggactgatggggaaagaataggagacagcctgtttggcgctagagagaagactagcatgaagacaggcgctgaggccacttcggaaagtatcttagccgcagacgatgaacaggtgattatcggctcttggttctgggctggagaggaggtgaaccaggaagcagaggaggaaaccattttcggcagctggttctgggtcatcgacgctgctagtgtggagtccggtgtgggcgtctcctgtgaatcccgcacacgctcagaggaagaagaagtcatcggtccttggttctggtcaggcgaacaggtagatatcgaggcagggataggtgaagaagcaaggcccggagctgaggaagaaactattttcggctcctggttctgggccgagaaccagacttatatggactgtcgtgcggagacttcgtgcgatactatgcagggcgcagaggaggaagagcccattattgggtcttggttttggacacgggttgaagcttgtgtggaaggcgacgtcaattccaagagttctctcgaggacaaggaggaggccatgattccatgcttcggcgcaaaggaggaggtgtcaatgaaacacggcacaggagtgaggtgtcgctttatggccggtgctgaggagactaataacaaaagctgcttttgggcagaaaaagagccatgtatgtatcctgcaggtggcggttcttggaaatccagacctgaggaagaggaagacattgtgaatagttggttctggtccaggaaatacacaaaacctgaagccataatcgggtcatggttgtgggccaccgaggaatcaaatattgacggtacgggggaaaaagccaagctgcttacagaggaagagaccataataaatagctggttttggaaggaggatgaggcaatctcagaggctacggaccgagaggagtcacggccagaagccgaggagggggatatcattggcagctggttttgggcgggagaagaggacaggcttgagcccgcagccgaaactcgggaagaggatcggcttgccgcagaaaaggaaggtatagtcggctcttggtttggagcgcgtgaagagaccatccggagggaggcagggagttgttctaagagtagtcccaaggcggaggaagaagaagtcattataggcagttggttttgggaggaggaagcttcacctgaagccgtcgcaggcgtagggtttgaaagtaaacccggaactgaggaagaagagatcacagttggaagttggttttggccggaagaggaagccagtatacaagccggtagtcaagcagtggaggaaatggagtccgaaaccgaggaggagaccatctttggcagctggttctgggacggcaaggaagtgagtgaagaggcgggaccgtgctgtgtgtctaagccagaagatgatgaggagatgatagttgaaagttggttttggtccagggataaagcaattaaagaaacaggcacagtcgccacctgtgagtctaaaccagaaaacgaagaaggcgctatcgttggatcttggttcgaggcagaagacgaagttgataaccgaacagataacggatctaattgcggctcccggacactggccgacgaagacgaggcaatagtgggctcatggttctgggccggtgacgaggcacactttgaatccaaccccagccccgttttcagagctatttgtaggtccacttgctctgttgagcaggagcctgatccaagtcggcgaccccagagctgggaggaggtcaccgtccagtttaaaccaggaccatggggcagggtgggctttccctccatctcgccgttcaggtttcctaaggaagccgcatcactgttctgcgagatgttcggtgggaagccaaggaatatggtgctctccccggagggtgaagaccaggagagcttgttgcaacctgaccaaccctcacctgaatttccctttcaatacgatcctagctacaggtcagtgcaggaaatcagggagcacttgcgggctaaggaatcaactgagcctgaatcatctagttgcaactgtatccaatgcgaactcaagattgggtcagaagagtttgaggaacttctgctgcttatggaaaaaatccgcgatccttttatccacgagatctcaaaaatcgccatgggcatgcgtagcgcgagccagttcacaagagatttcatccgagatagtggtgtagtgagtctcattgaaactctattgaactatccatcgtctcgggtgcgaacctctttcctggagaatatgatccgtatggctcccccataccccaaccttaacatcatccagacgtacatttgcaaggtgtgtgaggagaccctcgcttattcagtggattctcctgagcaattgtctggaatcagaatgattagacacttgaccacaaccacggactaccacactctggtcgctaactatatgtcagggttcctttctctgctggctactggcaatgcaaaaacgaggttccacgtgttgaaaatgctgctgaaccttagcgagaacctgttcatgaccaaggagttgctgtcggctgaagccgtatccgaatttataggactgtttaatagggaggagactaatgataatatccagatcgtgctggcgatctttgagaacatcggaaacaatattaaaaaagaaaccgtttttagtgacgacgactttaacatcgagcctctgatctctgcttttcacaaggttgagaaattcgctaaggaactgcaagggaaaaccgataaccagaatgaccccgaaggcgatcaagagaactag

SEQ ID NO: 39720 - DNA, 4188 bp, Artificial Sequence
  derived and/or modified sequence
atgaccggggcagagattgaatcaggggcacaggtgaaaccggaaaagaagcccggagaggaggtagtgggaggcgctgagattgaaaacgacgtgccactggtcgtgagacctaaggtacgtacgcaggcccaaatcatgccgggtgcaagaccaaagaacaagtcaaaagtcatgcccggagcgtctaccaaagtagaaacttctgctgtgggcggtgctaggcccaaaagcaaggctaaggcgataccagtcagccggttcaaggaggaagcacagatgtgggcgcaaccaagatttggtgcagagcgcctgtcaaaaactgagcgtaattcccagacaaatattatagcctcacccctagtcagtactgacagcgtattggtggctaagactaagtacttatcggaggatcgggagctggtgaacacagatacagagtccttccctagacgaaaggcgcactaccaggctggattccagccgtccttccgctctaaagaagaaactaacatgggcagctggtgctgtccacggccaacttccaaacaggaagcctccccgaactctgatttcaagtgggttgacaaatcggtctcatcgttattctggtccggtgacgaagtcacagccaaattccacccaggcaatagagtaaaggattccaataggagcatgcacatggccaaccaggaggccaatactatgtctagatcacagacaaatcaggagctgtatatcgcatccagctctggcagtgaggatgaaagcgttaagacaccctggttttgggccagggacaagaccaatacatggagcgggcctcgcgaggatccaaactctcgctcaaggtttcgctctaagaaagaggtctatgtggaaagctcctcgggaagtgaacatgaggaccacctggaatcctggtttggggctggcaaggaagccaaatttaggtcaaagatgcgcgcaggaaaagaagctaataaccgagctcgccaccgtgcaaagcgagaggcatgcatcgactttatgcccggaagtattgatgtgatcaagaaagagagctgcttctggccagaggagaatgctaacaccttcagccggcctatgattaagaaagaggcgagagctcgcgctatgaccaaagaagaagctaaaacaaaagccagagcaagggccaagcaggaggccagatccgaagaagaggctttgatcgggacatggttctgggcaaccgacgaatcctctatggccgatgaggcatcaatcgaaagctctcttcaggtcgaggacgagtcaataatcggaagctggttctggacagaagaggaagcctctatgggcacaggggcttccagcaagtcaaggcccagaacggatggcgagaggatcggtgatagcctgtttggcgctagggagaagacttcaatgaagactggcgcagaggcaaccagcgaaagcatcttggccgctgacgatgagcaagtcatcataggctcatggttctgggccggagaggaggtgaatcaggaagctgaggaagagaccatctttggttcttggttctgggtaattgatgccgcttcggtagagtcaggcgtcggcgtgagttgcgagtcacgaacccgtagcgaagaggaagaggtgattggaccctggttctggagtggcgagcaagtggacatcgaggctggcataggagaggaagcccgacccggtgcggaagaagagaccatctttgggtcatggttctgggcagaaaaccaaacgtacatggactgccgcgcagaaacatcttgcgacactatgcagggggctgaagaggaggaacccattattgggagctggttctggaccagggtggaagcctgcgttgagggggatgtgaattctaaatcttcattagaagataaggaagaggccatgatcccctgcttcggagcaaaggaagaagtctctatgaagcacggtacgggcgtgaggtgccggttcatggccggagcagaagagactaacaacaagagttgcttctgggccgagaaggaaccttgcatgtaccctgcaggtgggggaagctggaagtctaggcctgaagaggaggaggatattgtgaacagttggttctggtctcgcaagtatactaaaccggaggcaatcattggatcttggctttgggccactgaagagagcaacattgacggaacgggcgaaaaggccaagctgcttaccgaggaggagaccattataaattcatggttttggaaggaagacgaggcaatctctgaagcaacagatcgtgaggaatcccgcccagaagccgaggagggagatatcattggtagctggttctgggccggtgaagaagataggcttgaacctgcagcagagactagggaggaagatagacttgctgccgaaaaagagggaattgtcggctcatggtttggggcacgcgaagagactattcgacgcgaggcaggttcatgctctaaatcaagtcccaaggcggaagaggaggaagttattattggtagctggttttgggaggaggaggcctcccctgaggccgtcgctggcgtggggttcgagagcaagccaggcactgaggaggaggaaattacagtgggcagttggttttggcccgaagaagaggcttcaatccaggccggatctcaggccgtggaggagatggagtccgagacagaggaagaaacaatctttggatcatggttctgggacggcaaggaagtttcggaggaggcaggaccgtgttgcgtgagcaagcctgaggatgacgaggagatgatcgttgagagctggttttggtccagagataaggcgatcaaggaaaccggaactgtggcgacctgcgagtccaagccagagaacgaagagggcgcaatcgtcgggagctggttcgaggctgaggatgaggtcgacaaccgcactgacaacggctccaactgtggttccaggaccctggccgacgaagatgaagcaattgtggggtcatggttctgggctggagacgaggcacactttgagtccaaccctagccccgttttcagggctatttgtcggagtacatgctcggtggaacaagagcccgacccgagcagaaggccacagtcttgggaggaagtcacggttcagttcaagcccggtccgtgggggagggtgggcttcccctccatcagcccctttagatttccgaaggaggccgcatcattgttttgcgagatgttcgggggtaaaccacgcaacatggtgttgtctcctgagggtgaggaccaggagtctctcctgcagcccgaccaaccctctccagaattccccttccaatacgacccatcttatcgctcagtgcaagaaatccgggagcacttgcgggcaaaagaaagtaccgaacccgagtcttcttcttgtaactgtatacagtgtgaactcaaaataggatccgaagaatttgaggagttgctcctgctgatggaaaaaattcgcgaccctttcatacatgaaatatctaaaatcgccatgggaatgcgcagcgcctcgcagttcactagggatttcattcgggacagtggcgtggtatccttaatcgagactctactaaactatccatcctctagagtgcggactagctttctcgagaacatgatacgaatggcccctccgtaccccaacctaaacatcatacagacctacatatgcaaggtgtgtgaagagacccttgcctacagtgtagatagccctgaacagttgtcagggatccgcatgattcggcacctcaccaccacaaccgattatcacacgctggtggccaattacatgagtggcttcctatcccttcttgccaccggaaatgcaaaaacacgctttcacgtgttgaaaatgttactgaatctgagcgagaatttattcatgactaaggagcttcttagcgcagaggcagtgagtgagttcatagggctgtttaatagggaagaaacaaacgataatattcagatagtgttggccatatttgagaacatcggaaataatataaaaaaagagactgtattctctgacgacgacttcaacattgaacccctgatctccgccttccacaaagtcgaaaagtttgcaaaagagctgcaggggaaaacagacaaccagaacgatcccgagggcgatcaagagaattag

SEQ ID NO: 39721 - DNA, 4188 bp, Artificial Sequence
  derived and/or modified sequence
atgacaggcgctgaaattgaatctggtgctcaggtcaagcccgaaaaaaaaccaggagaggaggttgtgggaggagcagaaatcgagaatgacgtccctttagtcgtgcggcctaaggtcaggacacaggcccagatcatgcccggagcacgacccaagaacaagagcaaggttatgcccggtgctagcaccaaggtggagacatctgccgtgggtggtgcaagacccaagtctaaagccaaagccattccagtgagcaggttcaaggaggaagcccagatgtgggcacaacctagattcggggcagagcgcctctctaagactgagcgcaactctcagaccaatataattgcatctcctttggttagcacagacagtgtactggtcgctaagacgaagtatttgtcggaggatagagagctggtaaatactgatactgaaagtttccctaggaggaaggcgcattaccaggcgggtttccaaccatccttccgttccaaggaagagaccaatatggggagctggtgctgtccaagacccacaagcaaacaggaagccagtcctaatagcgatttcaagtgggtggataaatccgtcagctctctcttctggagtggtgacgaagttacagctaaattccacccagggaatagggtgaaagacagcaacaggtccatgcatatggctaatcaggaagccaatacaatgtctagatcccagactaaccaggagctctacatagcttcatcaagcgggagtgaggatgaatctgtgaaaacaccttggttctgggcaagggacaagaccaacacatggtctgggcctcgcgaagatcctaacagtagatcacgttttaggagtaagaaggaggtatacgtggaatcctccagcgggtctgaacatgaagatcaccttgagagctggtttggcgctggtaaagaggccaaatttagaagcaagatgagggcgggtaaagaggccaacaaccgtgcccgacacagagccaagcgcgaggcctgcatcgatttcatgcctggttctattgacgtgatcaaaaaagaatcctgtttctggcccgaggaaaacgccaatactttcagtcgccctatgatcaaaaaagaagcgagggcccgagcaatgactaaagaagaggccaagaccaaagcgagggctcgagcgaagcaagaagcccgttctgaggaggaggcgttgatcggaacatggttttgggccactgacgagtcttcaatggccgacgaggccagcatagagtcttccttgcaggtggaggatgagtctataatcggctcatggttctggaccgaagaagaagcctccatgggaactggcgcttcatccaagagccggccacgcactgacggagagaggattggggactctctgttcggcgctagagaaaagacaagcatgaaaactggggctgaagcaacatcagagtcaatcttagcggctgacgatgagcaggtgatcatcggcagctggttctgggcaggggaagaagtcaaccaggaagccgaagaagagactatttttggatcatggttctgggtgattgacgccgctagtgtcgaaagcggagtaggcgtttcttgcgagagcaggaccagatccgaggaggaggaagtgatcggcccatggttctggtctggggaacaggtggacattgaagcaggcatcggagaagaggcccgaccaggggctgaggaggagaccatttttggtagttggttctgggcggagaatcagacctacatggactgccgcgcagagacctcatgtgatactatgcaaggggctgaggaagaagaaccaatcattggatcctggttttggacccgggtggaagcttgtgtggaaggcgacgttaattcgaagtcaagtctcgaagataaggaggaagccatgatcccttgctttggtgcaaaggaagaggtctctatgaaacatggaactggagtcagatgcaggttcatggccggtgcggaggagacgaacaacaaaagttgtttctgggcagagaaggagccctgcatgtacccagccggaggcggttcatggaaaagcaggcctgaagaggaagaggatatagttaattcttggttttggagcagaaaatacaccaaacccgaggctatcatcggcagctggctttgggccacagaagagagtaacattgacggcaccggcgaaaaagccaagctcctcactgaggaagagaccattataaatagctggttctggaaagaggacgaggccatcagtgaagctaccgatagggaagaaagcagaccagaagccgaagagggagacataataggttcctggttctgggccggtgaggaagacaggttagagcccgcagccgagacaagggaagaggatagactggcagctgaaaaggaaggaattgtcggatcatggttcggcgcaagagaagaaactattcgccgtgaagctggtagttgcagcaaaagttcccctaaggctgaagaggaagaggtgattatcggctcatggttttgggaggaagaggctagcccagaggcagtggccggagtcgggttcgaatcaaagccaggtacagaggaggaagagattaccgttggctcctggttttggcccgaagaggaagcgtcgattcaagccggatcccaggctgttgaggagatggaaagtgaaacggaggaggagacgatattcggctcatggttttgggatggaaaagaagttagcgaagaggcaggaccgtgctgcgtgtcaaagcctgaagatgatgaggagatgattgttgagagttggttctggtcccgggataaggcaattaaggagaccggaactgtggctacttgcgaaagcaaacccgagaacgaggagggagccattgtgggatcatggttcgaggcagaggatgaggtcgacaaccgtacagacaacggcagtaattgcggcagtcgtaccctggcagacgaggatgaagctatcgtaggctcctggttctgggcgggtgatgaagcccatttcgaatctaatccaagtcccgtgtttagagccatttgtcgcagcacctgtagtgtcgaacaggagccagacccttctcgacgaccacagagctgggaagaggtgacggtgcaattcaaaccaggtccatggggacgcgtaggatttcctagcatctctccattccgtttcccaaaggaagctgcgtccctcttttgcgagatgtttggcggaaaaccgcgaaacatggtcttgtccccagagggcgaagaccaggaatcattactgcagcctgatcaaccgtcacccgagttccccttccagtatgatccctcctacaggtcggtccaggaaattagagaacacctgcgagcaaaagagtccactgagcccgagtccagctcctgtaattgcattcagtgtgaattgaagattggatctgaagagtttgaggagctactcctgcttatggagaagattagggacccatttatccatgagatttccaaaatcgcgatggggatgcgatcagcaagtcaatttacccgcgacttcataagggatagcggtgtggtctcactgatcgaaactctgttgaactacccctcgtcgcgcgtgcgtacgtctttcctcgagaacatgattagaatggcccctccctatcccaatcttaacattatccagacctacatttgcaaagtgtgcgaggaaacactcgcatactcagtcgactctccagagcagctgtccggcattcgtatgatccggcacctaactaccactactgattatcacactttagtggctaattatatgtcgggcttcttatcactgttagctactgggaacgctaagacgaggttccacgtattaaagatgctgcttaatctgagtgaaaacctttttatgaccaaagaattactgtccgctgaagcagttagtgaatttattgggttatttaacagagaggagacaaacgataatatccaaatcgtccttgccatctttgagaatatcggaaacaacataaaaaaggagactgtattttctgacgacgattttaatatcgaacccctgatcagtgcatttcataaagtggagaaatttgcaaaggaactgcagggcaagaccgataatcaaaatgatcccgaaggagaccaggaaaactag

SEQ ID NO: 39722 - DNA, 4188 bp, Artificial Sequence
  derived and/or modified sequence
atgacgggcgcagaaattgagtcaggggctcaggtgaagccggagaagaaacccggtgaagaggtcgtgggtggggctgagatcgagaacgacgtgccattagtggtgcgcccaaaggttaggacacaggcccagatcatgcctggagctaggccgaaaaacaaatcgaaggtgatgccaggagcctccaccaaggtagagaccagtgccgtcggcggtgcccgtcccaaatctaaagctaaggcaatccccgtgtccaggtttaaggaagaagcccaaatgtgggcccagccaagatttggagctgagagactgagtaaaacggagagaaacagccagaccaacatcattgcctctcctctggtcagtacagactccgtgttggtcgctaagactaagtacttaagcgaggacagagaattggtgaatacagacacagaaagctttcccaggcgtaaggcccattatcaggccggtttccagcctagttttcgctctaaggaggagaccaacatgggtagctggtgctgtcccaggcctacctccaaacaagaggccagtcccaattccgactttaaatgggtggacaagtctgtgtccagcctcttctggtctggggacgaggtgactgccaagttccaccctggcaacagggtgaaggattctaaccgctccatgcatatggctaatcaagaggccaacaccatgtctcgcagccagactaatcaagagctctacatcgccagtagctcaggatccgaggacgaatccgttaaaactccgtggttctgggccagagacaagactaatacatggagcgggccacgggaggacccaaattcccgaagccgctttcggagtaagaaggaggtgtacgttgagtcctcttcaggaagtgaacacgaggaccacttggagtcttggttcggtgccggaaaagaagccaagttccgctcaaagatgcgagcgggaaaagaggctaataatcgggctagacacagagctaaacgcgaggcatgtatagattttatgccaggtagtatcgatgtcataaaaaaagagtcatgtttttggccggaggagaatgccaacacgtttagccggcctatgatcaaaaaagaggccagagcgagggcaatgacaaaagaagaggccaaaaccaaagcccgtgccagggcaaagcaggaggcacgctctgaggaggaggccctgatcggcacctggttctgggcaacagacgaaagcagcatggcagacgaagcctcaattgagtcttccctgcaggtggaggacgagtctatcattggatcttggttctggaccgaggaagaggccagtatggggacaggcgcttcaagcaagagccggccaagaacagatggggaacgcatcggagatagcctgttcggtgcaagggagaagacctcgatgaagaccggtgcagaggcgacttcagaatctatcctggctgctgacgacgaacaggtgatcattgggagttggttttgggccggagaggaagtgaatcaggaagctgaggaggagaccatctttggatcttggttttgggtgattgatgctgcttctgtggaaagcggtgtgggagtaagttgcgagtcgagaacccgaagtgaggaggaggaggtcataggaccctggttctggtcaggggaacaagttgacatagaggcaggaataggtgaagaggcccgtccaggtgccgaagaggagaccatctttggctcctggttttgggccgaaaaccagacctatatggactgtagggcggaaacgtcttgcgacaccatgcagggagccgaggaggaagagcccattatcggatcttggttctggacccgcgtggaggcttgtgttgaaggagatgtaaactccaagtctagcttggaggataaggaggaggcgatgatcccttgttttggcgcaaaggaggaagtttccatgaaacatggaaccggcgttaggtgccgattcatggctggcgcagaagaaaccaacaacaagtcttgtttctgggccgaaaaggagccctgtatgtacccagcaggcggaggatcttggaaatcaagacccgaggaagaggaggacatagtgaacagctggttctggagccgaaagtataccaagcctgaggccattatcggcagctggctctgggccaccgaggaatcaaatatcgacggcacgggagaaaaagccaagctcttaactgaggaggaaactatcattaattcgtggttctggaaagaagacgaggccatatcggaggccacagacagggaggaatcccggccagaggcagaagagggggacatcatcggtagttggttctgggctggtgaagaggacagactcgagcctgctgctgaaaccagggaggaagaccgattggcagctgagaaggaaggtatcgttgggagctggttcggtgcccgagaagagactataaggagagaggccggatcctgttccaagtcaagccccaaagcagaggaggaggaggttatcatcggttcttggttttgggaggaggaagccagtcctgaggccgtcgcaggcgttggcttcgagtctaagcccggtacggaagaggaagaaattaccgtggggtcttggttttggccagaagaggaggcttccattcaggccggatcacaggcagtcgaggaaatggaatcagagaccgaagaagagactattttcggatcctggttctgggacgggaaggaggtctcggaagaggctggcccatgttgtgtgagtaaacctgaagatgacgaagaaatgatcgtcgaatcctggttttggtcacgtgataaggcgatcaaggagaccgggacagtggccacttgcgagtccaagccggaaaacgaagaaggtgcgattgtggggtcctggttcgaggcagaggatgaagtggacaatcggactgacaatggttctaactgtggtagcagaactttggcggacgaggacgaagctattgtgggttcctggttttgggccggagatgaggcacactttgagagcaacccaagtccagtcttcagggcaatctgccgttccacctgttcagtggagcaggagcctgatcctagtcggcgaccccagagttgggaagaagtaacggtgcagttcaagccaggcccatggggaagggtcgggtttccatcaatctcacctttccggttccccaaggaagcagcctctctcttttgtgagatgtttggcggaaagcccagaaacatggttctgagccctgagggcgaggaccaggagagcttacttcaacctgatcagcctagcccagagttcccttttcagtacgatcctagttatcgatctgtccaggaaatcagggagcatttaagagccaaggaatccacggaacctgaatcctcctcatgcaattgcatacaatgtgaacttaagatcggttccgaagaattcgaagagttattgcttctgatggaaaagatcagagaccctttcatccacgagataagtaagatcgcaatgggcatgcgctctgccagccagttcacacgcgattttataagagattccggagtcgtctcccttatagagaccttgttgaattacccatcctccagggttcggacgagctttctggagaacatgatcagaatggctccaccctaccctaacctaaatattatacagacttacatttgcaaggtgtgcgaagagacactggcctactctgtggactcccccgaacagctgtccggaattcggatgatccgccatctgacaacaactacggattaccatacgttagtggcaaactacatgtccggctttctcagtctgctcgctacgggaaatgctaaaaccagattccacgttcttaaaatgctgcttaacctctccgagaatctgttcatgacaaaggagttactgagcgccgaggccgtttctgagtttattggtctctttaacagagaggagactaatgacaatatacagattgtgctggcaatattcgaaaatatcggaaacaatattaaaaaggagaccgtgttcagtgatgacgacttcaatattgaaccactcatatctgctttccacaaggtggagaagtttgcgaaagagcttcagggcaaaaccgataaccagaatgacccagagggcgatcaggagaattag
